United States Patent Application Publication US 2011/0014706 A2 - sequence listing, part 4

SEQ ID NO: 5067 - DNA, 1251 bp, Arabidopsis thaliana landsberg
  unsure (1)..(1251): unsure at all n locations
caatctatttctttttctaatttagaaaaaagtattatcaaaggttcaaaccggttttggttaagaacacaaaaggaatgatgataaacttaaattttcctaattacatcaaagtagctgatttgggatgtgctactggagaaaacacgttcttgacgatggctgagatnnnnnnnnnnnnnnnnnnnnnnnnnnnnnnntgtaaccaaaagccaccagaaattgattgctgtctgaatgatcttccggataacgatttcaacacgacattcaagttcgtacctttcttcaaaagattgtgcttcgtgtctggagtccccggttcattctactcgaggctctttcctcgcaaaagtctccattttgtacattcatcttatagcctccattggctctctaaggtctcacctacttacttgcctagtacttgcttaaatatgtagaaagcaaattaaaggttatatataatatataatggaactgtgagatttgtaggttcccaaaggactggagaagaattcctcgtctgtgtacataacgacttcaagtcctccaaatgcatacaaggcttatttaaatcaattccaaagtgactttaagtcatttctagaaatgcgttctgaggagatggtttctaatggacgcatggttctcactttcatcggtagaaagactctcgatgatccattgcatagagattgttgtcacttttggacactattatctacatctctacgcgacctagtctatgaggtaacatataaaagtaccaaatttcgacatttaaaaatttatcggctttaaagattcaaactttttttttggtcaaacaagaaaagattcaaactttttatgatccacaatatagggtcttgtgagtgcgtcaaaggtggactctttcaacataccgttttatgatccgagcaaagaagaagtgatggagatgattcgaaacgaaggctcattcgagatcaatgacttggagattcatggatttgagcttggcctaagcaaccatgacgaggactacatgttacattcacaaatatctaaagcagggcagagggaagccaactgtataagagcggtcagcgaatcaatgcttgtagctgacttcggagtagacattatggacacattgtttaagaaatttgcataccatgtgtcacaacatgctagaagcacgaacaaaacgactgttactctagtcgtttctttgatacgaaagtaatctgtcaactggagagcgca

SEQ ID NO: 5068 - DNA, 4377 bp, Arabidopsis thaliana landsberg
ttcgctacgagatggatcaacgagacgtggtcaggtcttggaggttgatggggagaaagctgttgtccaggtttatgatctttcatattattgtaaaagttaattctgcataacactagtttgttgaatctaggtgatgaatgcacatgctaaagagatcaatgccctcaatgattaattcatctatggctttcaggtttttgaaggaacatctgggattgacaacaagtttaccaccgtgcaattcacaggagaggtgttactataaaagccttctcctcttttaagcttttggcagattagttaaaattttggttggaagttttctaaaaactaagaggatgcttggttacagttttttcttgttctttttttgtcattatctgttattggtgtgtgttttcaggtactgaaaacgcctgtatcattggacatgcttggccgcatatttaacggctcgggaaagccaattgataatggccctcctattttgccagaggcataccttgatatttctggtgagcatggactgcctcaagtcaattgtactctgaagagaaggaaaaaatctgttttaaattgtttcggtcgataatttttataggaagttcaatcaaccccagtgaaagaacctaccctgaagagatgatacaaacggggatttctaccattgatgtcatgaactccattgctcgtggacagaagattcctcttttctctgctgctggtctacctcataatgagattgctgctcaaatttgtcgtcaggctggacttgtgaagcggttggaaaagactgagaacttaattcaggaggtaaatcatttgccccattaccaccaccactaaagtacttttgttttccaagtatcaaagtgtaagtgcctgtttctgcacattcactttctaactgatgtagaaagatttaactatctctaaggataggtacatttaaagggttataatttgtgatgccattgacttttcataatactcaacttctatgaagattgatatagcagtcagtctctcaattcctgtgtagttttgtttgctttgtaaactccattattaacattgtgcttttccaggatcatggagaggacaattttgcaattgtttttgcagctatgggtgtaaacatggagacagctcagtttttcaagcgtgattttgaagaaaatggatcgatggaaagggttaccctttttctgaacttggtaatttactagttactagtactactagtaatttctatgcttccaatcttacttcttgtagtactatcatattatatcagtgaggaattgaccttattatgcattccactcgaacaggccaatgatccaaccattgagagaattatcactcctcgaattgccctaacaaccgctgaatatttggcttatgaatgtggaaagcatgtgcttgttatattgacagacatgagttcttatgcagatgctcttcgtgaggtaatgagtttcactgtcctttgtgtatgtcccatgattcaaaatttgatttaagctttgaataaaattaacaaacgtgaactctaggtttctgctgctcgagaagaagttcctggaagacgtggatatccggggtatatgtatacagatcttgcaactatttatgaacgtgcgggacgtattgaaggaagaaagggttccattacccaaatccctatcctgactatgcccaatgacggtaattttttttatcgtttttggattccattcatatcaaatgttttttgattaaacaaagctcataatatttcttgttattaaaactcagatatcactcaccctactccggatcttactggttacattactgagggtcagatatatattgataggcaacttcacaacagacaggtgcaataagctcgacttttttgcatatatctcattatgagctctctaacacatcaaacataagcaagaaaggtttctcatacatttacaatgatctctgattctgtcttggttcttccctaaaacagatatacccacccattaacgtgcttccatcactttctcggctgatgaaggtagccttgcaatttgattatacccttatggattcacatggattgaaacatacgattacttattcgcttaatcattgttccttctacagagtgctattggtgaaggaatgactcgcaaagaccattctgatgtgtccaaccaggttctctacctataaagaaccttacttgcctaaagtagctcacatgttcatatagtatcgaattaattgacaacattctctttaccttcagctatacgcaaattatgcaatcggaaaagatgttcaagccatgaaagctgttgttggagaagaagctctgtcttccgaggatctggtacctctctctgacttcaccaatattcgtgttcctatcaagatactgtatatgcaacaataattactcacaacaatttattgtgttgtgtgtttgtagctgtatttagagtttctggataaatttgaaaggaagtttgtgatgcaaggcgcatacgatacaaggaacatcttccagtcgcttgacttggcatggacactgctccgtatcttcccacgtgagcttcttcaccgtattcctgccaaaacacttgatcaattctacagccgcgactccacaagctaaaccttttaaaacaagctctatgttgctccattcttatcttatttggaacttaaatcataccgagagaagacaaacaggattggttgcgtgaaaacaaaactcagagaattgtgaagttgggaattttttcttttgtttttccatttgtataataaaggtttgtgtagagaaacttcgtacaaaatctatttataaaccacttctgctcctgtcttccaaactggtgaatcatgtcttttttgttgtggtgtaataataatctcttccaacacttttaaatatatgtacaccattgtttgtgcaatttgttgaatattaatcttatacttgatctaattatctgcctatgagaacctccacaattaagtcaatgacacgcaagttgtgtcacacaacccaaactaaggatcagtccattggataatttgggtaaatatatataacaattcagctttcatggtatgataacaatttttaatttgattatgtttctaatcacaaacaaaacaaaagaataccacaaaactatgtaattcacaactcttgttcaaagacacaagacctttatgggtataccaatgagtaagagtcactctaagccatcctaatttactctaacaaaatctctatcttttggtattctctaatgataaaccttgaatcccatcaaagcaaggaatgcactgagccgcagggaaaaaacaaacatcaactctctgtaatttctagttccaactttgcatcccatccaccatgaaaggaaacagtttactgtcctgcccaatgaaaaaaaaagataaccgtaagaaccaagagccaacacacagtactctatcttaatcttgtatgcacaccgataacaagcttatataatccatagtctgtgttcatatatgtgtgtgtgtgtgtgtgtatgtgtgcatacttatgttgtaggagaggaagctatgttgaattaaagagattagtttatgtttacaacatatgatcactgatgataagtgattctaatcccttaaccactctattactgagatatggacaaatttgcttatttgaaacttaggaggaatggacagttaccagaaaccaaacacgctagattttgtactcgccaacatgcatccatttggtagatgaccacttgttccctctaatcacaggacatccacctagaaacaagaagacatatattagcaaccacaaactcaatggtatcggaaaaaaataacaagagtgtttcgaatgactttcaaaactgaaggtagtttaccatgcaaacttgtaggatctagtgtagcatcaggcctcatgctccagaaaagcaatgcatcacccattctcggctttacggaaagtccctttttcccacactcagagagctcattataccatggtacagaactaaaattcatattggcagcaggaaacactgtttcaccgccttcctcaacatccgacctgtagaataaggattttgaaggcaaaattagtagatacttgaacatagcaacctttaaaatcaagtaaagttagaaaactcttacagatacataagcattgtagccatccgttgacctccatttttagtgttgaactcatcaacaaaataatcatagtgtggttcatacttttgccctgcttcgtagtgaagaacttgaagtccttcaccatgatctgcacacattcattgattcatagttcatcataca

SEQ ID NO: 5069 - DNA, 1422 bp, Arabidopsis thaliana landsberg
ctgaaaaccaggatgcttctggcagaataggagggccatattttcggctttcctgaaccgttaatatgcgcccgagcatgttcaatgatacaggtgttttcaaaacctgaaagacacaaaccggtttaaaaaaaatgcaggaagcagaaatcaaccaatcatttcaacaaatctgctaaatgctggagggacgaaggatttttatggtaaattacctctcctgtgaattgcacggttgtaaacttgttgtcaattccagatgttccttcaaaaacctgaaacccttaagtgataagtaagtcactgaagaagtgactagattcacgaagtttgtgtgtaagtattattcaatgtttgaagtaacatggacaaaaaacaatcctaaacctgcacaactgctttttcgccatcaacttccaaaacctgaccacgtctcgttgatccatctcctaagcgaatattaacaatctcctggtactttggaccctgatttatcattacattccaagaagttttagtcagttaagttaccctcacaaagtaaattagcattgcttaatgaatcaaacgatgctcttaccttcactttgtcaagaatgaccaatggtccagcaacaccagaaacagttctatactctgcaattcaaaagattcatgaatcagtcttatactaaagaaaaatagttaacaacatcagcaaggtcaaaaagagccagagtactagaatatccctataaaaaaacccagatttggaggataagttctgaatcaacacaatcaaaaacagaggaagaactagaaacaaaatcaatatagtgtgatccatgatcggtgacttacccatgccgatctccagagtcccttcttcgatgtcgagatcattcgtccccattttcacagatcaacgataaaccaaatcaaagcagctcctgaaatcaatcaacgacgcagtccgcaattcaaaatcaatggaaattcaaatttcgatccaatcatagaaactcggatgcagaaagtagaaaatccggtgaaagtgaaacaacttggtacaaggaaagagacgcaatagaattttctgatgatctaaatcaacaaagcacatacctgggaacggttcgattcgagcagagagagagggagagagagttatggtttatgagtctctctgtgaacgtagttggaccatatctcaaatctatcgtttttgtagagggagggctcttatttacgtgtaattacagtttaaataccaaactctataacattacaaatatggcccattaccagattgtgttttctgccacgtcaccataattgaaatcaacggttagagatgaaaggagaggtaactgtctcgcttagcttccgagtaatcgtagcccgtgcgtatactcaccgacaccgtgcctctgtttaatcatc

SEQ ID NO: 5070 - DNA, 8541 bp, Arabidopsis thaliana landsberg
gtagaagctatagctagtctgaagaacgattcagcggttgtcatgaaactcttcaagtatatcatcttccctcgttttggagtgccacgcatagtcattagtgacggaggtaagcatttcattaacaagattcttgcgaaattgcttttacaatatggagtttagcatcgggttgctactccctaccatccacaaacgagcggccaagttgaagtttccaacatgcaaatcaaagacattcttgagaaaatagtgggtaaagcgagacagaagtggtcctacaagttagatgatgcactgtgggcctacaggacagctttcaaaactttgcttggtaccacaccttttgatcttctatatggtaaagcttgtcatcttccagtggaattagagcacaaagcagcttggacagtcaacatgatgaatttcgacatcaaatcagccggagaaaggagacttattcagttgaatgagcttgatgaaatacgaattcacgcttatgacaactcgaagctctacaaggaacgaacaaaagcctaccatgataagacgatctttactcggacctttgagcctaatgaccaggtacttctttatgattctagattgacattatttcctggcaaattgtcttcttgttgtacaggtccctacacatgtccactcggttaggccatatggaacaatcattctcaaaaacaacaatggcaaaccatttattgtgaatggacagagagtcaaacactattggctgaatgcgagattccagtagaaaagcctttggatcttctggactcacctgttgattaagcaagtgcagagtcaagctattgactataaacaagcgcttagtgggaggcaacccactagtaagtatttctctttttcatcatttcattcatttgatttttaacttaggattttttattttataggatttttattgattaaaagaaaaaaaaaccagtgttaaccaaaaacgcgatggtgtcgatcgacaaggtaagtcattttaacctaaacttcatcttcttcatttcagatttttttcaaaaccgccgaaatcacacttttccctctagattcttcgattcttcactgtttcttgtgatttcaggctctaaactcatcaaaatttcatcctctatcttcctcaaatgtcaattccatcgatctgcaagatgacagggcagaaaaagaaggcgaggaagagcgttggaccttcctcctcctccgccaccgctcaccaacgctggagcttctccaccgccgccgtctccgcccctcccaaccgcaaccacaaggcgtagctcctcaacctcctgtttatcaatttccatggccaaagctttcaaaagagagatttccttttgaaagggtttggaagaaagatgtcaacaaggaattcactaaaggtgactatatcaatcgccctttttctccagattgggatgattatgatactatattctataatgcctggatgaatgtagaaatttggtctactcggtttgcggatttcggtttgatgcagcgtttgcagatagagaaatcagttttagggctgctagatgacataggtttgggaaccatctgtagtaggcagtacgatctgtatcctgagttggttaaacaattcatggcctctgttagggtttcttatttgcatgacaggaaacgcaacgctcaggaaggagctcttatcttcttcattcgcggtgtcagatacagtttaccactgcgagatttgtgtgacatatatgggtttaacaatgatctcactggagtttccctgcctggtcagtttaaggattgtcgaattttttggagcaggtttagtaatggaatctatgattccaaggacgcagttcactcagagatccgccaccctgttctacggtattaggttaggctgattagtagcacaatgttgtgcaagatggagtctggcaagatgagactctctgagttgttactgctctatcacgctcttcatgacttctttcctgacagccttggatttgagcaggttgaccgtaatgtcaactttggggctgtgttcgctcatcacttggtttctctcaataccaagccctttataggtagaggacagaaatctgagagagttggcagtcttctcactcccatattcaagcatttctgcatcaactttaagggcgaagaagtcaacaccacgtgtgtcattatggatgaggcttaccggaagaactctcactggcttaaaggcaacttaatgtggtgcttcagagatgatagaggtcagcacatgattcagttacctcgccctgcacttacagaaattacaggagagcatgaggagataggctttcatcccgatccttctcttgtgcatgccgcaccacgcaccaggcaacagagaggttcagttgcaggatctgcgcctacacagaccgaggacgagttcattgaccctgctgggggtccaagagttggatcttcctcatccgctcttccatatcaattgccttctcctccacccatcccgatggagccacatgtctttcagcagtacgtcgttgatagtttcaagagcgtctggaacgccatagatacactatcatcgcacggttgtgttgctcccactcgtcgtcgtcctcgctcttccgcacccacctctggcttagagcatgaggactagccatcctccttatcttgctttgttttctgactttgttttggttcatttcagactattggttatttgtttttgaaacttgttgcacttattttcctatgctttgttggaactattgatgtgtgttttagtgatttaacagtctaactgaaggatccatgtgaaaacactaaccaagggtctacaacaatgagcagaattcacaaaggtaagcgaaacgaccagagtgtcgatcgacaccaacatggtatcgatcgacaccaacatggtatcgatcgacaccactctcaggtggcaactcacgttttctaacttttaacttttgattatttctctttcgattcctctagtttactaactatggggacagtgttatctaagtctgggggattcagttactaacttcatcttttcttttcctatgagtcagttgtgtcattttaacttagatagtcgttttattgagtcaaaacttttgtctgaaattatgatctatctctcgagtttattgcctggattgcttaagtactgcagatttaaatcaatcctactaatggaaaatccagaaagccaatcaacaaacttaaggacatccattcccaacataatccacagaggttggagctaatctcactgctcttgcttttacctcatcaaaacggttagtgtacataggacttgactccttgttcatacctgataagtcgaccaatgtgataaaaagaatatgttcctctccccttataaaaagaaaaaatataatgagagatagagacgactttcagatagtgtataggggtaggaatgtttcctatgaccccaatattatacattatttggaatgatcaattacaaaggttgcaaaactgccgagggtgtcgatccagtatgcgagttcccctttgtttactctctaaaaagaataagtctggggtagaaaaagaacaccgaaaaagaaaaaatatatatataaagaatggtcaatttatcatggtatagtagaggaatgagtctagaaggatcttgaatgttagcttgtttgatgagacccagcgatgaaagccaggtggatatagttgtggaacttaggtattgaatctagaatgttgtgtaagcttgtagagaagtacatgttggttaggatttgattagacttgctaggcatgtggatttagtttggatgatcatggcaatagtctagagaatgttgggagttcctttgttttcaaaatctcttccacgggttcggcttttgtgttttgcttgagggcaagcaaaagctaagtcttggggagttgatatatcctattttcaccgattttatctatgtgtttggtaatggattttgagtctttatgttatttctcgagtctttttagtgtcttttcaggtattctatgcaacgggacaacaatggagatgaggagacatttcgagcaagaggtaaggaaaaggaagctaaggacgattttggacccaggaatcaagaggagtgtcgatcgacacactcttggtgtcgatcgacaccagtttcggccctgcaaaagtcctatgacgcttacaagtttacaaagaggaaaattgccccaaaagacttccttatttgcattattggtccctggacgttttatagggtctttatattgtttttagacctagttttcattattatcacgttttatcatcaagttcttatcaagctttttgaaaacccagttactgagagacataagctattcaacgagtgttttcagagattgattcagatcttaatacagtgaagagatcctttctttcccttaatctatttgctgtgtttatgttttcatacccaaatatgttgtttgcttcaatcaatatgtctgagtaatctgcttgttaggaatagtgtttctcattagggattcatatggtttagtagattgcccccttgctacgttatctatagaattcttcatctttaattatgcttaatgctagatctagagtaattaactagatcttgaatctagacaatagatatgcccgccataggtatctgtagttagatctattatttgatgagtctggtttataggtgtgtaataagaatcggcctatctactaaaatgaacaattgaactcgttaagaatgcatatttacgttgatagtttctcggcttctctggttattataagctatagatatagggagttttgcagcacgcccaccggttattccataattagagtttgagtttaagaatggttcgataacaacctagctttcattagatctactaactaatagttaccctgagaataccctgttcctagctctttattaaatcgtttacaacacaatcaatctgctgtctttttactttgttctcttttattttcactattaccatgctagcttaatctcgacattcaactcactgtttgaacaaaagaactccgtgaattcgatcctaaaatactacaattgatctcttatttgaaagagtagttctaggtaatttgaaccatatcaaatttggcgccgtcgccgaagttcttgagaatcaacattgagttttgtttagagatttcgtttagtttttacttctattttgttactcacgtgtttcttgttttcttcttttctaagtttcaggtgtatgcctaggcaaacaaggagcacaaaacagaaggagcttatcaacttgtctgttctggacttgggaaaacttgaatgcaccaaacgaaaaactcagaaattagcaatggctgacagagtcatccgagctgatgcagaaggaattttgacagataaggatgggcaagcctacaatgaggctggtcagaaattggatgatcatggaatcatcatacctgaggacgccaatgaggatcaggcgcgcctcaatgcacaattagctgctagagacgcagcagggctcggtgtcgagcgacaccaactgggtgtcgatcgacaccatcatgagcagcgcgcgaaagtgatcggtgtcgaacgacataacagaggtgtcgatcgacaccaacactagattcctgcagctattcctccagctgcggaaccacgtcgtactcttggggatttcaacaggcctgacctgttctatgctaatcgatcagcgattgtacccccaccattccagggtaacgactatgagctgaagcctgtctactttgctttagttggccagcatcctttccatggcttatctcatgagcagccaatggatcatatcgagcgatttgaggaccttgttatgagcatcatggctaatggagtctcagaggactacctactgtgcaagtttttctcttattcacttgttggggaagcaggttcttggctaaaacaatttaaagcaggttccctcaagacttggagaagcatcaagatagccttcttgaacaatttttacgatgatgctaagtctaaggtagttgagaaacaagctgtctaccttcacacaaggtccagctgaagctttcaaggccgcttgggttcgttccaaggagtaccaacgagattgtccacatcatagtttcagtgaggtacaacttctaggtaccttcttcagaggagatgattggagataccagatggctctagatgcagccagcaatggtaacttcaatacacgttacccagctgatgctacagccctgatagagaaccttgcttgcagcaacagtaccaagaatgctgattttgagaggaagaagattgctggagctatttcaggaaataaaatggcagaggtgaatgctaagctggattcggttcataacttgctcacaggaaagaagcatgtccactttgcagctgaggaagagattattgagcctgagcctgagtcagaggaaggagtcttctacatagatggtcatgaatacaggaagtttgggcagccacaaggcaacttcagtggcaacaggtttgcagggaaccagggttcctccaactacactccaaagcctgctttccagaagacttttcctcaaaacaactttcaaaggacctatggaaattcaacttactaagccccccctccaccctttgtagagataagaatggaatccatgcttgagcagattcttgagagccaaacaaagcttgttgttgaatttaatggtagatcgacaatgatagctctcacttgaagaagctagatgtacaggttgctcaaactgcacagtccattcagagacaagagggctttcttcctggaaaaccctaatgctaacccaaggaagagttgttattgtacacccgtcccgctatataggccaagacggcatgttattcatctgatcttgccaaaacatttttttaaatttcacacacgaacaaaatattgcacacaattcctcacgcttactaacctgaggaaaaaaggaaaaaaaaaaaggtgagtaaagaatactcagtgaggggaatcaactctgcccactgaaacgtagaacactttctaaagctatacaaccatcatcataacatataaacttagacacacgcaatcaacctcacgtgctttaacttctaacaacaaattcataacaatcatcttatatatatatataaacatacacatcgttaggtccagtcatcttcgtgacaactagaacctcatgagtggaggctggccctcgtggctgagacactcccatcccgggctcgtcagcttttcttgaccaggtgttaaactgccggtccatcactgtccacatcactagggagaccacggcccatagctcgattctcccaatcattcatacaaacatacataatcatcatagttacatacttatacttaaccttctcatacataatatttcatagttaaatattatcaccatacatatcaatcaataatcatcaaatcatatcatcacataatcttatcctatgcaataagatctagcctacatatcatgagtcaggaagcataacaaaagaaaatgataccatgcttcgcaaataccaccctcaccttagcctagtcaaatatgacaacacacttctccttctttcacatttagacaaaattattatctcaattgcgaccacatgctcttaagctctatcttgaatctccttcgaccaggacctcaatacatgagttatgaaagctcctgcaaagcttcagctccaaccgagctcgtttgcgccatcaaacaataaaactcgttacgatttactccatataaaactgtctcgtaaacatagttttaggtcaataactaaccgttagaaacttaatcccaccgttgattatcgacccagtaataccatgaagcgctccaccaaatttcgttccgatcagagttgttacggacctccaaacgttggctcgaagaagctagtacgaaactgttttctaggattccacatatttcgtcagttacttgtcctgaaagaaacgcacataacttctctaatataatcccgattcaaagtccgtcagttgctataaattcttggaaatgtaatgtttcgaacaactccttaatcgtcatctgatactttctgtaaagacagtaatgagtctcacaaaaccccatcttgaaactgttcttcctccctcttttctcttcttcttccttctttgctttgcccattctctgattttacttagatctgcttcatctcacttctccttaatgacacaaacgaaatttccatttcttaatgcctttcctttgcggtggtgatgatctcttctcctacgccacatttccgccttcatctccgcttccttctcttcttctctttcacgatcttctcaattcttattcttctcctttcttttctttccagatcatggcagtttggttatggagacaataatgggtgtaacatcaatagg

SEQ ID NO: 5071 - DNA, 519 bp, Arabidopsis thaliana landsberg
gatccatcttctaagcgaatattaacaatctcctggtactttggaccctgatataataaacatttcaacaaatctatacagtgagtttccctgacaaatgaaaaacaagaaagcttctattcaatctcaaaaagcttcccaatttctataccttcactttgtcaaggatgaccaaaggtccagcaactccggagacagttctatactctacaattcaaagatcctcaaatcagtctcttacaaagacaaaaacgtaggtaaaaggcgctaaatcataacattcacaggaaacaactaactaataaaaagcaaagcaagacaaacacaagtgtttatacataaatccacaaaggaaaaatactatgagcaacacaactcactaactaaactagaaccgaaggcaatacattattcgacactccatttccaattgcaaactaggtgaattcaaacttatattcaataagattaagctagatcgctcgctaaagcttgaaaacaaccccagaaatgagattc

SEQ ID NO: 5072 - DNA, 3671 bp, Arabidopsis thaliana landsberg
accccataatcttgcgagacgacaacatactttggacaaaatcgtatcaacgcagatgggtttataattcgcaaagtcacatagggaagtaagaaaaaacatgttaatactttacctccacaataaagctgatggtgactgtcgcatagacaactgagaactgatatctactgaggcagaatttcctaaggggcactggagtccaccagttataccatcttcagaacttaaatttttcatcaacagactatctccaccatggtcttcttccctcaaagacaagagtaccattcgaagcatgcataagaaaggctgatcactatctagcaactggtagaggcctgacatccctcccatcccggtaccagatcctccaccaattcctaggccacctccaagtccagactcatctagcagcaaggcttgaagcatggatactgattttttaaccaaaggaagttcgatccagttaccctgagcatctttttgtagagcatgcttccaagagtcccaaccacttccaccaccaccaaaacaactagttttagaaggtagtccaacaccgtaccacaatcgacttctgtacttccaagcatcagccaaatccctggtacaacttccatatgaaacaaaagcgcaagaaacagattcatagggctcagctgcagcagcagcagcaagacgctccattacggctgtagatatctggccacttgcatcggccattgaagcaagtatctgaagaaaaagtaaaagcagggaaatagcagaatgttaatcagatgatcagaactatctttcttaaatgatgttataaaaacaaaaaggaaaaaagccaataaataaggggagatattgatccggaagaaagaaattgagagtaatttccacttacatctaaatggacccctcctgaatcactggacactgaagcacggctactagaaacctctgatgattctccgaccgttggcaatgtgtgtgaacggtagttgggaggataaacaagtgaaagaggagatggagagacatcaactgcgcttgcagcacaattttgcttgctttgtagtcgcaaatgatcttcgacaagcatcaaaatcacaactgtattttccactagaaacactgaaagcagtgcagcattttctactcccgcttttgcatcttttggtgttagactctctgccgcgaaaccagcagatgctgcagctataacttgagtctgtttggggaaagtttaatttgtagttaaattatagcagtcgaccaacataacagaacaaggcttgaaagcttactgtctttatcaatattatagctaatatagagcaaataaaaaaagatctgacaatattttcttgtgagagtacgaccaatgtcaactatacaatgcatgtgtaagacgaacttcgtgtttctctagcaaggaattgtataactaaccatataagtcaaagataaaacaggagctatacctgagcttgcagttcactggcagcaaagtctagcaatccacctaaaagtcttcgtttgaaaattggcagtgattcctcacgcctttgaaaaaagtattaggaaaaaagtgtaaaaataattgaacagaaacatgcttatctcaaaatacatggaagaagcactacagtgcaacaacaatatgatccaaaagataccttcacaaactaacaatgtgacaagaaaaacagatgacactcaaaatgttattggcatcccaaaaggcacgcgtaaaatgtggcacagtagtgcatgaaaatacctaattcgtttctccccagtgctagacccaccaacaaaagtaagccactctgcacaatgaattgtagcctcaatatcctgtaaaaggaatcagatgtagcgaaaaatataaataaacacaaatgagcttggaaaaaacgtgaaagggaattaatctggtagaccgctgaaacaaacaaatttaccttccagccatccttctggcgcattgaatgttccaacattatgatcaagaagttatgaatcagatcctccacttcagcagaaccgggtgaagcagattgtttccctgcatctttctgtgtgtacgcagaatagtcagcatttttaaagttttatggtacatgcttaagagacttgccagataaaaaatgtaactcgccttatcacactagtgtaaatatagccaacttggctcattactgatacaataatcatggaggcgaactttaaaatttttaacgtttgagttatacctcgtagttagagattaaaatctccaagatccactcaggccactcttccattttggtcagactactcctattttctggatggctacaagccaaaaatagaatatcctgacgtagaaaaagtgagttcagaaagagacattgtagagaccggacaagtagaagtttgtagagcactttcacaaggtgcatttggtgcacaaaagtgtctttaactatgacatttatacctgaagtgctcgattttgtagtgccttagatgcagatggtagagaccgcaggaggactaacaaaagttgaggatgttcaaagcgatgacctgaatcgtaaaagttaaggccatcttctgttgatgaagcattgatctgcaagaaagatccttgacattaacccaggtatacatataaatttgactaaaaaaaagttgcacctcagagactctctttttccaccaaattcttgacattaaaccagatacgcttaaagatagatcaaacaaatgtaagatatatcaagaacatgccataccgaggccccaagcaaagttgtgtagacattgtcggtcatcaatctgtttggagctgcttgaaatgctttcagcagagcaaatagaagcaatgcgactttatcatcaaacattgttccaccattttcatggagcccactacccatgaggttacttgtcacatcagaacgggcaccaacggaaaatgttaagtgcccactagaaattaaagcaccaatcaatctgatgatcccaaccacaacagcatctctattgtcaacattgtacacgttatttcttgcactatcagcacttattgaaagacttataccaccaatttcagctgatagtctctcagcatttatggaattggagatggaaactgagtcactatcacaaatgacaggtgtggaaccatgcacttttacttgtcgaactgactctggtacattcagagacccaacattatcatcctcaacagaatttccatcaggaccaggaaggtcaaagccaatctcattatcttgtggaactgaatccaactgttttaccgaaccagactcgttgtacggactcttttcacttggatcagtcgatgacctttttccactcctacccatagctaaaacattatcctcaccagttttagcttctctctgcagcagaacaagaagtgtttctataccaccagacgttataaatacctctgcaaacatctgagctcttgcagcattcggctgtacaaccaacctatacataaggtgtaataccctcgcaacctaagaatatcaaaaagttggacgtgtcagacagcacgtattttacgctccatttggtaattgcacctaccaacacaaaaaagtgcaatctgtaaaaccactctctcttaaaatgaccctcatggcaccattcaaaacatt

SEQ ID NO: 5073 - DNA, 1544 bp, Arabidopsis thaliana landsberg
  unsure (1)..(1544): unsure at all n locations
gggagagaaaatcacgcagactactgaaagatattatactcaaaaaagaaagaaagaagaaaaattagctcacaaaataacaacaatataattaatacccaaaaaagaaaaaaaactaactgagtccatgttgaatagatctcctatagatgtaaggaaatactcggcttctacatcttaattaagcattacttcctatttctaaatagatagatttgttctgactcattatgatttaagaagattcaagagcttgtctcccagacgtgattttcgagacagccttttcatcaattttttctggcaccggtagagcgttagctcgtcggtgccaggagctagcttcttctcaccggtttcctcccataagctctctcatcggtttctctgttttttgtttcgtgttgtttcgtctcttttccctcctattagatccataaagcttcattaccgcacaaccttcgaaactactcccatctggtattagctcttctcttaccttgttcgcgattctcgtggatccctctcctcggctttccttaaagtcaagnnnnnnnnnnnnnnnnnncgcaatggatgagagctcggcctcgacgtggaaactgtggaggcttcaaatcacaaaagaatcttcttctgcagaccgagattcatcactcgcacctctcgatgtggtcgttttagtcttagaagccctcaattcggtcaccagaatgttgcattcagttgtgccaccgccgcttttggtgaggaagagaagaacctggctaaacctaatgggtcttcggtttgggccaagcccaagcctcctttgccctccctcctgtcctttacccaaagctttgaagcccacaaagacttctgctgacttatgcccacgtcttctaaggccctggtcttgttttaattctattctgaacagcccaaattttctgaaactgtcatcgtttagggattgttatggacgccttcctgtaatggtgatgatggatttagtttggattagttgctatctttcacaaaacctggttgctagttcttatcgtgtggtccgtttgcgtgattgtccgagtctgatctcaagtagtttggaagtagtttctctttggaagtgtcctagattgttgctgcccgtgtgaagtatcgctaatatcctgtcaggttccctccctttagcaccctttgtctctgatatggctggttatggacgccacgctaatttacccaaccatagtcatttgcttggtttcctttggaccctttccgagactagtttacccaaccatagtcatttgctttttagagttaagagtaccggcattatgacccgatctctacggagtaggtgttaccaaagcttattcatctctctacttaccctttcatcaattatcgagttcagtcatgtattaatctattgcttggataatttgctatcttctggaaggtggggaaagtacggcattatgaccatgtcttcaagaggtggttaccgtctctttctcaacctcgttaacccgctagcctcctccatggagcatctt

SEQ ID NO: 5074 - DNA, 892 bp, Arabidopsis thaliana landsberg
tgatctctgatgacatctgaagatactttttcataattttctttcttctctgctcattgttgtggtttttatactatattatatgattcctgaagaaaatggtgcttgagttttagatatgaggggttcatattttcgagaacaaaaatagaaaagtaaatgaatgggagaaaagaagcaaataccctcttcaataaaacgttcacataaaacatttataccatagaaattcttaattctaacaaaagatcctttgtagcacattgtgtaaagcaaacattctagtttaatactggatcagaattacgagtttgaagcccgaaagcggaaaaatacttttggtgatttttataatgtatcttgtatggcaattgagatactatctcgtattgttctttcttctttgctcattgttatagtttttatactagattatatgattcttgaagaaaatcgtgcttgagttttagatatgagggagtcatattttcaaaaacaaaaacagaaaaggaaatgaatgggtgaaaagaagcaaatactcttttcaataaaaccttcacataaaacatatataccgtataaattctaaattctaacaaaaggtcgctgtagcacattgtctcaaacaaacattctagtttaatactagatcaaaattccgggttcgaagcccagcagcggaaatatctttttgatgcttttaatactgtatcttgtatgacaattgaagatactttctaatattgttctttcttctctgctcattgttatggcttttatactatattatatgaatcttgaaaaaaatgtgcttgagttttagatatgaagggatcataaattagagaacaaaaacagaaaagaaaatgaatgggaaaaaagaagcaaatac

SEQ ID NO: 5075 - DNA, 623 bp, Arabidopsis thaliana landsberg
  unsure (1)..(623): unsure at all n locations
ctaagcacacttttcttcaagaatcatataatatagtataaaaaccataacaatgagcattagaataaagaacaatacgagaaagtatcttcaattgtcaaacaagatactttataaaaagcaccaaaaagatttttccgctgtgggcttcgaacccgtaattctgatccagtattaaactagaatggttgctttagacaatatgctactgcggatcttttgttagaatttagaatttatacggtatatatgttttatttgaaggttttattgaagagagtatttgcttcttttctcccattcatttccttttcggtttttgttctcgaaaatatgactccctcatatctaaaactcatgcactattttcttcaagtatcatataatatagtataaaaaccataacaatgagcagagaagaaagaacaatatgaaaaattatcttcaattgtcatacaagatacagtattaaaaacaccaaaaggatttttccgttgtcgggcttcgaacccggaattctgatccaatattaaactagaatatttgctttacacaatatgctactgcngatcttttgtagaattaagaatttgacagttatatgtttatttgaggttttattg

SEQ ID NO: 5076 - DNA, 3148 bp, Arabidopsis thaliana landsberg
ggttaggggagtcataatgattagtcaacaattaaaacaaaactaatcaactcgttgaacttatggcagttttgacttccgcttctttagttgtctgaaaaaaagaaagccgagtcaaattctctgtttaggattcgctactagtcagctcgaagaaccattcaattcgagacacgtgtctgtccaagtctcggggacctcaaatacacgaggcccataagtaaatgggcttacttaagttactgcattgagaattgtagaaagctggattttttattttaacaaaatttagcaaataaccatacataaataaatagcgattgtgtaattatataaaatgcataatcaagaaattattaaaaacattatagtaatggttactgtatctaaacgaacattatcccaagctaaagacatcgaaaggtgaagctttctcggtcagcgaagcaacagagtagccttgcataaacttcctcagcttaactaactcatcagaacctgagagacgctccattagaatctccattgtgatctgatttggttcacaagactgttcgaccatctcatccatcagtttaagtaatgtctctccttgggttttctcgttaagacacttaaacaaggcattgtaagtttcaacattaggtctcaccatcttcatcttcatttcctctttcagagagagcgcttgcccgaaattccccagcttagaaaatgcgtttatgagaatgttgtatattacagtgttcggattgacctttgagtgcaaacccatgtccttaaagagcttcaatgcttcgtctaattcgccgactgagcaataagcgtcaatcaccgctccatatgtcgtgacagtcgggtctaacccgtcttctctcatctgctccatcattctctcaacactctcgaagtccttgtgtttaccgaaaaacgaaatcagagtgttgtaagtgatggaatcaggtttcttcccttctttttccatatcggttagcatctcatagactttctctgcattattcttatcacaaaacaacccaataagcatgttgtaagccaataagtcaagagaaaaccctccttctttcagtttctccaccactctaatggcgtcatgatcccgtctaacttggcacaatccagagatcaaagcataatagatctttgcatcaggagaacaaccagcttccaacattttttcataccaatacatagccttctctacattactgacgctgcaacaagcatgaatcaatgtcatataagtaaccacattccctttcacgccttccttttccatatccataaagaatacaaccgccatgttcaatccatggtgcctgcacatcccaccaacgattgtattaacagttaccacattaggtttaatctcgtcctctttcatccgagaaacgacttctttagccgtctcaagctttccagctctgcaatacccatcaatcaagcaattgtaagtaactgcattgggcacacatctctcttccagtttcatccttaccaataactcctctgcttctttcaacctccccaccttgcagagcccgtcaatgagagtattaaaatgaatcgaatcagctttaatcacatttccatcatcagttctctttccacgcatttgttcaaaaacttcgagagcttcatctacccttcttgatttgcataaagtgttaataagaatccctaaagtcacaacatcaggccggattttcacctcatccatcttcaagactaaatcattcattctactaatgtccatattccttcctaagcaagacaaaagcgcattgaagggaggagcttcaagtggggttttgttcttcatcaggtcgctcaaaatatcccaagcagcattggcgcgagcatttttgcatagacttgatataaaccgagtcaaccaaacagagtttggggagacaccatgagagctaaatcttgaaatcaaagcaattatcttttcttctgtcaaaagccttcccttccaaacctcgtgtaacacaatatccgctgtgattctattaggaggaaaaacagattctttctgaagcatttcgtcgagcaccttgaaggcatcatccacaagtccatttcttagcaagacgtctaccacaacattacgaacctgcgagtttttcatattcgaatcgagtctttcgtatacaagaaccgactgattcaccatacccatacgcccaaaccatcggatcagaagattagtggcaacgacagtaagaggaatgttcttctctttggcgatctcgtagagacggagaagtttatcacgcgggtccggttcactaccggcgaattcaatgaccgactgaagcgccaaggagagagattcttcacggcgtttcagagactgagacttcgcatccaggtactcgaagaacgagattgctagagaatacgatcctagccgccgcgtgatttgcgagaatactaaaggagaagcagaagaagaagatacgacaagcgcacttagcgactcgctcgacgcccaatcatgttgcggggtattttgaagagttttcacaaatttgactactaccaattcctggctctccgatttgatttccggccgtgggtcaacatcataagaaaaacgccggaggaatcgagaatggttgagcagaatataagagttctggcgccgggaaattgatagcatgatactcattgtctaaggttttgaaaaagacggccaccgggaaaagtgagacgacgaactctgttggcgaattcaacgtacaagaagttgggcccattttaaataatgggcttacacatatttagcccaaataaacctttacaatattacacaatggggacaaaaatttattttttctcataaaactgaacgtgagctttttatcatgctgattacattatatttataacaaaatgaggacgaatctttatttttctcatataattatcctcattgttttattaatcaagccaccaccctgaactctgaaatagctcctatgaattacactagttttacccgctaataactatcctattaaagggtttttatttcttcaacctactcaaaaaaaagagctacgagaattgcaacagctttgtgactgagaagatggtgaatctgaatgatccatctttt

SEQ ID NO: 5077 - DNA, 3628 bp, Arabidopsis thaliana landsberg
  unsure (1)..(3628): unsure at all n locations
tttatgactcactgttgtaagagccaactttaagatctaaactttaatgggaaattgaaaaactatatgagaatgggttttgattctgttttagaaaaagaaaaaaagacaagatactatagataatgacaccgtacaaatggttaccgttccgatcagatatttctaaaattcaattgtcgtcactctggatcagcacaaaatcatagtcaatgaaacaaagagaatatacattattatcattatatagaaaacagtttttaattgaatcatccatcataaattgttaccaactgaaataaaaataaacctttttttttgtcttttactatattttagtgtttcctttgaatcttttacagctcgtcataacaataacgcaaccgattgcaattcttgatattatttctctatgacgtaggaaaaaaaaagttataaaacttaactactacgagattatatataaaatatattacgttattaataatgaaaaaatccgtgacctgataccaccgtcaccgttaagtacctcttaatttgtcaaacactaacactacaagtttcggtgagcatgtactttccgacgataactccggcagcactactcccgaagttgataagcgcatgacatctaacgtggagatgatattttccggtgatgaaggatccgactttccaacgaactcgaccgtcgagatgaagcatcaacatgatcgcgccacttgaatggtcctgatcgagatagaaagcgttgtacggagccacaggaacggagtatccaccgacgaaaggagaccaaacgttgacttctttgtgtccttgataagtggtaagcatgggactcggcaaagtgatctgttggctccggtaagaagcgtagacgtcaagacggtcgtagtagataccgatcttgtcgttagggttacgagaggagagagtgaattggaaatttgaggtgaggaggttcggtggattgccggagacgttgaagttgaagacggtggcgtcttggaggacgaagcgtggtttcgatggttgaaggattgcccaaactaggagaattacgacaaggattaagaggaggattattgatatcgtccagatcactattttacggttgcatgatgagtggctgtcgtgagagccacagtcttttgaggtcatagctccggtgacggtggtgtgggaggtttggtggtagagagaaagtgagaatcttaaaatactctccgtgacctttatatagaagaagtgtatataaagataaaagtacttgtagagaagatataaaacgataaagatatcttttctatatagtctttgtagaaaagttattttaataacgataaagtatagaaagtatggtactgtaagtataatgttttggtaatgaattattacgaatacttatgggtgtgattggtaaagatattagagtaatatggagtaattaatgttggactaactatttttttttttggtaactaatatcataagatcaaaaatgatataatttgtgataatggttgtatttgatttgtttctgtattaagtattaactcgttgtgatattatatatattgatttgccgttaaattttatgttgcataatcatgaaaaagtgactttttaagtattgcgaagatcagaacatttataaatttaagcattttttagtaatgtatgagttcattttatttccttaagttacttttggaatatattatttgcaagtgtcaatcatttaaattctacgttttcttgttataattaattgggcttttatttgggacaatagctcaatggccttttgggttacgagttaagggagaaatgggcccaatacaagcattcacgttgacttctcttttttttatcgtagttttgaccctagggatctgacgatatcgtttaatgtctaagcgggtaagggtagtgtcgtaataatatattttatcactagtgagaaaattgaaaccaatcaccgattgttctgagccggacgaaggagaggcagccgcctaagaagttgccgtcgtgcgccatggccgtgaaggcttctggattcattgggaaatcagcaatctctgttcatctagatttctcttcgtttcctgtgaaattttcatgcttgaaacagttttctgtatcttcaccaaagccactggtcgttttatccgttgccttatcgtcgccggcaagaacagttaagtctccgcctgttggttaccggaagaatgttgggatttgtctcgttagcccatgtagaaaggtaacttctttcttcttctccttcctctctcatcgctttatgtgatttggaagaatttgtccacttgatttggatttgaaatggttttggttttgcagatttttacggcgtcaaagattcacattccggatacatggcagatgcctcaggtgaatctctcataagctctattttattacaaaatgggtttattatataggctttcggtgtctaagtagttttgattgctttggagagcttagttctcacttctcaccaaaacaacagctcctttgtagtgtattgagtgatatcgtttttacctttgttgctaaagaggtgttgaattgcatagtttagggaattgttcatttgaaattacaaagtaaaaaccaaatgcattgacaatcctgagaagtagcttaggctgtagattcaccagtttatgatcctttagggtatcaattttggccataggtttttattaaatctgcttttacagggtggtgctgatgagggagaagatttgaggaacgctgcctttagagaactgagagaagaaacaggggttacttcggcagaattcattgcggaggcacgcttttgacatctctctctcatagtaaattatatttcaataagattcctttcatcatttccatggtttttggattagagtttgaattgctctgtgtatcaccaaactgagcttttgactattttaaacgtctctagataccaaactggctgacctatgattttccccgagaagtaaaggacaaactaaaccggaaatggcgaacaagttacaaaggccaagctcagaagtggtaacaactaagcatacagtctcatatatctgtgaaaagtatcttaaagctgcaaatttaaggatctaaataattcttcatgatgattatctaatacaggtttctctttaagttcacgggcaaggaagaagagataaatctccttggagacggtactgcaaaaccagagtttaaggtgtggtcgtggatgctaccggaacaagttattgaacatgtgagtgataggttttggctttagattattattgtgtttgtgtgtgcttgaaatttgttggccttctcattcattcattcattctttntctgacaggctgtatatttcaagagacctgtttatgagcatgtcataaagcaattcaacccttattttgtggatgaagaaaaggattccatgaactcgtctaaggattgaatgtgcacaaagattcaccaagtgaatactgattagaagcaaatcaatcaattcattaaactggtttctcttgaatctcatcaaaaataaaaattcatgaatctcagacattgatcttgtagtttgatgctatat

SEQ ID NO: 5078 - DNA, 615 bp, Arabidopsis thaliana landsberg
aaagttacacacccaattatgctaccaaccgagccaataatacataaacatgaggtatgatcctgatcagagagaacaaggcaaaatgattaatgacaagatgcatgaaaatgaatatatgagtcaaaaatagaacaaccaggtaccaatcacaaaacgaaaagacccaacaagcacaccaacaaaggccaaatcatggaaatagcatctaaaacaacgcagcagacagtaacacaaatgaagtgaagtcaagcattaaaagcagcgttacgaaggagaagaacgaagatgaaaactgtgagtatgaaatggtatgggacgcagaaggatcaatgcatcttgtgaagaaagcacatcaaacaccagtgaaacgtcaaagcgataaacctcttgtagaaaagtaagacgacctcaaccatcctttaaattctcactacagacacaagtttttattttcacctcttcttattttcacacaaggggtaacgcggtgatgagatcagcggctagaaagaacgctagcgaacaaattgagcttgtgatggacacagatgtaaatgcaagtgctggtgggtctgatcctctgatgagagcagcatcaaaatcaagaacaaa

SEQ ID NO: 5079 - DNA, 558 bp, Arabidopsis thaliana landsberg
  unsure (1)..(558): unsure at all n locations
ccttaacattcttcaaccataaaaagtactctcggttcactttcctcgtcatgttttcgtgtttgaaattcgncgagctagctttcactcctctgatctccaaaaacttgtagaacgtcttcttcagattctcgtccaagtctctgcaaaaagcgatgaaacacaaaccaacattataacctctctgttcatcatgcctatctctatacaaccttacacttgcaattattattcacaaaggcttactcaaaatcaggcccttcattagccagttgatcctccaaagagtccccaggatgtttcacagataaagcatctatagcaatctcatcaggaaaagccatacagctaaactctagagtgagtccactcttcttagtaacagtcacaactagtggaatactcgattcattactaggaccttcatcatcatcatcatcatcatcatcattttcatctgaaacaagactaggcatgcttacaacaactttaatatgttccccattgtagtctctagtcaatgtaacattctgatttccaggtttgtcttcaattcta

SEQ ID NO: 5080 - DNA, 4675 bp, Arabidopsis thaliana landsberg
  unsure (1)..(4675): unsure at all n locations
tgtttctcttgtgttcatgtcccaatagtgtaacggatatctttgtctgactcacaatttgtgaaagcaggatctttacttgggggaataccctggagttaatgatgactggatggatgtcatctcctcgcaaagtacatcgttgctttctgttgatttttcggggtctgatatcacagactctggactggtttctttaaaaggttgcacaaacctggaatctttaaactttaatttctgtgaccagatatccaaccgtgggcttgtgcatctcagcggtaaactttactcattttcacacatttcttttgttttctgcttatcgaagttttccttgtactttatatgtgtatgtttcctaaacgtagctgctacatatctgatattaaacactttcaggcctctcaaatttgacgagcctgagctttagaaggaatgctgcaatcactgcacaaggcatgcgtgcattatccaacttggttaacttgaagaagctagatcttgagaagtgtcctgggattgacggtgggcttgttcacctgcgaggtacatagctatgtgttttattgtgataattgccagttttctgtaccctacttgtttcacttagtcaatgtcttttcttcatcccatttagcttctctgcacttttctatcttttccagctttaaccaagctagagtccttgaacataaagtggtgtaactgcataactgatgcagacatggagcctctttcaggtaacaaaaatatacgtctccttcacatgttttattactttcccaagtagatgtgcttactcctatttgcttcagtacttacaaatctgaggagcttacagatttgctgcagtaagattaccgatatcggtattagctaccttaaaggtaggggttttgattatcatactccttttatcaccatttgtctcacatcttacgttgtacacgaagcgtgattcacttcttccacttgcttgcttcagggctaaacaagcttaatttattgaacttggaggggtgccgtcatgttactgctgcatgcttggacacactcacaggtttgtatagacatcctcatggtatgttttggactgtacatgtaatgacaccttcgagatgaactcatatgagttttttcttttggttttatagctcttgcagggttgatgtatttgaacctcaatagatgtaatttttcagacagcgggtgtgaaaagttttctggtgagtgttacttgacttcctcgcagttaaatggtagtttttgcttttcgaaaactctccaatctctgctataatttttttcacgctcctttgcagatttaattaatttgaagatactaaacttgggcatgaacaacattacaaattcatgcttggtccacctgaaaggttgtctcactttcactatatcatgtttccactattttttttggaatcctctctttttaccatttcgtgttgtctgctaaattgctaatcaagaaaattttattctcaggtttgacaaagttggaaagcttgaatttggattcttgtagaattggtgacgaaggactggtacatttatcaggtgattgctacttttgttgttatactgttatcatggatattcgtattcgatattcatttatagtcatgtggttgtaggtatgcttgagttgaaatctctggagttgtccgataccgaagtaggaagcaatggtcttcgccatctctctggttaaccattttccctttgtcatttccattttgtatcttgtgatttatttgtttgttgattagtgcgtttatgttactatatataggcctgtcaaacctagagagcataaacttgtcatttactgttgtgaccgatagcggtttaagaaaattatctggtttgacatctcttcgaacattgaatctggatgctcgtcatgttactgatgctggtctttccgcgctcacaagtaagtccttccagtgcaaagttatttgctttggtatgatgtggttaccacctcttgagtaacccactgtctgtttttgttctaggtttgacagggttgacgcaccttgatctcttcggtgctcgtatcacagattctggaacaaatcacctacgaagtaagtttttgatgtttattatctattcttttccgtggagatctgcctcataaactttctttgttggttttcttctgatacagacctgaagaaactgcagtcacttgaaatatgtggtggtggattaaccgatactggtgtcaagaacataaaagatctttcatccctcactctcctcaatctatcacaaaactccaatctcacagacaaaacactggagttgatttctggtaaatatacaattcttgttcaatgagacaaatcatatgtacctgaaacctgaaccataatctcataaaacccgcaggattgaccggattggtctctctgaacgtctcaaactctcgagtatcaagctcaggactacgtcacctgaagccattgaagaacttgagatctctgaccttggagtcctgcaagctctctgctaatgacatcaggaagcttcaggcgactgatctgccaaacttggtcaacttccgtcctgaataaaataatatgttcaaaggcaaattcacgaactctgtaaatagatcgatctcctctggtctcagactaagacactgctcttagatatatcgtcaaaagctatgctcttcttcggattatttgctgaagaaactgtaaataaagcttctttcaagctatggccggacgaaagagtcctccatggctcttctacgtggtcagctttcaggatctgtttggtttgtttatctactgaagtgaaccaacataaactgtcactcttgtaaatatatgtaaattcgaaatatcgactgtaatatataattgaatatcttgcacaatagaaaatctatgtgaaggtaaaaatctcagaaaaggaaaagagagagaaacaacatcagtcactgtttttatccaaacttcactactgaattactgtgaaaatatgttacatctaaatgttaagaatctctgggtcataaatttttctaccaaaaaaataagaaagaaaagacttttaaaaagaagaaagggaatcagagaggtaggtggctctcggatcagatcatctctgaggctgatcagatgcagaggctccaacggaaggtgcagttggtgcaccgctagccgacccgttctcagccggtggagcgactccccannnnnnnnnnnnnnnnnnnnnntcgaatatgtgcactcccccgtctgagagaccaactgcaaacatgtttggttcttgcggatgtgcagcaatcactagtggatgtacgtttgaattgctgcacaagtcaacaagaggagctttatgatatataaacaactaaccgattgatgtttagaaacgttctttccgaaatttaaagattcctctgtttacctgagactagctggtagatacgcagaagggttgacccggcaacgcagccgtagatttgcagagctaaatacacaaactgttgcatccataaaactcgcgtagaccaattggctatcgcatgagaatgtggcatgagtgattggagctaatgattctcgaacagcccactgaaacattgcaatcattaatcatctttcaaatgcaataaattgcagatcttagagagagcggactataaatataaaatacctgtttcatgcattcgagcttggtagtttcgtatatagcaagttgcgtctcgtgcacaacgaggaagtgagcttgatcttgatggaactgaacacgcgtatctgaaggtgcactgtttggtcttccctgtggaagtggcaaaaccttgcttctctgcttttcccatccatctgtgttccaaacacaaagctgaaacaaaaacatttcaaagactattgatcttttcttcatcgattctcaaaaaaaaaaaaaaaaatggtctaaggcgggaacctgtgcatctgctccagacgaaaccaacacgtttaatacgttggagaaggcaagaccagttattctctttgaatgacctttaagcttactcttcacctgcaggagcaaacaaggaacatgatggccatcatattaacaaacaaaacacttcatcttcttttctacattcttctcttgagttttgatgcattacctcatcaacacggacattataaatctgaatcgtgctatcatccatcccaatagcgatgatattgttgtcttgaggatgaaaagcaagaaaagtagcagccggtggtgggggcatgaaagtcgccattgtctgcaaattattagccaagaacagtcagtcaaattgcatacacagaacatcaaaagatcagcatctatgtgtccccattaccttaaacgtcatcatgttaaataaggatatctttcctccggaggctgacattacatatgaatcattcttggataaagcaaaacaaggtacagcttcctcgggattggtttcagcaacatcgttagtcatgaggatcccactagctggttgccactgctgaggcggtaaagaagctgtcgcctacacggaaaatcgagatgttgagatcagtgacacttatcattatttgactaagaaagagtctcaatttcacctttccagttgcgttgcgctcattccgctgccattttcata

SEQ ID NO: 5081 - DNA, 5601 bp, Arabidopsis thaliana landsberg
gaaactaaagttctactttaccccttatttaaaggttacaacttacaacaactaataaattttggatttaaatcatcaccatttaattagtgagagtttgagactatgttttaagaaaattaatttgaatatgataggtggtgaaaatgttattcaagaaattggccaatagtagtattcatgattttatcattttcttactaagaaaagcattgtcttttattaagaaaaccatctcatattgttattaatatgcatactcactcatatagtcatatgagtcaacaagtaggttattaaaagatatatatagttcacatttctcttatacaaaggtaagtgaaaacatttatttaaatcttaagaacttctcagcatttgaatccaaaacaaatgctcataagatcatggaacaatgtaacctgcaaacaaaacataagaaaaagttagtgaagtgatcatatcaagttcatgttatattaagctcatgagatttacaagaatattggaatacatacgtccacatcgcttgccagcagggcggtttcggatgttacagcgtttaggaacgccgattgcgattccaggattgattccggctttctttgctaaaggagagagcatgacagcacaaagacaacgaggattggttctaatgagagcaccaactttggcacagcaaaccggtggaaccttacccctcgggttctttgtagcaggcaaacacgggcttaggctagccgcggcttgattaattggcatgcgaccacactcacctgccgcctcaacggaagcaagtgagatcagaagactcatcaaagccactgcaacaaacttacaacacttcatgcttcttcttatattctccttcttgttttgttttgttgagtgtcttacttagtgcgttgatgattcttatatactagtaactagtaagatgttttagtggggtggttgtgttttggtgacgtgtacggttataccgtttaattttttcccccattctgtaatcatttgatttatgcttactttgatttagatttcaccatctgttgtgtgtttagtcgtttgatttcttgcgtgtttgtttttgtttctctctttacttttctttcataaaacaggctccaacaactttttgcactctctttgtttcagaacacttttggttttcattgtttcaatatagacactataaggattcaacattcgagctgaaaattcttattgttagatataacaacggaaatgtagtaaaacagatagaaatgagtaggctacaacaacatatggtttcatcaaataagacacacaaaaaagagtttttggttgttttcactgacaaccgctcaatcttgcccaatccacaaactgcattccgccgtagatgttattggccaaccgtacaccaactgtgaaggccatagccgccggaggcaatttcttggcaaaaggtgatgcttcgaccactctttctagaccattgatgatttgataacgagtattcgaagaaacactcaagaatacacctgcaattaatcaaccattgttatggagattaagatttagtacagtgaaagtaaataaggtagagaaactagctagtataagtatgtatgtaccccagagagctgcactcttgattagcggtggtaccgggatgttctcttctgatttatttatgtttctgagagaagagagtgacaaaagaaaacagtaagtcaaatccaagaactacatgaccctttcgattttagctaccagaaagagatgtgtgttaccgtttggcagtcatgataagatttgcaatgccttgacctacaatgccacatccaaatccaactgcaccatacattataccctgaaaagatgtaacaaagattgttcagcaacagcaaaagttatagagaaattgagacacagagactgtgaaattcaattaccttgtagaagtatgtagcaagtctctgttgagcggaaaatctacatcctggcctttcagcttcaaaaacactgtataagatcaacatctcaaagtttattaaccaagttacacaaaatgagagatggtaagtactatatgagaattgagtaatcttcttgaggaaatttacctgctaggaagcgcattatatgcaaaaactatgcgtcctaagaagccaggtgatgcggaaggttgtccaaaacgaacataaggcgccaacataccgaccagagcaatgttaaccacagttccaactaaaagatcagcaacatacaactcaaactccgcccagaaatctttccctctcttttgaacttcagcaacagtggcacagcaagaatcaatgactatctgaaattgacatatcaaatgctcactatttcttcaatgcaagaagaaactgttttctaaatgaaaactatggagggagtgccttacctcagcccctattttgaagaggaaagatggatcagccaacattctgttacgaagcatagcccatgatcttatagcaaacccaagaagccctgctgagctctaaatccgaagaaaccgaaaatcaaaactcttctctaacactattatttccagaagaataatagacaaaagcaatgaaacatgtacctgcaaatccaagtacctaaggagaagcactttgcggatcccatagttcttagcagcttccaacatatcagatggaagagtagctcctctagcttcagtctccttcatgacctcttcaaatttcaatatcggtccaaactctttttcttcgtagtcttcaccttcaccatcaccttctcctccatttccacctcctccaccacccccattaccatcactaccattaaaaccatctccaacattaccatcaatatccaaattctcaagctgatcagttcctaagtttctaacattgtctttccctaagatactattatcaccttctcctttaatttgttcagtagccgcaaaaccaccagattgtggctcaatgggagattgagacatattaaccacgaaaagcctcgacctttgcctacctgaaccacctctaatccgcaaaacaggcactttcattgccttggctaaatctctaaatacaaagtctcgattacaaatcccaaaagaagagatctcgtttctcactttcacaacacttgagaactgaagattcattgcacatcctgccatttttcctcttctgtaaacagggcaatttcgacaaatatcaaatcaaatccagcaagctataagaagcttcttccaaaaaaagcttttgcaaatacaacaaaaccccaagaatgtatcaaaaggaataaacttgtggaaactacacaaaatcagagaataatgagatcaacagataacggaaatttcaaagattgaaactttagccgatgatgatgaaaccctaacctagaatctggtctgaaagaggaggaatggtccctaagaaggagaaggagagacggacggcgacagtggtgactgcaagagtgattagggccactggcgcttatttttcttcggcttcactgtatatatttcttttcagtctcttgcacgtgtggtaacatctgcatacgtgtgggaaactgaaacccttaaggttctgtccttattgcataattttgagatacgaataaagtacaatacataaataagtcaaagacttaagtaagagataaatattattcttgacgaaccaaaattaagaatatcatttattagaaagatttaaggagattttaagattttaaaatatgcatcataaatactctacaattagtttaaaaacatagtcatagatttatttatacataaataatgtatccaagaatcatcataacatatatttttgtataaaatcaagtaaaaaacataggattaagatcaaaatagaacaggaaaatgttacaagttacaacatccatcacacagatcatttccccaacgtccctccagattaaccccaaaagaataagaatatatgatgttgctgtacaaaaacatatacatttttctcttttagatcattatttgttttttctttccataagagaacaccagaaacaggagaacccaacccaagcgaatggatctatgattgtctgttcatcatagctaacgatgatccttgcatctgaccagctgaacttcttctatgtgactgcagatgttttaatcttctgctgaggaaatcaatatatgtcctgagacgatacctgactgagtttgtgagagacagtggcggattcagaatcagcattggtgcttctactaaaaggaataccagcaaacgcactgctttcgaatattggtttccggcgttctctgtatctcccataacctccttaacctgcagaaaaagccacaggcaccatatatgagaatgagtatagacaagttgattgttttgttttcattgtttttggattgttcatcaatattctttgggaaaagacaaaggaaacttactcctccaagttttccaagatcaagtgctgcttcaaatatcgtctccattgcatctggcatttttgtatttcctacaaacatgtagatgaaaaccttttaagatctttaatacctcaaaaacaaatgtttattttttcccaagagaaaaaaaaacataccaggttcaatactcttggcaagttcttcagcaagctcaatctcctgtataaattgcctctgaatctgagaggatatctcctccgatccatcatggctgagatcagtgactttattagaactgtgagtatcgtgtttcaggctgctacttcttagtttgttaatgtcttggcttgggcttccttccaaacctgaaattgcctgagtatgacatatgtgcagtgcctgtttccaaattgccagaatcgccaattggatcgagaaagcttctagatgtttgtcagattcaatctatacaaagaatcatgaaaataatctactcagaaactcatgatggccagtgatgtcacgatgataatatgtgactatctacaaacagtgaaaagtttcgttaccctttcataaactagttctgcaattgttgctgcatattttctcagagacctgattcttgtcaggctgtgagttgatggctgttcaaaagcatcaccaagatccagagacccatgagaagtgctcggggcagaatactgactgtcaaggctcccaaactgaccaatgctgttgctagtagcaccaattattggcatgggagccgttgaacttatgcttctgttgaataactctacaggaggagactgagacttgaatggaaaattataaggcttcgaagaacttgatgaagatgatggcatatctactggtggtccagatacgagaacgaaatcttgatccatggagtcttgagaatcatctactgcagaactgacatatgtgagaaacagaacaagaaagctttatcattctctacggtggataaaatggtaaagattcaattacctcttcctggagcaataagtgatctagaatcagtcaatcctgtcggttccctgcggtttctcctatctgcatccatttgagtttcaaatctaaatctatcatataacactttttggttaaactctatatcaaagtaagtt

SEQ ID NO: 5082 - DNA, 858 bp, Arabidopsis thaliana landsberg
acaatttgcaaatatcttatgccaaaattattattatgaaaggaaataaattgaagtgttcaattttattttaaatgccagatttttacaactttgtttattttcttctatatgaatatgatatttgtgaatatacaaaaaaaaaaaaagtaataataaactgatctagtatttttcacaaatagtgatatttttctaaatcaacttggttacaaagataatttttctatatgctacgtttcttttcaactttctctattgttctcccatgtgttacgaatgttcagcaactgcccttaaagtctcatacctttaactttacatgaaaggtttcttttatttaattcgtttagttatttggagaacattttttaatcaagttatgttttggcgaaatagataaatcaaatttagtctgtgaattgaacaacatcgtgagagggccggcgagtatacagtatggctcccaaaaaatcacgagccttattagagagcggtgaaaatagtaacttaaaagagaatcagagtctatagaggctcaggtgggacttttaaaaagaactacaacaacaagaatcatcacttctcgacgacttcgatcagacttgtctcatagtcactcggggccacaaatccatggaggttcatcactgtcgcagctacatttgcaagcccaggtgtctcgatatcctgtctaaacctaactcctgctgacaagccaggacctcctatggcaattggcacctgcacacacacatcatgtccaaatttcatataagatacaccaaccacttcctgtattacaacccctcatgcttaatctatgctcaggtgcaatggtcataacacgaactgttt

SEQ ID NO: 5083 - DNA, 3486 bp, Arabidopsis thaliana landsberg
  unsure (1)..(3486): unsure at all n locations
ctaacatcaaacccttcaactcatataattacacatcatgctaacagttaagacccgcacaaattggagatcttaattcaccatatccagatcgactctatctctctcagactctcacttttgtgcttgcaccaacgaagtgtgctccccatctccaccctttctgtgtcatattatgagcatttatctcccttcagctccgtttgatcacaaagagatgcttggagtctatcctttgtcttcccagttttgctctgtctcgcccagaaaaattatggactccataaaaatgccttctttctgataagatttgcttatagaaaatggtttttcatagataataagaccgataattacaagaccttgaggaatttgttgatggagctcctcccactcccctattctaatagagcctttgagccttgaagcccactgactgtatcactttctgcattggtctcaatcagaggtgatctttcttgcttttcttcagcagctttgacatatgattcacctgctcatgactttccttagcccctcccttcagccattgtatagcttcagctgccgcatccttctcagcactcttcttgttgctgcaaggctgtcccatgatctgtgtctcgttaaactctactgttgtttggaacttgttgttcttcaactgcttagtcttatacatcggtactgtataaccagccctcgtgagtattgtttggagctgacttttggaattgtcaccccccggcccactttcggtccttgaaaacaatgacggttttgttgacaacgccgatatttccaaaggcctaagtatttggtgaccaaacacaaatcttccatcacatccatcctcagagaccaacaaccgtatagctgataagagttcacggtgtgcttgcatatccactttaggattaagtagctggaatgtttttaaaaagtatcataactcagatgtccattgcctaacgagatctgatatcacagtagaaatacctgacagaatgaaaacaacaaaggtgggtacttttgagattttaagaaactcactttgttctgtattagctcgtcaagctctttcttcaaggtttggtatatctctgcaacatcaggtttcatgaaaaactccaagtatcctcccaacattttcaggtggccatcctgccaaaaagcccaaaaacaaaagttgacaatgaaattgctgtcaatcctgataacaaaaacaagagtacaagcaagtccaacagagaaaaaaggctcacagtgtctcctttggagatgctaccgccaaagaggataagagtagagtcagagcaggctgtcgaatccctcaagaaaacggagttcacttttatcttctcgttgaaaaccaaccacggatatggtatttttgtctcccttgcattttcagaattctatggggaaaaaaaaaatgaatgtaacaaatttccaaccaaactgttatgttaggtataccaccatcattaattttaactggatggatgcgtactgagtaaagaagaacttggccatcctccatcgtcttcagggaaaatgatctctcattatgctgcatgtgtcatatagatgctcaataaagctaactgctgaatacagagaggccactgcagggcaaataaattcaggagaagtactcaccacaactgagcagattcctggatacatgccatagcaaataactgctcgggtaagatttgcatcattcccctctgaattgcagatcgatgggtttccatctataagtccagtatctttgagtaatgagaagaactcttttcgaagagaatcaatagctctcagcgactgtattgacagaaagtttttccagcagtaatcatatacagcagactcttcctcagcttttttccacccctcatatgcccgaacaagtgcaagatgatcactgtgatcacgtgaaaactgggactttgcggcttctgcgagctgggaaagttaaaaacgaaacatcatattctaaggtctttcagaagacacgagaattcacaacacttcataccatctgatttcaagacaagatctctttgggaaaactacgtccataataaaagtattttcagagaagaagatggacggtcaagtcaccttcactaacagagagacatgatgtgttaaagtttagtggaagaaggggcttgcacgggtataacaagagaccaataaatggtataactataagtctataaagtgctagataagacgttgaactgcattttatcttatacatggtgggagaaggacttacatctttcttgtcctgaggtgtcaagaaaggatctctcacactcaggccagccgcaacagtcaatatgggatcaaggcaaccaagaatagctcctagtatgagcatttttccaagctttggctccatgggaagcttggacaaataacgacctgcaaagaatatcaacaacatgagataaatttcagtccagctaccaaaactgtcatgattcagcatatttcctctaacctagagtcgtgaggtcttcattctcatcnnnnnnnnnnnnnnnnnnnnnnnntgcgatggccttttgaacctgcgggcaaaggggaagaaacaaaattactgtatcattgattattataagtttggttcaaatcaaacaccttcacttgagtaatgtttaaaaacagaaaacctaaccaaagaatcaaacaaatatgacgtacggctagtagttcaggagattgcagcgcccttgacaagaactcggatatgcttccgaggtttaagcttttgatttgcaggcacagtgagtgtaaaggcgtcctcaaaatttcaggcaactgatattctgcaaaagcatcatatacgcactttgggtaaagatggtaacactgtccaggtcgaacacgaccggctcttcctcttctctgcaatcacaaacagagcatgagaatcaacaataaatatcactaaatgtaagcccacggaccagtcagatagttaagattgttggcagtgaatacttatactcatttttagtagtccagtgtatttgaaatgcaactacgcaaaagacaaagaaagaaaatataatagctagtagattaacgtctatgtaaacagtactactaatccctgtccttgttcctgcgtttcttttattgaaaaaattgactactggtcattcctattatgaatctagggggaaatggctccgtagtcttattaatagtttgattctcaaaagctaacaactctaacaaactatagcaatacctgctgagctgaaaccttggaaatccaagaaggaagcaaacagggggtattgtttaatgcatcataggaggtctcttttgcctttccacagtcaatgacaaaagcaacatcattgatcgtgatgctcgtttctgcgatattagtggctaggacaaactttcttacaccacttgcaggttcttcaaaaattaacctctgcatttctcaaaataagc

SEQ ID NO: 5084 - DNA, 1346 bp, Arabidopsis thaliana landsberg
agctgattgttttctatattttttgatataaagctcggtataggtaaagagaaagcgttaagcattactcaggcagtccaaaagtatggcaacctctcaggttttggtaagtagcaaattgaatgcaggggaaaacattcgtatagaatgtgatgaatgagtttatattgtgttgaatgcagtggaaagattttctgtgggaatgaggaatcctacagcgttcttcgccggggctcttgtaagtctgttgcggaattgattcaatatgtagcatatggttaaccaaacctatcatacatgaatctttacagggaatatctccagagtgtttctttgcaggagtttgttgcggtggtttgattactcttccacttcaggtttatctacttttctttatatattcgatttcgattctttgttacaatgtgaatccgaggactaactagaggatactgattctaaaaaatgtttcagcttgtgattgggtttctccttagagaacgccccatgtttgctcttgcagcagtagcaactgcagtggtaagtagagtaagagaaaactgatgtaaatttggtttcacacaagtttgaagttttggttccaatatttgtgcagggaatatggacgatctttccctatgtggtggctgcatcaacggctctgttcctctacattcgcagtcgctactccacgaaagattagttcttcttgttactactcaatatcaatacatagaaagatgtaagatcatataaaaagatcaattatagtactcagccaaccaaattaatggctttatgttgtactggagtattatgtacaaaggaatatagatacaaacttgctcaattgagttttttaaaacaactgttttgtgtttaggattgggacatcttaagagtatttacaaaaattcgaactccattttagcagactcatcagatctgtgatgatactaaggttgccacatgtgacatcatatcaaatttggaaatataaacaaacttgttcgagtagaaagagtaagccctatgctcttagggcttaggggtagaaaaattcaggtaatttgatgaagtaatatcttatataagcaaccatatgtttttgttgttacaagagtggtattataatggtttcctaccaatgtatcgttctagttcgtctagcggtctccttcacaaatcaaagattcaattaaacaagacaatgttcacaatcacacatcaacaagcttttcaaatcagagaaatttccaagattcaaaacttacaatgaacatcagactctctttgataactctacttaaaactatagtctcctaaattgggatttcattcaaaca

SEQ ID NO: 5085 - DNA, 5509 bp, Arabidopsis thaliana landsberg
gatctcacctctaaggcaaaaagcttctccccagtgaatctatcatacattatcaacatcgtttctcaaaccaggcacagcgagaggtcttcgatcagggctccatctgggaatattcacaatggaagtgttgaaaccggtatctggcgcaacacccttaagggtaaacgaaacgattccgttttgaagttcccagcataacacagtaccagttgtgtcaatcgaagctaaaagctcaccattaggatggaaatctaagccggtcactggtcctttgtgccctttcaaaactctaacaatcgaaccatcaaatgtattgataagtttgattccttcgtcatctcctgcagctgctaatagactccctgagccgttaaacgcaagcacgcgaatcggaagtgtaaatctagtaatgttcgtctgaaattccccacctaaggcaaaatcaaaaacttatcaacacgaattgaaatgtaattgagattgagaatgagaagaagtgatttgaataatatacttgggaacttgtagagcttgacgcaatgatcgatagatccagaggcgaggagagtagagtcgttgctaagagccaaggaggtgacgccgtcttggtgatgacggagaatcgtcgggggtaatgtggaggttgagagtccatcgtggacggagattgagggatccgaagaagatgaagtgacgaaatgttcggctttgtggtcccagaggatagagcagaaggcggcgcttccgccgaatttatgggcttcccggagctttagagatcgtgatttcatcggagatgttgattgttttgggtggttctagggttttagttctatctgattgatttgggcatttttagtattaacctcgattttggcgccagtttcagagtgggacacgcgggatattatttaccattttcactattttttgtctttaaaaaatgtggttaaaagttggaaatttacaaaacctaaacttctctcgcgcttttctttaaagaaaactttctagtgtaggtgggttttctttccagcatggacagaactaggcatgcatgcagttttgatgcgacccgattctattgatccaaaccaaaccgatttttctttttacaaattggtttggtttaatatttggttcaattcggagagataaagatttatgttcgaaaatctgatctgactcggtccgacatgattaactaattgggtatccaatatctaaattaacatttttgaagtacattttaaaaaaagctaatcgggtcagaattagtatacttaatgacccggaaagctttaattataacttggaaatgaggatcttggatcattctttatttgaaatcgtatgctgaattcttttcacttgcaacaatgcctacacaatatgtacctacatttaattcagatgtcatttattatgtttagggatgttaatcgggcctctggtccgcaggcctggcccgtttagggatattgtggggcaggttcaggcctatataatggagaaaaaaaaatagcgggtctcgcgggaatggtccgtttggattgcggattaattcatggatgcctattaaagaccgcggttttgcgggcgacccggaaaaaagttagagaaaaaaaaaacctttgcatcttctatgaagaatcttcgttcaggaaggaaaaaaactttgaagataatttaagcaaaagaaaatgacgatcattctttcaaagagaaaggtgacacagcagatttaaaactgtaattgttgatacaatagaatattgtagcaggaaaagatgatttaaggggacaatcgttccaatcgttctctcttctctctcctcaagagaaaaaaaaaacagatctactttccggtttcttttcttgttttagatcttcattgcaggtttggtttttattcaataaagtgggggtgagcgagctttcttctccgacagctgcgtatggttaatctggttcgtgatgcatctgtggcttctatctcgacatttttgagaaatctcccctgctaaatcttctggttatggacgtcggaggcatggtggtggagttttcttgcggctcatatgtttgcggtgggtgctgtgggttgcggcggagtcatgaaggcggattggtgggtttaggctgtttgttgagacgattaacgacttttcttgtagatctgtttcggctaatcttggatcttggccgtggaggcttggtttgagccactaaacctctcagcttccatgttttagtttttgtctaaccggatttgaggttggctttgctcgtacaaggttttgttttcttgacagatctggagtctgggtgttagatttttaggttctctctttttgctaggttaaggattagagggattgggttccggattttctaggtttcggttcataccggaagaagtgttgcaggttcaggtttgtcgtcgggatcgacttggcgttgggaactgattacttctgtcattgagtttgtccttgccgtcgtagccgcgaagcagtgcttcttgtaatcgctggtactattggacgtgtttccttgttttccgatcaacctccgggtccgatctcgggtcaccagatttgtcagtcgttaccttcttattttgtacccgttttgttgttgtaaggccttgcctaaagcccattttgggatgattaaaaaaaaaaaaaaaaaaaaaaaaaaaaaaaaaaatcttcgttcagtccttcctgcttcaattctttttgaatctttgatttactgaaataaatttgtaacgaaacataagtaatttttttgtgttgcttcaattctttggaggttccttgatttactgaaataaacaatgatttttttgtagtgaattcatgtttgttcaatcgaaatcggaaaggctaagattgaatctgtgatcactcctaagccagctgttgaggttgtgaaattgagaagtaataggcagagagatgagaatttggggttcgttatagtcagcattgtaaaatattgacattgtaaaataaattcagtgtttttttggtcctttgcttcagattgatgcagagtttgtagaagtcatggctttcatataaaaaaaggatatatcttcattccttcttaatgaattacccacatcgatttagtcttgacatcatatatctatattgttggtgtctcacaggaaaagtcaccaagcagtctggcaaagaaaaacggatatatttttttgtttgtgagttggaaacaatcacttttgaaatcaagaaacaagactgagatatgtgctgctacggtaaatatgtttcttatcactgttttgtaatgttttagactttcagtttaagtactttagacttagcttaaatgtctttgtttagttcaagtacttttagtttaagtacttggatgtttcagtttaagtacttttgaaaaaattggtttgatacttcaagttaaatgtcttgttttgtttcagttcaagtattacgtttcagtttcagttgagtttatgatttagtttcagttcaagtgttacgtttcagtttcagttgagtttatgttttagtttcagttcagattgtgtttatgttttagatttcagtttcactatttgagtttttgtttcaataagacaaatgggacagatcatttagttaatcaacaatctgatgactatttttcagtatcttttctaacaagtaacaaaagagacaacgacgacccagcaagatagttttgtttgtctctttagttaatatccacttgaggaactacaaagaaacaagatacagcttcgtcaatcaaccacacacaatttctgcttctaaagaccgtaggccggtccgctatccgctgggctttgaggggaggctaggactgagttctgtagtccgcggtcgttggcggactggtccgttgcggatcagaagagaagcgggcaatttgcggtccgttcggtcgcgggcaggtccgtctgccatctctaaatttatgttagtaatcacaactacgagaatatataggtagttataacaaattgatttcacaattctaacgattacctatgcaaaggctaaatattattattcattaatcatttgtttcctaatcataattacataatcattttaaatcatcctcttggaaatgatctcattactattatctttttccttatttgttcatgcattaacctaacatattgtctttgttttcttattggaagatttcaaatcttaacaaatggttgatatacaagattttataaacaaaaatcagttatcttcttggaatttaattatctcttatttattacatttttcccttttttggactaccattaacctagcatattatcttcctttctttactagaagattgcaaatttatacaaatgcttgttatacaagttttttttgagattctgtcaaccctaaaccaaccaccctattctttcttttttttgtcgtcaaaaacaaaaccaaccatcatattcagactctataaataggcgctcatttgcttctccccaaaacacactctttcattttgattcaacattatagcaaaagatctaaaccgctgatgaatatcaaaaaggtatgcatagtttaactatctttcctttcatatgtgctttatggtttgccaaaccctcagtattatcagtggcggtccggcatttaggagtatcttacgcaaaacttaaaaacatgtcctttttatgtagtaccaaaaatcataaccaaaagtaatccttacatgatgtttacaaatttagttgcaaaacccgccaaaaagagttaaacattacactttgatttgcaaaatttggctctacttgtagttttgtttgcgaaatcattcatcaaaatcacgtagtcgtgcttttcaaacccacttatttgttaggtaaacaagcaatatattctttgaacaatgccaaagaaagacacagcttttggagaagaatatgctatatcacataacacaagattgagactgtgacaaccacatggcgtgaagaaggctcttggattaacttctaacaacatcttttgaactccttgtttcctttaatattagcaccattatcatatccttgccctctcacatcatcaatgcctaactctagttcaaccaatgcgtcttgtagagacgagaataatcattctccagattatctttcacaatcaaaaatgtcaaaaataattcttcaatcttggttgacatttcaatcttggttgacattgtagagacatccacacatcggataactaaagtcatttgctttttgtgactaatatacgaagtataatctaaaataatagaaaaatattttgactcatgaaccttcttgatgatcataactttgatctccatagcaagcattccaattaactgattctgaatcttgttactaaggtaatgggaatagatttcctttttctcaattcttcttacatgctcaccaagtttatcaagtacatcaaattctgcaatcatt

SEQ ID NO: 5086 - DNA, 1066 bp, Arabidopsis thaliana landsberg
tggtagagaggagatggattcgtggagctaagcttgcttagtgttatcaaaggtgtatcaggccctcgtgggatttcactcacaactgtggtctcttcttcgtcttcaacgcattgaacgagttgtgtacctccgagtccaagattgatcgttcgagctgaagcaagtaaccaccaaggatcccatggttggatcattttgcttaattctccagaagctaaggctctttggaatccttttctctcttctaagctcaaatcatcaagactcacttcatctccgttcattatcttctgaataatctcctccggtaagctcaaaccttcatcatccgtgatgctatcaattcccccatcatcttcctcttcttcttcgtgaaaccttttcaaaatttcgagcatcttccttttcgtttgatcatcagatcgaacttgcttcaattcatcgtttacattatctctcatgaatgattcagtacattggacactgtgagatttgtaacaaggaagggaacagtaccggaagttgcagcgaggacaagtgtactgcgagaactgcttattacatacatggcagatagtccgcgaagaagaagggtttagcggagacgaatttgaactctccgacgaaataatcgtcttctccggcatcatcttcagaaagctattccaaattagggttttgacttttgattgaagaagacaggtctagaaacttacatacaccaattttaaaatcgagtttgggccgaattatggaccgtactttgggctatgggccttcattttaataaacgggtcggatatatccaccggacccggaatgatcgtcttcctcagtgttgtattttggctttcctcatttcttcctcaatctaaggatttccatgaacaaggaactaaaatgagatctcttctctttgtactatcactcatttgcttttgctctcaaacagcactttcatggaagaaggaagagtttcgcagctgtgaccaaactccattttgtaaacgcgctcgatctcgtactcccggcgcgtgttctctaattgtcggcgatgtttcca

SEQ ID NO: 5087 - DNA, 4411 bp, Arabidopsis thaliana landsberg
aactacagttgcaatagattttagtgatttgttcctgtattcttgattcccaaataacgtcaatagcatacaacaagttaacggaaaaataatacatatataccaattttggtggttataaatctcattaaaatgtcgaacataaaatggaaaaatacttggtactaaaatcaagatttttcatttctctgtcatatttttcccctcttttttttttttgttttgttttgggttaacaactatttactatgttcttgtcctactcctatctaattgcctttcattttccctgttatcattggatttatggatgatttttcttcttctcaaactgattataaatatctttttgatatacagaaccatcttattccttatcaaagaaatgttcagtttccatccacaatttctagataaaaaagattagaacaagtcaaatagatgtgacgattccaatatacttagtcatttgtcctatatcgatagtaaattagttaatcgaaggtaattcgagaaacaagttgtatgcaagccatgtcaaaactcgaatatgacatgaaatatgtgagtataagatcttcgattgtgagcagataaaaggaagtttgaggtaattgaaattattgttttctaaagcttgtcatgccctcatgttaggctactgcgattttatctggatttttattgatgttttgtacctcattcctctggtccatgcatgtaggatatttccataacgactctatctgacgtactgtatgtattagaggttggttagagtatgtgagttttatcatttttttaatgttgtgattgtttattaacatacaactcgaatataatctattttataggataatgaccgattgggactggagcatttggagtcacacgcgataacgatgcgtgatttgttttgtgttttggttgtttgtttttatattaacgatttgtgaaattatgaagaagaataagaagaagagaggcttaagacagaagcgagtggatcacgtggacccttgagccaccctcatcacatgagcatgtgctgtctcaataacaatgacttcgactttccagcctaaataaacgcccttttttttgttctcttcgattattaacattaattttatgattgttattcggataacttttaagcataaatgtttcttcaattttgttcacataataagcaggataatgttgcacaagccctaatccattttgtaagagcatccgcctgatccctaatttatgaacaatgttatcaaaaatagttcaaagatttggatttataaccaaactagttttagatcattcttacaattataaaatatcaagtaaaaatatctctccttcggaaaatgacttcttttttttggtgattaagaagaagatagacttccttgtgggacccatttaggggatattaccgaacttttgaacgaaccgttatgtcatggcgcgaaaatattatagaaaccatcacaaaaaacacaacacagtttaagaacattacacagacgctaaaccaaatcgataaaaatttaaacagttaaacgcctacgaaacatttgacatatattcaaatcgtataaaaggcgacacccgtatttaaacgctcctaatacttgtatccttcctcatacaagctctcagaggcggccgagtcaccagaagccccgccggtgtatttcccgagggtagcgtccgagttacccttgcacctggtcaggaaagtggcctgagctttggctacattctctgtcttacctgcccaagccttgagagtgctttgttggagggctcggccaaatgagaaagtgagagtccatggcttcaacacatcgagcttgttcattgcgttcagatttagtgttgcttgctcttcactctgtccgcctgagaggaacacgattcctggaactgcaggtgggactgtgcggcgcagagcagtcactgtgtattccgctatcacttccggtgcaacctgttagaaatatagttttagagttatgtctctgtgattcatttgattgtggttccataaggagtagcatcaaacgatctataatccttaatttcgttacctttgggctgtcagagccgggagtgaccatgttcggtttaagcagagtgccttcgaggaggacatggtggtcgttcaaggccttgtacacggcagcaagaacggtctcggtcaccgctgcacatttcttgatgtcatggctcccgtcggtcagtacctctggctcgacgattgggacgagtccattctcctggcagatgatggcatagcgggctagccccttggcgttctcttggatagagagctcgcttggctcggtggccccaatcttgaggactgcacgccattttgcaaaccgagctcctgccttgtaatactcctggcaacgtgcaccaagtgaatctagaccctgagtagtggtctcgccattggttcctgctagatcaaccacacccttgtccactttgattccagggataactccgttttcctgatacaaaaaggaatcagaatccaaattgaaatagtaagttccattttgcaactcttgaacccaatgattaatgattaagactagtgctggagtttggtttttcagggacggaccatgaggagctcaacaaagggtttgccatccgtggttttctggtagagggtttcctcgaagaggataacaccggagaggcaagggaaagtgccaggggacgtgaagaggagctcacggagagcttggcggttggactcaatgttctcaacattgatgctggcgaatcgtttcccaatagttcccgtgctctcgtctgctgccaaaatgccctttcccggtgtggcaatgtacttagccgtctttatcagctcatctgaacacagaaagcgcatcaaagagagagaacctaagttattcaacaagaagagtgcatgttaagtgtatgaatttacctgcgtatttgccgacaaaagcagacatggttgctttttggagtgcaagagagacgagttttgctgaagaggacgaggatgccaagacaaagccttaagtacctgcaactattgagaatatataggtaatatctacgaggaatatactattagaatttgtcatacgtgtcagaaggagaacccgaggaaatttatcaacctcggataaagcaaatgggtgattgcttctacacaaccaaatggcaaccaatgatctcagctttatccccaaagtcttggatatgtggagaagagaaagagataggtacaaaacaaaagcagagtgtattgtatagtacctctcacacacacttcaaccacacgagtgtgcaaccaaaacttacaaacacaagagatattttagataatgaacccaaatgtattttattttttttgcattttgtcatcattggcccagtggccatatacctcccactagggagagagagactaggtttgaacctggattcatgagatgacaacagaggtggtgatgttttatggagtatcaagggttccaaggataattctatatggtaaactgaaaaacgtgtcccgggttcgatcaacccctcacttgggcatttattagtaaacaaaactcttcatagtttgtgtagccgttgtagtagatagggtgatgaatccatcaataaaatgtaatgcaggacatggaagggacacctaatgctgcaggaccacagtggcctagtcctcgtctgtgccaaaatatctgtccccaaacccgcccataccaaggaataacacgaaactcttcgtctaatccattatcgatttcagatgtcactatctttattcttgggaatttttttgcagaccacatgaacaccttgaggtgcctgattgaacaaagaaaaaaaatatctcaatccagctgcattcttgtggataaacatggataaggagtaatcacaaggggtgtataaatgatacgcaaagggtgtgtgttagcttactgagataaggtttagaaatatgatgtttccctcaggtacgcccttgcttataaggaggttgatagcttcaaccgctgagtttcctgacaagatgtataatttcagtgtcactaggcacttcaagtgtgttgaattggctaacaaatgtgtattagagcaaagagaaatatgaaataaaatgttttcagtaaaaagtgatgaagaaagacgggttaattacctgtcccgagaataggatccaacaataggacatgcctctctgagatatcatttggcaatttctcataaacaagctgcacagtgatacagacatcaacagtgatgaaacagaacacctggaatgaaataggagtgactcgtttacctgttgaccattgtcaccttctctgtgaattaggatcttcccgatcttgatacctttgcaaca

SEQ ID NO: 5088 - DNA, 945 bp, Arabidopsis thaliana landsberg
accccttcttttcttcggttcagaatcaggaacaggaagtggcttaggctgtcttgcaggaggaggttcttgccatttctcaatcttcttacggatctcctccctgaaagcttttccacttatccctaacggatcccctctagtagcatcaactcttgctgccaaagttgattttgcagccacgagcctgccagcgcgagcctgaagtccaggaggcgtgctttggtaaatctctgtctgctccagataacccacacgggactgagacgttgcagaagaaaacccagcaaggttcttcctcttgtggccaagaacttgaacattacacgcaggcattttagcaagtgctgacaaacctccagcagtccccatgagtttggctgcaacagcactcccaacaatagcagaaagattaggtgcaatagatcccatcttactttcaacaaactcaaggaccttcttccttgcggaatcaagatctaaagcccgatcacaagcctctaacaccttttgcaaaacatcctctggcagtgcactccctttcgtagttaaagcagtaactgaaacaaccatgataatagctgaaggaagaaggtcagcgagatcaacaagagccaaatccgtctcattcccaatcttcttcacaacacatgcatagtcaatagggtgatgaaccaacgactcaagctcttgaaacttaagcttgtacttgtctttgataaagttgtggacaataacgatttcattctcaatatcgaccgaaagctgattacaatccacaataagcttatactcaggatcatcttccaagacagttcctttctcagctccatcagaatctttcccaagagcctcctctactttatgcataatatcagcatatctctgactcttctgcagcttagaaacattatcgagatcatcatagttaagtgtctctaaatc

SEQ ID NO: 5089 - DNA, 825 bp, Arabidopsis thaliana landsberg
  unsure (1)..(825): unsure at all n locations
ggatcccctggactacacctcggaggtaaccaaggatactcatatctgttacttgataccttgctttcagttttcttagacggcgaccaccccttcttttcttcggctcagaatgaggaacaggaagtggcttaggctgccttgcaggaggaggttcttgccacttgtcaatcttcttacggatctcctccctgaaagcttttccacttatccctaacggatcctctctagtagcatcaactctagctgccaaagttgattttgcagccacgagcctgccagcgcgagcctcaagtccaggaggcgtgctttggaaaatctctgtctgctccagataacccacacgggactgagacgttgcagaagaaaacccaacaaggttcttcctcttgtggccaagaacttgaacattacaggcaggcattttagcaagtgctgacaaacctccagctgtccccatgagtttggctgcaacagcactcccaacaatggcggaaagattaggagcaatagaacccatcttactttcaacaaactcaaggaccttctttcttgcggaatcaagatctaaatcccgatcacaagcctctaacaccttttgctaaacatcctctggcagtgcactccctttcgtagttgaagcagtaactgaaatagccatgataatagctggagtaagatctaggccagcaaaatcaacaagagtcaaatccgtctcatctgcaatcttcttgacgacacatgcatagtcaatagggtgatgaccnacgactcaagctctttgaacctaagcttgtcntttctttgataaagtgtggcaatacg

SEQ ID NO: 5090 - DNA, 4780 bp, Arabidopsis thaliana landsberg
aaccaccgagtgatgtacctcgggtgcttgacaggtatccagaatgtttggttcttaagctggaagggactatgagcgcatgggtttcttatttggttggtatacgcccccctcggagggagattgggggtattttaacacggtaccctgagattttgggaatgcgggtagctcggataattaagcctctcgtggagtatctcgaggctcttggtattccgagactggctgtagctaggttgattgagaagcggcctcacatacttgggtttgaattggatgatacggtgaaaccaaacgtgcaaatcctgcaagatttcaatgtcagagaaacatctcttccttctataatggcgcagtatcctgaaatcatcggaatcaaccttaaacctaagcttgacacacagaggaagctactttgttcagccattcatctaaatccagaggatctcggctctttgatcgagagaatgccgcagtttgttagtctcagcgagtctcctatgttaaagcacattgatttccttaccaaatgtgaattttctatcgatcaaatgagggaaatggtaatcgggtgtcctcaggttctggctttaaacctcggaataatgaaactcagctttgagtacttccaaaaggaaatgagaagacctcttcaagaccttgtggatttccccgcattctttacgtatgggcttgagtccacggtaaagccgagacacaagaagataatcaagaagggaatcaaatgttcattggcttggatgctaaactgttcagatgagaagttcgaacagagaatgagctacgacacaatagatatagaagaggtagaaactgatccatcttcttttgacatgaatacattgatgcaacctgaaagagaggaggattccgagtacgaggaagaagaagatgatgacgacgaggagtttgcataaacccggagttcaacaaagaaaaggtccaaatacagacaatgaatcgaagaacaagcttcatgtcttgatgtatcatcatcatgagaggagaatgaatgatttactttgaattttcgaacagattctttgttgatcagattagcattctctcttatccatccttgtcatcgattcttttgttcatcatgttgttgttgaaatcagaacaatatggaccagaaatagtaatgactgaaataccctcaggggcaaatcagtaattatgattttttttttcctaagcaccaaccctcttttgtgttacccaaagaaagaaaataaaagctcacgatcaattttgttgggctccttcttcgtcttgtagccacgcacttgttctctttatcacagtgccctctcgctctctgcaacaacactcttaatatatatatatatattcatcaatccctatctctcatcgaattctcttccgatcgtctttttttcttcccgcgatttcttgcgtttccggtcagtttgcggcaccgtgttttgttatttggttgaatgatcaaacgatttggttttttatcctgattcgattgcattctgattgagctgctatgtttgagaaatcgtgtgtggaattgtgttgatttgttctgggaatttaattagtttctggaattttgccgattgttttggtgttttcatgaaaagtttgctactggaatttgggattatctcaaagcttattcaatacttgaattattgaatcatttttgttatctctgtgtttataatttggaaacaatcataatctcagggaattattgcttaatggttgagaagcaagaagaaatgaatgagtttggtgctgtcaatggtgggaaagtggggacgtcttcttcagtgtcaccaccgcaagataaaggaaggaagaacaagagaaagttagctgatccttctccacaaaatgctgcttctttgactgagttccctcgatatgagttacattcgttcaaatctcaaagccctttgtgtgaaaatgactccaacgggcagctgaaagccgaagagtctgattctgtgggatgggatgatccgtttgcttgtcaccttgaaggactattatcgtctaattggctcacgctccttcgtagtgcaatgaatcagattatggattgtgggtatagtgaggatgttgttctcttagctatttcaagcagtaggttctactgtggtggaactgatctcgtgtctaatattgttaacgataccttgagttttttgaagagtggcaaaaaagttgctggttcaaaaaactatgtgtttgaggatttgcaacagcttgttgcgtatagtttggtagagaagataagtcttgttagggaggttagaccatcgctttcaacggacgaagctatgtggaggctgttgatttgtgacttgaatgttttgaaagcttttgaagtggacgcagatggattggagggctcttcggtttccaatgctagtaaatcatcggaatctccagttgctgagtgtaatcctccaaaatccagtgacgcagataacccaaaggctccagtatccaatactcaaagcaagcagagtgagccagtcaaatttgggaacttcgcaaatgtaaacaactccaaaaatcctcatgctagtggagcaacacctggaaaagaggtattttctgtttccactgcttctggtgaaggcactaaaagtgcatccctgacttctgtttctgatgaaaaattagtatcttgtcgaaaaggccgcaccaaaaaagaaatggccatgctacggcagaaatcatgcgtggagaagattagaacttatagcaaaggcggtggctataagacggcaaagtttggtggtttccttgtggagaaaagaggcaaatcagcttctgatttactttccgcacaggcaagaaattcttcatcaaagattacaacagaggttatgaaaattcctttagctgagagtagcagcactctctcaaacagtactaagtcagattcgcctgcattagatgttaaggagcatgttactgcattacctgctaataatgctccagcaccagtagcttcagaaaagaagtccggttctgagcctgaagaaaagccttctgtgtctacgaaaccagcaccagattactatgctgcaatcccatacgatgcaactctgggaatatatattccccggaataaaagagatgaattgattctaaagctagttccccgaatgaaagatctgcagaaagaattgcaggattggactgactgggctaatcagaaagtaaaacaggctactgttagacttcttaaggaccaaccagagcttaaggcactaagaaaagagaaagaagaggcagaagagttcagaaaagagaagcagttattggaagaaaacactattaaaaggagatctgaaatggagttggccttgaataacgcaaccaaccagcttgagagaactaacaacacaattcgcaggctcgagctggaacaatctctgttaaagagagagaggggagctgctaatataagagcttccgagtccgctgagagctgtagagaagcaaaggagagagtgcattttttgttgaagaattctcagtcgtgggaagggcaaaaaaatttactgcaggaagagctcaagagtcaaagagacaaggtggcagggctgcagcaagaagttgccaaggcaaaaacccgccaaaaccaaattgaggttagctcttttgtaggcaaaatgcctttgcacgttttaggtcttctcgtcttcggagctgtaatttattgtatgacaactgatcatatcatttcctctacaattcttttttcaggtaatcatttcatttctaaggaattagagaaattggagggataatatgtttacatctgagagtctacctttatacttcttgtgccgtgttctttaaatcaagaactaaccatagtattgtactagtaactgattgtagtctaagtgtggtagctatcatcaagatgactaatgaaactaagttgcaggctacttggaaacaagaaaagtcagcgacggggaaactcactgctcaagcagctgcattaaagaaagagagagggaaactggaagaactcggaaaagcagaagaagagcggatcaaaacaaaagcagagaacgatgtgaaatactacattgagaacatcaaaagacttgacactgagatctcaaagctgaaactcaagtcagacagcttgaagatagctgctttgaaaaaaggcatagacggaaacaatgacggtaacaaaagtggaatgaatcataccaccaacacaaaggcaaactcgatggcatcagcaaaagtatgggagaataatcagggggcagagtcgaaaatcaaaagagagagggaatgtgtgatgtgtttgtctgaagagatgagtgtgatattcttgccttgtgcccatcaggttctttgctctaaatgtaaccagcttcatgagaaggaagccatggaagattgcccgtcttgtcgagccaaaatccagaggaggattcaggctcgttttgctcgcgggtaaaagcgctcaggttttgaatcaatatggcaatgaaggttttgctttggttttatctctttggactgctctatttacatctaaattatacacagcttgtaaagagtgacttcacaatttgctcatttctatatatccctcaataataaatggaagaagactttcctaaacaacctactcaatacatgttcgttgaacttgcatgattataattctgtaggacttgacttttaacattagatgtggcctttgatctacatctaagacaaaagaaaa

SEQ ID NO: 5091 - DNA, 1005 bp, Arabidopsis thaliana landsberg
aaattccattatttttacccgcttaggtgtgattattgtttgctttacgtcattaacttatgatttttaaaaatgaaataaatggatgtaatgttgatatttttttatttttttgacagccgaatgtaatgttattattaaataactatactatttatacttttcttattggttaaagtactaatcgcaatataaagctatgcatccaaccgcagaattcaaattgcctctgtttagtttctgtttcttcgagcaccaatctggggtttcattggaaccgccataagattacccttttgcaaatctgaatctttagccgcactctgttttctattactgaccattacctttaccatttcagcttcttcaaaaccgtgtttataagaaactctggtgaccgccctgtttgtaattgaggctgaggtcgctggtcgtgatcttgattgtgctactttagatggctcggtctgaaaatatttagagaaaacaagttatagagtattaagttgatggcttctactttcttagcgtttgaaagatataattatagtgaccgattgagattctaactacatgtagactagtcgatggacacttgagagttgagaggctccttattttgtgttcagacaaagcttgcaatagtagaaacataccttgttatgagacaccggtctagtaccgatgttgtagaatgaaggcattggtgttgccttaaaattgaggcttttcctgaactgtttaatctcagcttctgccttttgctgcatccgaaatgttgatccaatccaattagctcatttcgacatgtaaaagacatgacatgttttacattttcaaagagacatggagatgatgatgatgttacctgtgttttggcctgaacttggtttgtttctgttttcttagcatgtattttctcctccagtttcatatagaactgaattgaaaacaaaactcataagatgcttagaaacaacaaagggatacaatgctattattttg

SEQ ID NO: 5092 - DNA, 3404 bp, Arabidopsis thaliana landsberg
ttcagatcatcagtttgcgcttgttccagcaaagcctggacgacggttatatgcttcagtagcttctccttcttcaaatggatatccccaaaaacctctttattccatctttgaagagtaattctaagtttattcaacgcttcttgagttctcatctctctatcccaagatgtcaaaagcaactctttgaaaccctcatgttgtaaccaagccgcttcgaaacgaaaaggtcttctagaaggatcacatcccgtctccggcagcaactgaagatacaggggagcatgatcagaagccaaacaagggagatgtgtcaccgtagcctcctgccatttcagcctaaagtgagcacaacatagaatccgatccaatgttttagcaatgtaaaactgttgggatttccctctcttccatgtgaatcgatttcctttaaatcccatatctatcagggacaactcgtttatccaatctccaaatgctaaagaatccggggacaaacaaccattaccgcccgttctttcatcaactcggactattgtgttgaaatctccacctatcaccactggtccatctattcccctgattacttcacgaagcttctcccacaaaccactccttcggctaaccgtaggagcagcgtacacaactattaaattaagtatctcgaactcattctctatacgcgcatagacgaactgctctgaagactccttaatctcaactttcccaatttctgacctccacagtacccaaatgccactactctggccaactgcgtcgattctgaaactattttcaaaccccaaaccatgacaaatccgatctgctctcgccccttctgcgtgcgtctcaaagagcgccaacaaatctgtcttgtatttcttcaaaatatatcgaatcgatcttctgaagttaggtttattcgccccccggcaattccacataatgcaattcatcattaataatcgataaagaaaaagaataactggggcaacccgtcacagaagagtgagctccgtcgataacgctggcgcggccccctgagtccctcccgccacaaccactacattatcctccaaactcggcctaatctcctccgccacttccatgccgaccaaatcgggtttctcatgtccaggttctccgtcaactccattgaagaatgaccctcctggtcgacccagacttatctcttctatcctcacacgtttaccgttggccgaaagctcaaaatcacgtcttgttgagccaaacacaacccctctagttggtttagagtgattagtgtatttgggcctaaccccattactctcatgggctttatgactccaggcccgcctatcccgtagcccttctctaactactcctttcccttttccctccgttgtagcgacaaatttggtaaccttaacttgctccccactcctatcttggaccactgaattcatgggatattcattctccttattatccgtaacaccaataatttctttccttctcccctctgtttccacatcctctcccaacttaccaaatgagttcgacgtcacaaccaactcatttccttttttcctcacatgatcccttggattgcgattcacattaactctagccccaccttgtgcattcacattccggttaacctgagccaccatcttcctttgtcttaccggggtgaatccatccgcatcatgtgtaggaacaaccggattctgaacatttttggtcacttccacactcatgctctcctcccctatttcatgcgagacccccctaggacacttatgaacaaggtgcccatacataccacactgtgagcagatgttcgctaacccctcgtatgagacatagaatctctcctcgttaaccaccactgttcctttaagaggtttctacaaatttatttctacacaaatcctggcaaaacgtcccctttcaaaactgagtgtgtttaagtccaccttaataggtttccccaagctattagcaatccctagtaggatgtccttatgatacagattccatggaaagtttgaaatccgcacccacaccggcgtcgtaacaatctcatcccgcaagggatcaaaatcaggcgaccaagcttgtgcgatgagatagttcccaaacgccttccacatgcccccagtaagcgctgccagatactcctcctccatctcaaaacgaatcatgaaaaattgtcgtggaagatccatgacgtacattgcaccgcaaggcttccacaattctcttaactttcgattcaacaccggcagcgaaatatgacgacccaacactttcactaccatacaccttttccacagaccattcatcgcatccaccacttcttgaccaatcgtaatgaccggctcaccatcctcaccattaggaaactccacccgtagtctctctgcaacaaactcctctgagatgacttcttctgggatcgggactcctcccacactagtccccttaactttctgcacccatactcccggatcatctggtggtgctcctggaggacgagacttcacaccaatatccaccatggtagcataccgctcccctgcgctcgaaaccctagagtcgcccattctcaatccattatccgtaaaaataaaaaaaaaaaaataaaaataaaaaaaaaaatagaaaaaaaaagaagctatcttacaactatttttttgaattttaatcataaaaaaatatattaagagcccatagaaaaactgtctccagtggaatacttttgttaagctcttaagcaggtttggcccttacggagtttccaatatactaaaagctcgtaagcaggtttgacccttatataaaattcagcaaactggtgctctatgcatcaattatgataagtctcatggtgcagtggtttatgtcacaaatgtggggtctatccttgagcactctttttttttgaataaaaaatattttaattatataagtaggacatatatacataagagtctttgggctggacatactcataaaaagccatgcgaattggcctggcacaactcgtaattttatctgcacaaaacagatagcaccaactttgctctgctttcctatggtcgggacccgctctccacaaaaaaagaaacaaaagtagcctggcaacatgtttgcgcacctaaatagcagggaggtttagaccaacgatcgatcactgaggcaaataaggtcagctgctataaactaatatggaggttcctatcatcacactctctttgggcaagatggagacacatttatctcatcaagagggcttccttctggtcaataagcgacactacaaccctgggatcttggatgtgtaaaaagttgaataagtatcgtgattcagcggctggttttgttagagtaacagtgaagaatggacatggcacctc

SEQ ID NO: 5093 - DNA, 573 bp, Arabidopsis thaliana landsberg
cagtatccctacaaatatcttcgagaccgtagagtccagggttgtccaagaatgaagaacatttctgcctttgaaactgtgtgcctcgtggcactggaccttggagaaggttatgggagaagttcatgtatgacagaaaagagagtgcagcaagatcttgagggatttgacctgacagcttattacgggataggtctaatgtctcgagctttgtcaaattcgccaagaatcgtgggatgacgcttgtgaatgcgttacctgacaagttgagaacccgcagttctttcaaatagccaagggattcagggatattaccattgattttgtttccagaaaaatcaatggctctgaagtctcttcggatccgctcaaagctcatatcaactcctttattcaccatttccatctcatggtaatagctatcagcatatctccaaaactctgtcatgtactggtccatttcttctgttaatgtggtcatgtctttccagttggaaaaatagtaaggggggagagttccactgaagttattgtgtgatatatcgatgatccttaaactctgaaacccaatag

SEQ ID NO: 5094 - DNA, 581 bp, Arabidopsis thaliana landsberg
atgtttattaaatttaaattgtaaaaaatatttttatattttaaaaaaatcaacgggccttttactaaatgtttgttattgattccttccttagaatctatttatctgcaagaaaaccaatttacgggacctatagagtttgcaaatacatcttcatcaactaagcttcaggacctaatccttggtcgtaacagactcgatggcccaatcccggaatctatatctagacttctcaaccttgaagagctagatatcagccacaacaactctactggggcaatccctgcaactatatcaaagctagtcaacctccttcatcttgatctttccaagaacaatttggaaggtaaagtaccagcttgcttatggagattgaatacaatggtgctttctcacaattctttcagcagttttgaaaacacttcacaagaagaagcactgatcgaagagttggatttgaattcaaattcattccaaggaccaattccttatatgatctgcaagcttagttcgttaggcattctagaattgtccaacaatctcttcagcggctcgattccttcatgtataaggaactacag

SEQ ID NO: 5095 - DNA, 849 bp, Arabidopsis thaliana landsberg
cgccccacttttgccgtgacgaccagagagatgctcttttggaattcagaggcgagtttccgataaatgcgtcttttcatgttatgaatcaatggagaggtccgtggaataagagcactgattgttgtctttggaacggagtcacttgcaatgataaatctggtcaggtaatatcactcgacattcccaacacctttctcaacaacaatttgaaaaccaacagtagcctttttaaactccaatatcttcgtcacctagaccttatgaattgcaatctctacggagagattccttcttcactaggaaacctttctcatctcacacttgttaacctttactttaataagtttgttggagaaattccggcttcaatcggcaatctaaaccagcttagacaccttatccttgctaataacgttcttacaggagagattccttcttcactaggaaacctttctcgtctcgtaaaccttgagcttttttctaatagattggttggtaagattccagattcaataggagatctaaagcagctaagaaaccttagtcttgcgtctaacaatctcataggcgagattccttcttccttaggaaacctttctaatctcgcacatcttgtacttacgcataatcaactggtaggtgaagttcctgcctccataggaaatctaatcgaactaagagttatgtcatttgaaaacaatagcttaagtgggaatattcctatttcctttgccaatttaacaaagctttctatatttgggctcagctttaataacttcacatccacgttttcatttgacatgaggatattccacaacttggagtactttgatggttcttataact

SEQ ID NO: 5096 - DNA, 1298 bp, Arabidopsis thaliana landsberg
acattttttcccattgttaaaaaaacctgagaattgttgtgctgctctaactcatagtaagctctttttgttctcacaaaccctcctgtatcgcaaaaatatccagcaatcgggttatatacgcttcttggctacgttcttcaatatcctctctttcgcgcaaaattttgctctttttatctcaagaatgatgcaaaggccctgaagcttagaactatacaagaacactttaaaagcaatcatcatataaaccctgtgctgtttttctcttatgcaattaccaggcaacaagtatttgtactgctcggcgttatccagtaggtacgaaggaagatgaaccgctgaataagaccgaggtacaggtcccattttgccaataatctccttgaatgtgtattcttcaggtaacatatcaaacaaatcagttcctttgcaaataacatcttgaatcctccttggattcaggtaatgagagaatctgacacggtctgaatgactataagctttcatcttgaatataaactcgcttatataacggaaacagaagctacaatgccatccagaatcagctaacataacattactctgacgaaaatgagcataccgcgttttccctggactgtaacggtgtatagacgctctccagctcttgctatcgacatagtattcgaaagaatacaaataattcttcaactgaaggtgaagaactggaggaatatcatcacaccatctcaaaagattgatagtatgagcactaggaatctcatcaacatcagacattatcaacaaatcatcttcttgaataccagcaatcctaagcaactgatccaacacaactcgctgatacgcttcttcgacaaacggattctcgcctttcctaaaccgtccaccaatcgtcccataagttagccgcggctccacaaacttaaactgatccttattactcttaaacaccaatggtttaggcaaaccagtaaacgtagaattagattcaagaatcacaaactgtgtcacataaggataaagctcattccacctaacagttaaaagatctttctcattactaaacaaaaccgcgtcgaaaacccgtctgggcgagtctctaattccccaaccatgaagactacagagagattccattgttacattctcattgtagtaatgaggaatggtttgaaatggctttggaggtgattcccaagaggtctaaagacataagtgaacctttggccgtgtagatatattgctaagataccacatggcatcaacacatagagggaacaagatgttcttaaatc

SEQ ID NO: 5097 - DNA, 5173 bp, Arabidopsis thaliana landsberg
  unsure (1)..(5173): unsure at all n locations
gatgcagatagaaccatcaagagctgaatgtgtaatgaaaatgttcacaacctaacatacacatcacttatgtgctttggagctaaaaacatggaaggaatgccatggaaggagcatcaatacaagacaaactccaaatgcaaatgcaacagccatagaccaaaaagcaaacatgataagtaccatggctcgtttcatagcttgctgtatcagaggaatannnnnnnnnnnnnnnnnccaaataagattcattgtagctatgacagacaagagcactggaatgctattgcaaaccagaaaaactatgaacactgctttcttgaccaaacctgtgatgcctaaatctggagcagaactggtgtagatctttgtaaatgtgaaacccataacaaatgtcacaactgctacaattgttgtaaccaccataagcaataagatacgttcttgtagtttagatattctgggacgctgtgaagcactcaagagaattggttgtgtaccatttggtgaactagcagatcccaaagccatatccaagcttattatatctctgaaagattgaattaaacgagacatgatgataggacttcacaaaaacatgttttaaaaagcagattcagaaattttatcataaacttactctctttttccaattgaaacccaaaaagaatagttagaacttaaacttgaaaatacacactcaaagattaccttaagacgctttgaaatctaggtgatgaaggaagacgaagaaaataatgttgaagttttgaacttgtagcaaccaaaatatttaatcctaacaagtcattgacttaatcaaaataagaaaggagaagtctggatgtgcgtaccaatcaacgacgatgtttagcttgccgagcaagcaattaaataattgaattaaggtcgttgactccaacgcaaaaagtcgatgattcaaaggttgggtttttgtctttatccaaaacaaccttatagttttaaaaatataattttaaaaacattttaaaataaaataaaaataagtgttaaaaatctaaattatgtgtaaactatattgaacctaggacacttataaggggtttggatgttgtgtctaattagtttaacacaatatttaaaaatttaacatttatccaaaaaagaacttatagtttcaatagtaatataaaaatataattttaaaaacattttttaataaattaaaaacaaatgttaaaatttttaattatgtgtaaaccatattgaatttaggacacctcttagggttttagatgttgtgtctaattagtttacataacatttaaaaatttaatatttatccaaaaaacccttataattttaatagttatataaaaatataattttaaaaactttttataataaaatgatgataagtattaaaaatttaaattatatataaatcatattgaacctataaacacctcttacaggtttgaatgttatattcaattagtttacacaaaattttaattctttacacttaacaaaaaaaaaaattaaaatcttaatagtaaaataaaaatagaaacattttttaatataagaaaaattaaattatgtgtaaaccatattgaacctaacctcttaggagttaagatttatccaattagtttacacaaaattaaaaaaaaaaacttaagatcttaatagtaatagaaaaatataggtttaaaacattttttaatataaggaaaacaagtgttaaaactttaaataatgtgtaaaccatattgaaactagaacactatttaggggtttggatgatgtatccaattagcttacacaaatttaaatatttaacacttaataaaaaaacttaaaactttaatagtagtataaaaataaaggtttaaaacatatttttgatataagaaaaacaagtgttaaaaatttaaataatgtgtaaaccatattgaacctagaacacctcttaggggtttggatgatgtatccaattagtttacacaaaatttaaaaattcaacacttaataaaaaaaaacttcaaaattttaatagtagtataaaaatttaggtttaaaaacatttatttaataaatataaaaaacaagtgttaaaaatttaaatgatgtgtaaaccatatattgaacctagaacacctcttaggggattggatgatgtatccaattagtttacacaaaatttaaaaatggagcacttaaaaaaatagtatatctaatatattttttaaaaaattgaggaagaaagtttaaatattaaaatatataatttcaaaattgaaacaaaaactcgagtaaaaaagttgtaatagtttttaacaaatccgtgaataaaaaccctatttgtatttacttgaattaaaaatgaaaatattaaaaggctgagaattgacctgttttgatattgttgggctttgaagagaattgcacccttagtccggtaatgagcaccaatgcttatgttgccaagtatagtcaaacaagctccaagcaatgcaccttcacctatttttggttgacgatcaccagtttcgtttccggttcctcctaacgttacaccctgtgacagtgaaaactcaaatagctttgaaaaactgaaaaataatcatatggtctctgtattgaatttccaggaaatggtttggagaagagacgcttacatgtaatatcgagacactgttgcctatcacagaggtctcaccaatgaccattccagttccatgatccaacaatattccctccccaattcttgccgctatgcagaaagagaattcaagcaatatgtataagcagcaatctattcaccggtaaacctgatcaactattacaccagagaagggaaactgagcagtggcggatccaggaaataattttatatggggcacagttataaaaaatcaataaaaagacatcagcaaggcttgaacttgggttaatgtggggcaccattaagtaaaaaaccactacactacatatatttttaattacataatgcaaacttatataagatttataaaattgagtatcgggcacatgccccaccgaagaccaacgtgtgtccgcccgtggttgtgaactgtgatgcgaggtaccttgtcggcttgtcgcaactatatagcttttaaaatatgacaactgagtcagaacatcaaatttgttgaagcaaacgtgctcgatgcttctttttacaaatgcatgggtcgacttcttgtcaaccctttttgcgttggatccttgaaagccaaatagtgcataccaagtatgttatcgtttcgaacgactagtaccaaatgccctgaccaaatgttatctacgtattcgattagctactatcacaagccacaacaatatcacaaatgtgcgtcccagaatttcacacatagccaacaatttgggtttcgacgaaaccagtcgcattttgttttgattggttctccctctgccacccgcaaacgctgcgtttgcgggtggtagcggttgttagcgtttgacaccaatcatagaaaccgctagataccgcttgaaatcgccagatttcaaaagctccttcccgcaagcgtttgcggttgcgggcggtagcggttaggttaatttttttttctaattaattaaaataattatgtcttccacccaaaccctatatatcttattcttatcagaaaatcctaatcaatatattgaaaccctattttctcaattatggcatctacccaaactaacgaaaatcaaaatcaaaatcaagaatcaaacgtaagtatgatctatcctttcatccattcattagctagtgtaattctctgagtatttcatggcatcgttcatttttttattttgtatttttgtttgagttttttgattgaatacatgttttgatttgctttctcgattagaaaatcatttggtcagacgagatgacccgtttcttgttagaactttatcatatgtatagaggcaatccggaaaacccgcgaattcaacgttatttatagtttatcacactacttgatgcaatttttggtgatgtaccaaatgcataaagtattaagctttttcttaccaaatttatttatttttgaatttaatattttatttatggttttaattattaaacatgtttaatttttctaatattttcaatttatcataataatatattgtatttttcttttagtagtaatatattatatttatataggttattttttatttaattactatcgcacccgctggtttaccagtcataaaactcccgtaaacgcacccattatcaaacgctcaaccagtcgttcaaaacgcttgataatgcttgaaaccgcaaccacccgtttccgcaaactcccgcaaccgcaaccgcacctgttgcgtttaaaccagtcaggctctaaatatatatattttcatcagtgtgatagaaaataaaagaaaagaataccgatatgatatgttaaaaaagataatggttctgagagaaagcgtatcaggtgtagaggatcaatcggaaaagggttatcaacggtgaagtattaagatagtttaaaaattcccgccaaaaaaaattcgaatttttttatccgggaaaatatttgttacggagaaaacaatttggcgagaaaaaaaaagatttttgcgggaaataaatttggcggaattatttttttggcgggaaaatttcagtttcaaattacatgttctcattagataagggtaatttggttattttgttcaacaaaagaggtatttttaaaaatggacaatagaaaagggtattattgtaaaaagagagtagaaaaatgatagttttgcaaatccccaaattatttttgtttttttaattaaaattctttttttctatcgtttaatacccattttcatatattttttatttttactttgaatcatattttatttttaattttaatattgaaattttttcaaaagtaacaatatcatttacacatgtgtacgtacacattaataatttgtgtgcatatatatatgtaaacatctaaataatttatatatttatgtttaaagtatattttgagcataaaaacaaaacatttaaacatgcctgaactacacctgggaaaaaaatacataaaacctcagagtcaaatcgaacatattcgaaaatatccaaacggtactagatttctatacctgaata

SEQ ID NO: 5098 - DNA, 824 bp, Arabidopsis thaliana landsberg
  unsure (1)..(824): unsure at all n locations
gctttatatatgagaacaattctcttaataacgaatacatgtaatttaacaatcctcgtatacttaacaaacccacgtgggatcaagagagaaagagatgtacaaaaaagggtaagtaaagagtgtcttgatgcaaaacttccctaaaggggaaactcagaagaatagaaactcatgtttgatgatgcacagtcacagagaannnnnnnnnnnnnnnnnnnnnnnnnnnnagaatcctgaagaaacaaagaggtctatctatatacaataatctttcaccctttaataatcctctcgaagtgcctgatgaaaaactctgcagcattcaccgacaccgatacgcctcagacaaaattgcagagattatatatcagttgtgtaagtgttattagtcccgaggaggattcaagccagcctttgtttcctctcaatgtagaggtcttaagatgaatgagaagtaagactctatgtggtgaagattcgaacgatcattcgctttctcttatgcaatttcccggcaagagaaatctgtacttatccgcgttttccaggagatacgaaggaagatgaacagctgagaaagaatgcgggattggacccatttttcctattatctccttgaaggtatactcttcagggagcatatcgaaaagatcagctcctttgcatataactctttgaactctcttaggattcaagaaatgaccaaacctcactctgtcattatggctataagctttcatcttgaatataaactcactgattcgtcggaagcaaaagctacaatgccatcctgcatccgccaagatttcatcagactgtcg

SEQ ID NO: 5099 - DNA, 3848 bp, Arabidopsis thaliana landsberg
tgtgaaaacaattaaacttgttcatttttgtttcattttagcataaatataatattacagctctaaacaatggtcatggacaaaggttacttaaaaccaaattataattatgagatttctccatatatcactaagacaagttgttaccgacaaaatttatttaaagatagaacaaaaagcagtttaaaccacttttggaaagaaatactggtatatgattattttttgtttttctcattatatgcaagataaagttaaaaataaataaaaatagagattaagagtttgattcaaataaaagtcaacagaattcataagtcataactaatggatacaattttgaatatatcacattagaaaacaaaaaaaaataccctgggtttcatgttccaccaaacgtgaaagtaaaagtaataaaacctcattgtctcattctttaaatatctcacgacttctcacctcatatttctctctctctctccatttaccatgactttcaataagaggcaagtcaagatcaatcactggccggagaagaacgacaaagagaagcagaaatactccaaaaacagagaaaccgtcaagttgacacttctcactcttcttctcctttgctcaatttgtttcctcttcctaactctcaatttccccttcacaatagaattcacagcctcaatccctcgcacatgcgaccacaatttcaccgtctacgtgtacgatctccccaaagagttcaacatcggtctcctccaaaattgccgacacttaaacatctacaccaacatgtgccctcacgtggccaacaatggccttggacagcctcttcaccgcggacgaacttcgtggttctctacgcaccagttcatagccgagatgatcttccacgcacgtgtcgaaaaccatccatgccgcacgtatgagccagacactgccgacatcttctacgtccctttctacggtggtctctacgcttcaagcgtgttccgagagcaaaacctgaccaagcgcgacgagctagctgtcagattagtcaactacattagtggccaacgatggtggaagagaagcaacggtcgtgatcatttcttggccatagggaggacagcttgggatttcatgcgctcctccgacactgactttggagctaacatgctcatgcaaatgccacgtgtcatgaacatgtcggtgctgaccgtggagaggcagccttggaatggtgacaatcactttggtataccgtatccttcttattttcatccgtacacgtcagcagaaatggtgacgtggcaggacaagatgaaaaatgtcgagagaccaaacttgtttagttttgtcggtgggccgagaaagggcttggagaaagctgccattagagacgagctgatcaagcaatgcgctgagtcgagccattgtgagcttctcaagtgtgaaaatggagggtccaggttttttacttttatcatgaatttgacaatttcgcaattaagtattatttaatacactcactagtcaccaaaatttcttgattggaggggcccataatcataaactttatttaatttttattgacaactggcacattgggttatactttattgggtagattacattttttgtggttaactctctctcaacttatttgactaagaggtgtaacaacaattcaactaggagacttggttgttgaactatattttaagcgttttgtgtatccttaactaagaggagtaacaataattcaacttattttttgtcttcatcaggaaatattggaaccttgattatttttactcaatgtaggtgtcacaacccaatgacggtattaggagtgtgctaggcacggtttcctacaagcaccggggactcattcacgcgagatcaacattcgatgcgatgttagccggggcataccgtctttttttcaccccacactatgtatacacagtacatgtggtatcttccggacgataaaagaagttactcagtgttcatggacgaaaagaacaacactcatatagaacaagagctcttgaggatctcggagaacgaagtggttcaaatgagagaaatagtcatcgatttgatcccgagactgacttatgcgcacccaaactctactaactatgatttaccagatgcggttgatatagcgttagaggcactagctaagcaagcaagagacaatgttgtggtttcattgtaagacctatagttttgtgctactcagatgtaattaatcccaaagaataaagaattgtagtgttcagacatcaagccaagcaactattgaactatggacattggcaatatgaaacatgcaacttaagacaaatgacagttatagaaacacgcttgtctatggttatgaagtttccctaatgtatttgattctaccactaactttatcaacttgcttctcaacgtctcttatcacatttacgagttacaaaagaacaagagtcttacaatgacaacattgagaatgtgataaagaataacactctcaagactagcaaggtttaaattactctgctctctgaataacagagtggaaatcaagattaacacttttaagactagcaagcttttaccattttctgaagtctttgggtaattttgatcatgaaattccccgtttgaaaaaatcgtcgtttaacagcgacggccatgaatgtcggagattgtaatttctgacggggaagacaaagaaataacttacagtagcacgaagaaatagcccatgactattttattgggctcaagcccaatatagttggaactttaatctgcgcagaacagataagctaaaatttacacgtttaagttaaaagtcacccgaactaataaaatcactcaataacttattggttggaaaaatgtgaaaatttccaaaaaacaaactatttggacgtttttaattttaatacctaatttcttttgattggaataaaaatacttaattatttatggttataatatatttcatatataaattatcagtagaattgaacccgtaacttaacatgggtataacagaattaaatatgaatgattatattaaaccgatcaatttagaaaaatttatgtaatttcagatattttcagccaattcatatattttagataggtgattttatgaattcgtatagtttctgaccaacaaataaataaatataagaagagaatattttgtttattaattgagcatagaatatgtataattttttttttttttttttttttagaatatgtataattgaatggatggtaagcttattttttttttaaaagactttgtttacgttatactccggaatatgtctcctgaagctgaatgtgtgaaagaaaaaactgaggatatagaaaaattatcaattaaaaactacggtcatgtacttattgtttgggactcaatacggtttgtttagggacaagcgtgtgggagatgcagagcatgacagcatgtggatgctcaaattgcacagacgattaaaactaattatatatacacattgtgttaaaataaattataatttcactatttgatagacatcatcataatgttgggtttcccttgtaaacatttgaagaactcgatttgtttattgtatttataacattttttgtttttgtcttatcttttaattacgtcgtgactaggtacctaaacctcgttcttagctttaagctttaatcaattattacaagacccatcgttccacttaacttaatacagagcaggttgtcgtatatagatggttctatatcgaattatctatttcgaaccagcttgtcgtttatttcagggtgcaacatagtctggtagagttttcaaaaaagaattatac

SEQ ID NO: 5100 - DNA, 785 bp, Arabidopsis thaliana landsberg
aacagtgtttttcacgatccatccttggttttctacagaagattcgtctattgggttcccattttctttaacgactgccattgtgacgtacttgccactaccaatgacaggaaccattttcttacattcttctttccatgcaccgtactgctcccttagatgatcaataacatttaaagttagccatgacgtgcatctacaaaactagtaaatgatcaaccaattctatagtaccttctgcgattcctcagtatgttcctttcctcaaaagtgctgtctggatcgtagcatcctaacaaaaactcccaaacagcgcctttgatggaaggatgaattccctagcaaagaaaccaagtgaacaacaacaaaaagagcatatagatagaaacaagatcaggaaaagaaagtagactcactccgcgctgtatacgtctaagcactttttccatatccaaatggccatcttcagtaaaggcagcgtgccatcttctagcacttagagtctttctcagcctgacaaataacatatgaagaggaagcatcgcatcagctgcaaacacacaatcaaacaaacaagagcctaatgcatcatcaattcatcaagacatgaacaggtgattgagatgaagaacggtacccttgatataaaacgggaccttgtaacatctggttgacattcaggtctaactggatagaaaccttgcaaatcttctccttcggatttacacataaatccgcaggaaaacatacaaccttgcttttattactcttgctcaaaccaaact

SEQ ID NO: 5101 - DNA, 438 bp, Arabidopsis thaliana landsberg
aatcacggcaagtaaaaccaggaaccaagaaaagaaatgcagaatgtttgtcattacctcccaaaggtacaaagcgtcgaggaaagagaattctctcctgaaaagtaccatcagcatccgaatagcaaatagatactccccaccatcgagatcctctgtcacattaacacgttttagcccaccacaagaagagtttttatgataggaaaacactcttacctagatgttgatggagacgaggatccactgtcttaatgacctgtgagagcacacccagttgagtctggacacccattgatgttgctgttgccctgaaattttctctctgaaattcaaagaaaacaataaaccgtgaatacaatggtctggtaatgacatgaaacatgagacggtatgtcataggctattagttattactagtctccgcattgcccgttc

SEQ ID NO: 5102 - DNA, 610 bp, Arabidopsis thaliana landsberg
tggaagtttgggatggaagaatatttgccgtcgactacaacacgatgatgttgcttgtcttctgctactacgaatgtcacttgcggctttcacaatattttgcaatattttacaaacaaattatggtttacaaccaacgttaaatgtaagtattgaagaaagtatgaccatttttaacgaatatgtgggcagaatgaagttgaaagatatgttggtttgagatttggccaaaatcaagaaaccgtgaagagaaaatttgggaaagtttttacagcaactgaattactagcatgtgaatatataagagcaagcccaatggtagagtccttagagggactctttccaatttttaatcataaattttgacaatttcaaaattaaggatttttgttggatccttaaatttttctttctccaatggtaagtcttttaaatgagttttgttctaaaataaaatttaaatgatgcaatgaatcaattttatcctcaaaacaggttcactaaagcttggtagaagaagaaacacactttcgtgtcacctattattcattggtagatgaacaacctgcagtttcagaagaagaccaatttattcatatattgattctac

SEQ ID NO: 5103 - DNA, 4070 bp, Arabidopsis thaliana landsberg
  unsure (1)..(4070): unsure at all n locations
gtaatctttgtaaataatttgggcatataactctaatattaatattatattatgaattggatcccttagggcacaaaatcaaggttttattttattttattggctttaaatcttcctttcttggcatgtagaaagcccttttttaagatcaagaaatccactttttgactcaaaagttcttacaataataatcaaattaaacactttcttgtctccaaatattggttgatagacattaggcacagtctttagtccaatgcccaatagatttaatattttttagaattataattataacggtatttatctgctaattgttttaaaattataataatagaaagtgacctctcacgacagactcataaaactagaaaatgtcgttgcacatttaagaacatctaaaaagagaatgaaaagaaacctaagtaaggtcctgtctttttgccttgccaatgttagtcctatattaccacattaggttattttctacatacatggaaactctattcatcaacatatatatgatccatgtattatatcaggcattcatattattctttttaataatcctatgttatatatgaaaatagctgttttttcttttgttcataaaaaaacaaataatacatatatatattatgctgaagatttttctcatatatagtaacgaggaatagtatataagtacatatgtacattttttgcgtcctgcttttgttatttttttctctgccaatattatgatccagtgagtaatgcatgcagagtttctgacaacttctcattctcttattttatctctctctctatgtatacatgataattctaaatcattagtaaatcccataatattttctaattaattaaaattttcaaatttgccctaaaattttaagaaactgcagtgtggttacagcataacacttttgtcagagaattaaggctataagtctagagttttcattgttgtttttttactttgaaattgatcatggaattatcttttttcctgactcgattcatcttttccattgaagtgggtttttatcttttttttttctttccttaatttttttcagtcaaaagagacgacattatgggcatacatatgccgaaaagcacatggaacccaatgttaagggtctcttagagcacgtgcagtggtgtctatagattatatactatgttcttacatttgatatatcacacattaaaatacaaaagtgatattctgaatctggtcatcttagaactcaggaacatttgaactactttctttcccttcttatttaaagtatatcatagctgcatgtggttgttgatgtgattggtaatttgcataataataaataggatttgccattccatcatatgttatttgttgtactaatctattttatgttacatttcgtgccctagggcctagattattcttttttgtataatgattatctgactaatagacattaaacctttggtttgacaagatatcttttcttttcgtatagaattcgaaatatttgtttttaggttgtactatagagctagagtacgaagtcaaatacattactttgcgtttaatgaggaataaagatgtacaataaataacaatataaacgtaaatgtagagaatgtaggtccacggattgttggagagggatgagagagacagagaaacatctactatatataagtgtaatatttgtgtatttatgggaagctctacttttaacaagaccaaaggcttaaaagctatcctttcttggaaatgaaagagagaagggcacgcttgttggcaaagtcgtaatctcatgttcagcttaactcatttaaagtcttctcatctgtcctaataaattaacatatcatctgttttgtattattgtcacattgatttgttttttgttcttttgacatgggactagggcttcctctcgttattccttttacactagggcttctgttgttatatctctatctatagcttccagagattgattagtcccgtcaattgaacatatgtcataaaatagatttttataaaaatgagttgtgtgtttcgatgagtaagacaaatattacgcagagcttgtgtctgagtctgtcgttgtctttccatcttcctagtccctatatatagagtctttcatgtttcgttgcaggcctacttatcttctttctatgtctttttttactctctcccttatttatacatttattaattaagctactaattataatatttgttaaaacttataataatttttcttaatcgcaggtttgcaccacgtggctagctgtctctcgctccgaccatctatggcaactactatctcgccaagtttgggcaagaacacatttgatgcacgacacgtggcgggacgagttcatctaccgtcatcggacggctagaaacttccggacgcgtactcacacctacttcactctccaatttgacccgtctgatgtggacgagcctgatagtctctcttgccgttgtctcaccctctcagacctctacttagccgcagggttcgccgacggaaccgtccggctttttcttttaaacaaccgactccacgtcaggaccttacggccacctctacgtgaccgctttggnnnnnnnnnnnnnnnnnnnnnnnnnnnnnntatctccgactcaaggctcacgttcgctacgatggacggagacatccacgtggcggaaatagacggtggttggtcacacacgcacggcttacgcaggagatatagttaacgacggtgcgttggtagatttcactggctgtggacgttggtgggtcggtcttttcgcgggtgtgccaggtcgtgcctttcacatatgggactgtaacagcgaagagacaacattcgtcggtggtacactcaccgaccctgaagctgtcatgggatggcacacgttaacagagctaacaacgtcccttggccgtctcagaatctccggtaacgagacggcggtagcatgcacgagatggagaatcatggtgatcgatctaagaaaccaaggagtgatcatcggagaagacgaagagcaacgtagaggactaatagtgacaggcttcgatgccaacgacgaagcgtacgttagattggacagtagaggaaacgctagcgtgcgaagggtgaacacgcaacaaacggtgtgtgagttccgtgttagtggagcggcgcagagaagagtaatgggttgtgttaatagactgcacgcgctaatgtgcgcaggtggtataatgcgcgtgtgggaggtagagagaggagagtatctgtacagtattagggagagagtaggagaagttgacgccattgttgccgatgatagacatgtggcggttgcgtcagcttcatcaacggctcagagtattatacatctatgggatttcggtgcactgtagcgtaccagattactaaaatttttttttttaacttgaagaaaaagaaactatttttctctgaaaaagcgaaaccctaaacctaggtgtatatgtagggtttctgattataaattaaattgggaaagtgacggagggaagatggtgacaggagggtgagatttacaagggagattgattctttctacagagtttgaccaaaaaagtaagttactgtttttgtctaaaaccaaacaaagtggactttttcttgttgttcttgtttttttccttgtgtttagggctctctcaattctgactttgtacgagatgtcttttttttttcttctacttgtaactcttcactttactggagtttattattttgtataatgggttttaaatacattttgtgtaaaaaatatattttacaggaggtgtagacagaaacaagatcaaaatcgaaagaatggtatagaaatatgaatcatgagatctaggtgtgatttgagcatatcccaattttaggatatattggagtgaaatgataagtaaaatgttcaacaagttattcataaaccgtaacatatgaaaagagcataatcggacacacccaatatacaaagaaaacggctaatctcattgaacaaacaagatgataaagagtgaaaatcaaaattt

SEQ ID NO: 5104 - DNA, 4324 bp, Arabidopsis thaliana landsberg
gcacatcaaccacatggaaagattgcagccatggtggtttggtggaactacattatcaattgagtaattataagcgtgtgattaagaaattgttgtcttgcgcggttaggccggagcatagtccacagaattgaattgcttgggccttaactggatattaaagagtgtaataaacaatttctactatttctatttgcccaaaacaaaactgtctcggtccataataaagcccgaatttactctaaagcccacgagcccacgcatcccctagggtttctgtgtcttcaaatgtgacctatcctcatctgctacactaccccatctattctcggccggaaaatctattcttgattatcgtccagggactgcaacagagagaaagtaacgatgccggcgaaacagaggacagctaaggtcaacaggaaccctgatctgatcaggggagttggtaaatactcaaggtctcagatgtaccataagagaggtttgtgggctatcaaggccaaaaatggaggcgttttcccccgccacgacgctaaatctaaggttgatgctccggtggagaaggcacccaagttctatccagctgaagacgtgaagaaacctcttcccaacaggcgcacgccaaaaccaaccaagctcaggtacttagctaatacacagtctcgttgtcttggagtctgaaatctagctcaatgcaatagttgttttctttgtatcttaaggagtgctttgtatgcatttaaatctttgaatctcccgaatttttttgactagcttagtgttttgaaatcgttaattagtcattgtggtctgttctattttgtttgtgaagttatcttgattctgtggaaagtttgcctcttttgcttgtattttgtgttacattgttcggaatttgttatgttgtaatccgatattcatatttctctattgcagagctagcatcactccagggacagtgcttatcatccttgctggtagatttaagggcaagagagttgtcttccttaagcagcttgcctccggtttgcttcttgtgactggtgagttttatgctgatctactttcttcatttgccacattctttattcgaaatgcagaacgcacatttactaaacttgctttgtgtattctgtatggagttgacatttcctgttttgttattgaccttcaggaccattcaagatcaatggtgttcctttgagacgtgttaaccaggcctatgtcattggtacttccacaaaggttgacatttctggagtcaccctcgacaaattcgatgataagtacttcggcaaggttgctgagaagaaaaagaagaagactgaaggagagttcttcgaggctgagaaagaggtatcccaaacattcttcttgttttggttctcattttgtaatagacgattaaagttctctcctttatacactacccaaattgaaagctatgcgtgacctccatatactttttttccttccgcaggagaagaaagagattccgcagggaaagaaagatgaccagaaagccgtggacgcagctttgatcaaagccattgaagcagttccagagttgaagtcttacctcggagcaaggttttcattgaaacaaggaatgaagccccatgagcttgttttctagatttcattactttttttctgaggtttctagtgtatctgtctcctgaagttttacactccaactggttggttctgttctcgtccactgaccagagacataaaatttcggctgctgctatctggatttctgtcttatatggataatttatcaatcctgttttcgaaggagaacttttcacaagattctagtaatgcttaagtcatgacgaagtgatgaaattgagaattgaaaataacattgcaataatgatatagtttagcttacaatctacttcgaatattgaaactcttattactagtctctgtcacatgcaccgagatcaagctggaggtgcttctagacgaatttgatcattatctttaggtgtttctttgctagcacaatcagcaactttagctccggcctcaacatctccggccaaacaccgtctccattttcgtctcagccaacctaaaagcccaccactctttatcatctccaacggattgacttcagccactagaccagttctctggcggctccgtgcgcagaatcgacccaagaagcaggagagaacagcaagaatgatgagaacagatatgacagcgaagaagggtccaatggagctggaagagtaatggtttgaagcgtttggtgctgcgattagattggcattggtagccataggtgtgatctcattgcctcctaattgttgttgaggttgttgttggataggaaacaatgacgagctgctactactactagccatagccattgaatctaatgaaattttggttttcggtgatcaagattcaatatttgttgattgagtaacggggtcattagtatatatatacataggcatgtgcacattgatcttttgaagagcttttaagccgaccaatgtttgttgaagaaggacatgtaaaggtgaataaagcggagaaatcctcatcagcttcatcaaaagcgtctcaaactaattataaatgatatatgtgatccattgcactcttagaggtgaaggaatcgtcttgctctgattttggcgttggtcaaattgtgtggggattattagcctgagtttttagataaactactctctaactctgatttttttatcatcctgtcaaaatagttttaggtgaaaagatttaatactacaaagttgtaagaaaaaacaaatcctattatgcatgttacggtccacattaaaaggccgatatgattgtaaagcccatgagcccaagaaagccctaaaatttaattagggtttcagtgtcttcaaattcacctatcctcagcctcaactctctcctctatccactctcagccggaaaaattttccttgattcattacgacagagagaaccatgccggcgaaacagaggaccccgaaggtcaacagaaaccctgatctgatcaggggtgttggtaaatactcgagatcccagatgtaccataagagaggtttgtgggctatcaaggccaaaaatggaggcgttttcccacgtcacgacgctaaatctaaggttgatgctccggtggagaagccaccgaagttctatccagctgaagatgttaagaaacctctccccaacaggcgcacggcaaaaccaaccaagctcaggtacttagtctgacactggtatcgatgcaattatcttccatgtgtttggttgatttctttggctcgtttgctaagtgggtttgtataagatttgaatatctgctggaaaagtgtccaaattttgcattgtgtaaatcatttgtctctaggatatttgaagaatagttgaaatgcattggtttgtgaagattgttagtggagttaaacttgaatttcaaaaggttcataatttctgtgaatacatctagttttcttgtacattactgttattagtatgattaagcttgtctcaggttgatagtaaaaagaaaaaaagcgaatttgattttcatttgtataccaaatttaatgtctatgctctgtaacgtcttcaatagatctaatatatgtttccaacatgatccgatcttcttatatctgtattgcagagctagcattactccaggtacagtgttgattatccttgctggtaggttcaagggaaagagagttgtcttccttaagcagcttgcctctggtttgcttcttgtgactggtgagttattctctatctgttctcatgaacttgtctcctataaatcatttgaagcgaagctcattcactgatttttaccatctgaattgttcatcctttttttaacaattctttaggaccattcaagatcaatggtgttcctttgagacgtgttaaccaggcctatgtgattggcacttccacaaaggttgacatttctggagtcaccctcgataaattcgatgataagtactttggcaaggttgctgagaagaaaaagaagaagacagaaggagagttctttgaggctgagaaagaggtataaccttatatcgcaaaacatggaaaggacgcaattcatcttgtgtttctctcctttaaatttggttatcacagtttgttccggaagaatagacattgaaaatatctttatatcacttgttattttccaaaccaaaacatatgcttgacataacatctctcttttatatttcacaggagaagaaggagatcccacaggtgaagaaagatgaccagaaagctgtggatgcagctttgatcc

SEQ ID NO: 5105 - DNA, 867 bp, Arabidopsis thaliana landsberg
tacagatcatgatctagtgtatactttatgattctttttcttatgcttatgtttggtgtcgtgtattgtgtctttttaaagctatataatacgtataagatataattgtaactcttattttatgtattatatgatgattcaaatcaatttaaaaagttaaacaaatatgataaaaagtcataattttaaactttaatcaaatcttctaagttctaactatgtatattgttaaatatgaaatatccggtgtaagaattggattaaatataacttatccaacaaaatttgtatgaacaaaattgtttaacgggatggatatcatttttataaaaaaacacttttacttacctgccaaatagtaagtacaaaaatacttcatttaaagcccaatattttgcaataacacacttttgcactagacccccatatgaagcccatattaaagtattctagaccataagggcccattaggtttttactttctgctatataaaagctcaatctagggtttatgtctctgatagattttacaccaccgaagccgaaaaaatgccggcggcgaagaggactcccaaggttaaccgtaaccctgacctaatcaggggagttggaaaatattcgaggtctcagatgtaccacaagagaggtttgtgggctatcaaggccaagaacggtggcgttttccctcgtcacgatgctcagccaaaggtcgacgctccggttgagaagcctgccaagttttatccggcggaagacgtgaagaagccgcttgttaacagacgcaagcctaagcctaccaagctaaagtaattatccatcttcttctacgactggtttttaattttcatttgagtttgattccgctag

SEQ ID NO: 5106 - DNA, 1036 bp, Arabidopsis thaliana landsberg
acttcgcaattaaatggtgttttctgctgtttgcacattgctttgggatatattttgaaattccggaaaaagaactggcaatgtgatttcattggtggtattatatactttatcttggtcttttcattattccctcaggtgcgtgttaaggtcatcctatttaaacatttcatccagtaatagattgggtagctgagataggtgtttcatatgctatagcagttctttttgttaggtttgcatatacgtagatttttttttccttcggaacaatcatgtaggctcactgcaatctcattctttcttgttcctcgtttgtttcagtgtaagctagctcacgtcttacgaggtgattcgttttctggtcacctggagagtttcttaggcacagtttggaacgcctttgcgtatgtgatggaacaatcttatgtatcttttaccggtgtcttgatgttgctgataaccgcaatcacatttgtcccctcaaaagtatctccgaagaaaagggttctaattggagttcttcatgttgctgctcacctgatggcagctctgattctcatgttgatgttggagctgggcatagaaatctgtattcagcataatctccttgcaaattctggtcagtttccattccaaataccggtggttgggttttcgtaccaaagtgcattgttttatttgcatactgagctatcatcttgactcatcacgatgtcatcgacgccaatagataatagtgactgggtgaaattttctgtgatttagctttgattgattttgtgactttttacattattgtttaagcagggtatcatacattatatgagtggtacaaatcagtggagaatgagcatttcccggaccctactggccttcgagctcgtatcgaacaatggacgtttggcttatatcctgcgtgcatcaagtatcttatgtcagcatttgatgttcctgaggtaaataatgtactgtgttttgtctctgttttgataaaccaaagatcccatttgaaacatcaacctgagtactttaa

SEQ ID NO: 5107 - DNA, 1783 bp, Arabidopsis thaliana landsberg
ttgcaaaacgtgttagattatactttgttgcgtttccaggaggtttgctccgtttccagagaagttgagctcctgacatatcttcactcagtttccctttcccagaacaatcacccgtcacaaagtgcatgctctcatcccatttcccaaacatagttgccactgtcttcccactcttgtcttgaacaataccatgaacctgtgacaaggaaaagttacttacctcagaacgtaaatctcggactatcccaactaggggtggacaaaaaaacctagccaaagtatctcaattgaaatcttcacttttgaaatagaacagtaacaatatagactgaagttctttaatcacaatacaataacaatattatattaactgagacttgtgatttatattcgatacaaacggaaccaaagccaaaccaaactgagttttcaaattgaagaaaaccaaaaactaggttctaatttggttttacctttctcaaaaacgaataagcaaatgtccactcctaatgacaatacgtgaacatctcatcaaagaaagtacgtacctgatgaggatttcggtctataatagactgctccttgaatttaagtttacatgagtattctgcactaccctcaatacgcatagtaccatagtgatcacagtatagtttaccaagtatgagattgtatattgatgtagtcacctacaagtgtaaagaaagggtatattagtgaacaacgaacatattaaatgattatttgcttggtaaaaatttgattgataccttactccactgaaggatttctccatcatcaaattgcaaagtcaatacaccaacaggatcaagctgaatagatcgaccccagaatttgctcctaagattgctgtctccccagaatttccatccggtgccatcacaatggcatgcgacaaccataggatgatgactgacctgacaccaaaagaaataagaggtctgaatagctatagataataattaaaacatagaaaagaagatatgtgttgtgaactgaaaccttttctgaaaaaaatcgaaggcctttgtctggatagtctgcctcgtatgtttcacctaacaatggattaaaaggtttgcaaattcttccttcagttgatgcatacccagatacagcaaaagcagctacattaagtatcctcatgaggctatttccctgaaaaacgtttcacatactgagcaatattcaagatgctaccataagggtttcagatgggacaagcgttcagatagtttacccttttgccatattcaaatgctcggtcaagaaggtacgaatattccaaatcctcaaaacatttctgtaaagaagaaagtggctcgttgaagtaaacaggaagacagacttttgtgagatccttccctatattgtctttgatcattgaccaaaggctaacacttttctctttttcaaccggatcaggtaaattcttcctccttttgacgcgaggataattgcatccaatagacttgatggaaggatcaatatcatcttcagactcaaagccatcttcatcggacgaaaatgatgatgtacgaaaaccagaaccactactcttgaaagaacttgaagaaagaaaatcacgtgtatcaaaaaaggtattttcttcctcatcaaattcctcctcggcggcatcacctcgttcattatcatcatcagactcagtggcagtgccttctgagataaatataaaccaagtcaattgcaaacttcaatcaaaatacaggtaaaatgaaaccgttatatgcaggaatgc

SEQ ID NO: 5108 - DNA, 950 bp, Arabidopsis thaliana landsberg
ttcgatcaccaagagatagatagctagaacatataaagcaaatgcagaaagagtgaaacatagaaagttaatgactttgaaatttttagaccaaaccgggtccagtgttggtttgagtgtattcttcgttgagtttgccttcgtaaacataaccgagcttctcacaacacttcttaatctctttgacatctttctccgagcaagtatcatcggaaacaacaacggtcgtttcgttttctcccgtttcatatttggcaactgcttgatgattcagaactgcaatcttgacgaccttgtcgtctccaaaagtagtgcaagaaattactctagcttccatttctttattattgtctttgggtttattactctgctttttggataggaataataaagagtataagggtgatggatggtttatatagagaacaatcatgtgaatgttaattaatggtcaaatcacgaaacatgtatgcatgtaaaaaactgtaaatggaccaccagatttggttattatttgaacaataaagttgaatccctgaaattgcttcattttacatgactcaagttttccagttctctatcttagaaagtgaatgccacaacaacagtatagtgttaaggcacaatttcctatagttgtagtagatatatgttttaccttaggcaaccagaagaaaaaaaaaaaaaagtgttaagagttttatggtagatcgcaagcagaagaaaatataatataatttttttgtatcaacaatcatttatttgttctcattagtatatacatatgtatagcttaaaaatcaaggttatggctatgataccagatggtgtagataacacatatatttttgtttagtctaagaatgtccaagaatctatgttatcttattccgttaagaactctcaagttctagccacaacaagtatttaagagttgaaatgctctttga

SEQ ID NO: 5109 - DNA, 446 bp, Arabidopsis thaliana landsberg
  unsure (1)..(446): unsure at all n locations
tgatcaaccatcacatagtgtatactctcatcccattttccaaacaacctagccactgtttttccattcttgtcttctactataccttgaacttgatgcggatttctatcgatcatcgactgttccttgaatttaagtttacatnnnnnnnnnnnnnnnnnnnnnntcttcattgtcccgtagtgatcacaatacaatttaccaagtatgagattgtatattgatgtagtcacctatatttgtgagcatagaaggataagcaacatatcatttacaaatgttttttattttttatactaagattcattaccttactccattgcacaatttcaccatcatcaaattgcaaagtcaacaaaccaataggatcaagttgaattgatcgaccccaaaatttgctttttaagttgctatctccccaaaattttcatccggtgcctgacaat

SEQ ID NO: 5110 - DNA, 1845 bp, Arabidopsis thaliana landsberg
atgcgtatccaccgctgaggtatatgcccgttactaattctttttttatgttgaatttggccgtaatgaataggcactgtttggttttgtagaaaaaatggctcagattaatttgtcttgtgttatatgctacttaacaaagcttcttacatcaatcaatgtctttgtaggggctcaagatgctatcttcaaccagactctgtaaatctaacgtcacaagaagctacgaaaactatcgatgataccaaaaacgacaaatgttgtacagttatacatttgtctagttactatcacccgggttataataacagttattctggttataattcttttcagactttattatgactaattatatatcatttatctgttaaaagttcataaaatagcctcatcatttgagttttttgcggtatcgataaattttaagttttaaaaaaagaaattgaaaaaataaaaaaactccgttgccgggactcgaacccgggtctctcgggtgagagccgagtatcctgaccagctagactacaacggattcttgtctatatttcgttaagattttatttatcactaagactatgatagtaacacaacctttttatattttgcagatagtttaatggagtcttgtacatatgaacagattaagtgatactagaagctcttgcattgtttatcactctattctacacaccagaaaaaagggatcattacagaacattttgaaacaatcaaatatattgttagccattcctactgccaagaatgtcatatgtacacaagagtgctattggtcatgactcatgactgcagatttttcagcataagaagactaacaccttgttactttgggactctggttaatggtaaattggtaacaatgcaaattccgtcatcaagcaaacttaaaaactcattcttggaaggcaggtgtccatttctatccaccttgactcattccattccctctcctttcaaagaccaagttggaaaggtactgagcattttctggtccagtgctatgaaccatcttaaagaaggcacttgtatctcttgatagcaattcttgtggactatcatactccaaaacctaacaaaattgacgtagttttatgtcagtcacagaaggacgttactattctgtaccagaatcttcttaagcgagttctatgaacaataatcctggccttacctgaccagaactaagcacaaggatcttgtcgcagtcgatgatggtattcaatctgtgagcgataataagcattgtacaagacttgaattcctcacgtatggtcctctgtatcagagaatctgttctgacatcaacagatgcagttgcttcatcaagaaaaaggatcttagatcttcttagcaatgcacgcgctagactcagcagttgtctttgccccacactgaagttctcacctccctcagagacctttacagattaaagtaacactttgatcagccatctccataagaaatcaaagaattcttctaactaatatatgtcactaaagataaactatacctctgcatctaggccaaaaggattcctatcgatgacatcttttatatgcgccctttctagagcctcccagaggtcagcatcattgtgttcactaaatggatcgatattgaatctcaccgtccctaacaagaagaactgtttctcagaattcaggatcatacttacaatatcgtcttaaactacacacaaacctgaaaaaagaactggtgactggggtatgatacttaggaccctacgcaaccctgtcagtccaaacttagccacataataataatcaatcaggattcttcctttttccaattccacaatgcggt

SEQ ID NO: 5111 - DNA, 1891 bp, Arabidopsis thaliana landsberg
ggataactatcagcaaaattgactatatgtgtttatatttcatataaaaatagatcacaaaacatgccgcatagtagtaaattcttttgaaactgaatcctaaaagtatgggtgaggttcaatacttatagattaatgtctaaaaaatacccgtctttttttgtgataagatattattaaaggctcaaacgagccaatcttgggggaaattgtttacataagtgatatgtagcggttctgtacaaattttccgtgccaaataatcccccttgacctttttcattgcgagagattaaagataaagaaaaagaagagaattctttcgtgtcgctttgaaactcctccaaatatgttgaaaaactggccattcaattgggaaagacaccatcttccaaaggtctgaacagtctgcaaaacaaattacttcttggttgtcggcattgatatgtcttggtttttactgatttctaacatagtttcataatgtatttagagtctttctagtctttttcgtatgttttgagtcatttcaggtacacttacacatttgggaactatggagcacaataaggaattttggaagcttttcagcattaaagatcttgaaggacgtttttcagaagctggtgtcgatcgacaccacacctgtgtcgatcgacactcttatcgctgccaagagaatattcgttttacaccaagtctttgagaagccctgaagttttccttatttgcaaaatagtccctgcacgtttttagggttaaatagctaattgtttggtcattgttagacctagtttttgttcttgagcttttgttacactttacagaaaagaatccaatccctaaagaaaggattctaaactcctttgttattattattaattcatcaatgaaaactatttagattatgatttgtgtttctattgtcatgtctgagtaatcaccttgttgggtttagggagtctcaatagggatttagatggattagtagatcgaaaccccttacgattattcttagagttcttcatcttgattattcctattcctagttttagactgatcacctagaacttgatattagataataggtatgccaaccataggtacttgttatttgaactatcatagatgagcatatgcatttaagaaagaacaggtaggctcatagaagggctctggtttagataataggtgaactaatcaaactggataataatgcatgctttagtatagggtttatcggcttctccggttatcttagctctaagtataaagagttttgcggaacaccaccatttactctaaaatcattgtttgagttcaagagcagtgcgataacaatcataatattagctagatctacaatttatctatctcccgagacatttccttagacccgacgctttaatcacttgaatctacaactagtttacttgcttatttgacatttacattcatttactttgtctaacttatttaaaaacatcataagtctattgtgtgaacatcgagagcttagtggaaattgacccttaagtgctaacgacgatctcttatttgagggagtaagcttaaggcaatttgagctatatcaatcgacactgattctttttctacaactcgaaaagatgaagtctgagctgaacgttcgcgctgaagaattgggttgagctgctttccgctgcgtagtgtgactgcattgacttgatgcagaggtaggagaaggctcagggatttgagattgcagattgttgattttcccattaagatctgtgcacttgctattaaactcaaccacgagctttgtttggcccacaagaatctgcgcaagcatggagtcgagtcggttgtaaggagggtggaggggggggtggataggagcagagattgc

SEQ ID NO: 5112 - DNA, 1257 bp, Arabidopsis thaliana landsberg
tctaatggaagctaggttgttatcgaaccattcttaaactcaaactctaattatggaataaacagtggtgttccacgaaactccctatgattatggctaagaataaccagagaagctgagagatctttgacctaaacatgcattctaaaagagttcaattgttcaccttagtagatatgccgattcttattacacacctataaacaagggtcatcaaataatagatccaactagagatacctatggtgggcatatctattgtctcgattcaagatctagttaattactatagatctagcattttgcattttcaaagatgaagaattctacagatgggctaggggaggggaaaaattactaaaccatatgaatccctagtgagaaatcctattcctaacaagcagattactcagacatattgattgaagcaaacaacataattgtgtatgaaagcataaacacaacaataaaaatgagggaaagaaagtatctcttcactgtattgaaaactgaatgaatctctgaaaacaatgggtgaatagcttatgtctctcagtaacagggttttgcaaaagcttgataatagaaactagggtttagaacaatgtatataaaccctataaaacgtcaagggactaataatgcaaataggaaagtcttctggggcatatttccacttctataaacttgtaagcgtcatagacttttgcagggccgaaactggtgtgcgatcgacaccaagagtgtgtcgatcgacactcctcgctgattcctgaaccaaaatcgtccttagcttccttttccttagcttttgctccaaaatgtctccttatcttcattgttgtcccattgcatagaatacctgaaaagacactaaaaagactcgagaaataacataaagactcaaaatcctatacctaaaacatagataaaatcggtgaaaatcgggttatatcaactctcccagacttagcttttgcttgcaatcaagcaaaacacaaaagttaaacccgtggaagaggttttgaaaacaaaggaactccaaacattctttagcctattgccatgatcattcaaactaagtccatacgcctaacaagtctaatcaagtcctaaccagcatgtacttctctgcaagcttacacaacattctagattccatggctaagttccacaaatatacccgccaggctttcatcgctgggtctcatcaaacaagccaacattcaagatctttccaaactcattcctgtacta

SEQ ID NO: 5113 - DNA, 2049 bp, Arabidopsis thaliana landsberg
gatttaattaaggaagtgtacatataaaagaaatatttaggtagaagaaaacatgcaaaacgaatatgcttgatttagccctattgctaaggatacgcgtagtgggaagataaaagattttcggatatctcgcatttaatgagtcgacaaaacctgcaaaaaaatccgccggtgtaacttacagtacgagaatcgtaatgatgagggggaatataattcggtttgcgtgtttggctatatattacacccctatcaatgttgcttcaacaacaaaactgaaaacacataacggaaaatatctgcatttactaaggcgatgataacaagattagagtaattgaagttttaggtaagaagttaattctcaagttactttgttcatcatatgtagagtgtaataaatagtacaccctaacatagggtttgaaaattttgtctcattcgaacgctaacactacaattatggatgattatcgacatgaactatggcgatggttgttagactggttcgagtagagtggaaaagagatgagtctggatgctatgaacatgtcgtcgagttagatgggttatgcttggcggtaaaaatctgggaaagagacccgttcgctaaagttgttgacgccgtgaaggaaagattatcactccagtcggaagatgaagtggagttgtcttaccaatggccgcagtggataatgggaccagattggcagagggcaaacccaatacctattctcgatgatgaggatatgactttgtttatggcgatccgatctgatctagaggaggttcacctgaaggtgaagatcatacggaaaatgttgggagcatcaaccgtaaattcccaccgaagcgtcttagatatggggaatatgacctcggaaacgatatccgataagtattggaatagcagtgaaacacgagcagcttgggattccgcagtaacgagaatgttgtatggtatcgtctctggtaatagtgtaaccggtgatgtcggtctagccaaatacggtgcaggaccccatatagtcaggggagggggtataactatcagagaaaacacgggagagactggtgttggaagcgtcgcaccaagaacgctaacccaaggccatccaagtgcaaccgctaaagggaaagaacgtatcttggacgaagagagcatcaatgacttggagttcgcagtttggaggaagaaccaacaggaagtgatgctgcgagagatggaggagagagaaatacgactggcaggctctatggtaggacagctcgtcacgactccagctaaagctacggataacgatgttagagggcaaacaagttcaaacccggaggaagccattcgtcttacacttggcaacgcggctccagttgctgacgtggtatccgtagtggctctatcttcaacaaactcgacattcaagacaccgtctaacagtataagcttctctagtgaggatctaatggacgaagacgaagtatctagtaacaattgtctggcaaggataggtatgttagcaaatacagttagtcttatccaaataacattcatgttgacttgtaactaaccgcgggatctgataaagtttttcttacccatatacaaaggcgaagacgaggtggcgcactactactcagaccccgacggaccgctgtgtatggcaccaatgaacacccccaaaataagtagagtcaacaacattgttaggggggagattgttgcaactgaggcacaagttaatgagttaaatacccatgttcgccggaggttggcagatatatatttgaaagaaacactagtgccaacagttttgtatgacaaggacgccccaccatatttcgacgaccctggagaagaaggtaacacatgttaggatattatatttattagcatctatatgttagagtatctgataattgtggattaaaatattatcctataagtcgggtatttatccagtaaaccttaacatatctctatctctgtaaatttcagattatttgcatcgagctctaaaggacgcagactatgaaggggacgatttcttc

SEQ ID NO: 5114 - DNA, 3516 bp, Arabidopsis thaliana landsberg
taaaaccacacataacaatcacaaatgaagaatccttcagtgatctcttttctcatcattctcctgtctgctgcaactatttgcacccacggaaatgaaccggtgaaggatacagccggaaatccacttaacacccgcgaacaatacttcatccagccggttaagaccgagagtaaaaacggaggtggtcttgtcccagccgccattacagtacttcccttttgtccacttggcatcacccaaacacttcttccctaccaacccggcctaccggttagcttcgtattagcacttggcgtaggatcaaccgttatgacatcttcggctgtaaacatcgagttcaagtccaacatctggccgttttgcaaggagttttccaagttttgggaagttgatgattcctcatcagctcccaaggagccttcaattctcatcggtggtaaaatgggggaccgaaatagctcgtttaagattgagaaagctggagaaggagctagagcaaacgtttataagttgaccaccttttacggaaccgttggagccatcccaggggtttggttaagcgcaccacaactaattatcaccaaggatacggctaagaccttactcgtcaaattcaaaaaggttgatgatgctactacggctactagcaacttatacttcccgggttgataatttaggtctaaggatgttcccattctactaatcaactggtaaaaattattgtaatattaagcctgagactcgtccatggcctaaaataatgagttattttcaaatttcaattaataagaaagaaaaatgtggccagatccagatacatagatgttgagaatcattcataggcattgctgttgaatctgtttaaggcatgaaatagttttcttcttcattctactttgtatccgaaaattttctctcctcttgtaaagatcttgagcttgagaaaacattgatcattcatagtataacttgctggacagaatctagctccggacgtggatctcgtgacatcgactaatcaaaccggataaataaacgtgtatgtctcttgcttaattgagagattaagatatttgaggagtatctcaaggttttatcaacaaagaaacgtaacactattcttttgatcacgatagggtttctttttttggcgttactctatatagcttattttcccaaaaacactcaaaacgacgacgtttagcaagacatatattatccaataagttttaaaagtctaaatcaaaagctttcgtttcacaaaaacctctctctttttttctctctctctctctgtctctgaatcctccattgatgtttaggtatgtctcagtttctcagattctcatgctttgtcttctttcgcgcgtcatacgactctttcttttcactcaatgtctctttggtaactatgcacaccaaatgttcgattaaatgccgcttacagaccccacttgagttattctgttagcatcacagatttttttgttttcttagacctcttaagaacggagaaatttcatggaagccaaagttggtttgatcatacgatacattccagatttctaatcaaatccttttataaaaatctgcttttgatcatgttaaagccaaagggttttacatagctagagagctacatgtatatagaaatcgtttgaatgtcacgagctgcataaattcctgttctttacatcatcaaagcttctattaccatcaaaattataatttacatggaaatgatggttaacatatgcaattgacaagaaaaatatgtgtatatttacttatgcagatatttgaatctggtcacaatgatgaatgtagggaaggaaggcacacacacagttacgtctcttcttcttcttcaggttcttctctgttattttggtttttctccgcttctatattctttagccagtctacaacttgttgaatgtttggtcttttcattggattttggttcacacacatgcaggctatgtcaagcacacgaagcatcgcttcttcatttccactttctctcagcaatgtatcaaacacttcctctggtttcccatctcttttcatagtatgcacccatgcgaccaattctcttgacatctttggcctgaaaacctccattggtcttttccctgtgagaagctcgagcatgactacaccaaaactgtacacgtcacctctcaaagtggctacccaagcttgtccatactctgggggaatgtaacccaatgtgcccactagctcagttgttacatgggtgcgatatggaaggatcaatcttgacaacccgaaatctgctacatatgccttgaaatttccatccaaaaggatgttgctggacttgatgtctcggtgtactatgtgtggttcacatatctggtgcatgtatgctagtccactacttgctcctctcataatgttgagtctttttggccaatccagctgagctggaccctcaggattttcgtgcagccaataatccagactaccattctccatgaacgagtaaattagtatccgggcactatcatggacgcaataaccttgtagagcgaccaggttctcatgtttcgccctggacagaacttctacctctgccttgaattccttttccatcataccatagtctcctgtgagtttcttaaccgccagtttcgttccattatccaaggtagccttatagacaaggccaaacccgccgcagccaattatattagcttgactgaagttgtcggtagctttcaagagctcaaatatggtcaggtcttttacttcatatctactgtttccaaacaacagtacaagacttatgtctttatccgaccctggagggacttcagaatacgagccattggaatttatctccagttcagcattctcagagtctcctggatttactctccttttagaaagcaccaacagagctagcagcaccaaaatcaaactgacgccaaaaaaaagcccaaggacaagccccaaaacaagcgttctgttgacctttcctttacccatctttgtagtagagtgctgagttggatcgcaggaggttagcagtacaccaccgcacagcaaggggtttccttcaaaatttgcttttgggaaggtatcaaactgggtccctgtgggtatcggcccactgagagtgttgtttgcaacattgaaatatgacaggaaatggagtccagtgagtgaccatggaattctaccggagagattgttgttggacaggtccagcctctctaagttagtgaggtttgacaattcatctgggatgctgccagaaaaattattacctagaagctccaggatatggagaacctttagctgcccaacctcgactggtatagtcccagtcaagttgttcctcttgatgtatatcgtaggtgggaggctggaaagctgattgtattgctgattagtggtgacattattgggattgacaaaaaccggcagctccagatagttccgctctgttgcatcgtatgccttttgcgacatcagagctctcag

SEQ ID NO: 5115 - DNA, 835 bp, Arabidopsis thaliana landsberg
aggttcatcttgctcatgaatggataatgcgattttatttttaagatgtgtatatatgtcgacgtttctgattacgatctgatagtgtggatctgttgaattttctattcactttcgttttccgtcgttgtgattgtatctgatagcttctgagatgttgaagatctgtatcagagagattatgatatctcgggacgtttgattctctgtttggatcggcctgatctcgttgaaatttgatgtttgtgagtgacgattttggtattgatcaggttcttagaggatataagaattgaatttggcattatagatgcataatttaggatttctgagatgaaaatcgcgtgatatagaatgtgtatgaggtttttgatattagactttgttgtgtttgtttgcagtgaagcaaaatggggttgagtttcgccaagctgtttagcaggctttttgccaagaaggagatgcgaattctgatggttggtcttgatgctgctggtaagaccacaatcttgtacaagctcaagctcggagagattgtcaccaccattcccactattggtaaagaagcttcacaccttagtactggtttttaaattgtgatgatggtataaaatctaggatcgattagtgatatgctaaattctatcaacaggtttcaatgtggaaactgtggaatacaagaacatcagtttcaccgtgtgggatgtcgggggtcaggacaaggtatggagtctctgtactgcttattgtttgatgaagaaacttttcacacaaataacctgactttttggcttctttttcagatccgtcccttgtggagacgctacttccagaa

SEQ ID NO: 5116 - DNA, 941 bp, Arabidopsis thaliana landsberg
acacaatcatcaatctaaccaatacctaagaatgccatcagtcagttaacaatgtcaatatatgttcataacctgaaccaactaagcctatcgaatcatgaattcagaagtcttactttgctagcaatgttgttggaaagccaatccagaccttcatagagcccttcaccgctagttgcgcatgtgctttggatgtacctggtaagagagagagcaagcaacgtgtttgtaagtacccatgtatgcaatagtaagtaataaattctgtctgggagaaaactataaatcaccagtggcgttgccggagtgagtgaaggccaagcttatcagtaatctcagcagcattcatagcgtttggaagatcctgcttgttggcaaacacaagcaatactgcatcccgaagctcatcctgcagttacgaagcatcaataggaaaaagccatacggattaccaagtcaaaatattaacaaaattgtgtagcattaaaaacatacttcattcaacatcctgtgaagttcatctctggcttcaacaacacggtctctgtcattgctatcaacaacaaatatcagaccttgagtgttttggaagtagtgtctccacaagggacggatctgtaaaatagaataagtggataactgttactcttttctttttaatcctttcaaagagaatcatatatagtacaaagttacaaaccttgtcctgacccccgacatcccaaaccgtgaagctgatgttcttgtactcaaccgtctccacattaaaccctgtttaaacaaattatttatcaagtctcattgtctaacctagtaaaattccaatcagtagttctcagaagacttaccgatggtgggaatggtggtgacaatctcaccaagcttgagcttgtacaaaatggtggtcttaccagcagcatcaagacccaccataaggattc

SEQ ID NO: 5117 - DNA, 3332 bp, Arabidopsis thaliana landsberg
  unsure (1)..(3332): unsure at all n locations
agattggatacgcatttaaattttattttattaaccatgtaatttttgaaagatttacatttatttaatagaaataaatattaataaacaacaattaattagtcaattatagtagattcgattttattattgaaaaaaaacacttcaaaacctatatagttttccagatgttaaagaaaaaacctatatagttgatatattaaaatcttttttagcaaataatatttgagcagatagaatctaacaaattcttctaaatcaaattcagattttgttattaaagaaagagaaaagagcctattgggccataacatgggttcatacaattctcaatcagataacttccgaggccttataatgacttgtaatataaatggcaatttcgtgattaagtgagtatgaaagggtagacatgacaaaacctaactacagtaccgaggtagccaataatttatcttggctggggccatactctgaccgcagtttccattaatttacagaaatacccacgcttgggatatatatgtatatgtaaccataagtgtaacattttattagttttcagtcgttttccaaatttatgaatccatttacatgagacaaaccaaatccttgttggtaggtccatcctttacactattagaactgaatcatttttatttttctttcacaagaatagaatatttgtcgtaagcaaagaaacaaaagtaaggttaaaaattagtaaaacaacaaagggttgcatgtaacacaaggtttagaaggaataaaataaacaaaagttatgttagtaacgtctttagttaaaaaaaaagtttcatagatgaataaaacaaacaaaattgcatgtcccacgcagctataaaataagaaaaaaaaaattgcatgtcctaacgccacctaataataaataaagtgaaataataagacaaaccaaaacaccattgactcattgagactgatgtcaaaaaatgagaaaaaaccaatcacattgagagttgagattttaaccaatgcaaggacaatggcaaaaccgaaaataaacgtaaaatcgaggttgataataacataaccattaaatccgtattttcatggtgtcttcttcttcttcttcaccttcttcactcatcactactcacaaatatatttttgaccgttgttcactctcaccttcttcacacgctccacatcttcttctgattgacctttaacacctgaaaggttttgtcttctctctctatcgtccaaaaatctaaacttttctggttttattttatagatttgggtccctcagtttgtttattctacctttatttatgaacaaatgtgcaaagggtttagattttagctccttgaaggctcataacgcataaagttcttggcttcatcgttttctctcttgattaatttggcattgtatatcttatgtctgattgtgtgaaaaaaccacaaatgaaaggagtttagacacaaatcacagtttaagacaaaattatagtcttgtttctttcaaattatgcaaaaaaatcaagaatctgagacataagagaaacgtttatgtctctctcttttaatcaatgctatgttgcttttctcaactgtttcaagcgttattacattactagctaaaaatcttgatgtcttgttcttatttttgcagtttctcctcttgagctttggaattgaagctaagataagaaatttagagagaaatgggatgttctcattcgaagtttgatgacgatgaagctgttcagatctgtaaagataggaaacgtttcatcaaacaagcagtggaacataggactgggtttgcttctggtcacattgcttatatccagtctctgaggaaggtttcagatgctctccgggaatatatcgaaggagatgagccacatgagttcatgttggacacatgtgtcactccagtgaagagaatgagcagctcaagcggcttcattgagatatctcctccttcaaaaatggttcagagtgaggcagagtcgaaattgaatgtcaacagttacttgatggctagtggaagcagaccggttcgggttgaagaaaagcctcctagatcacctgagacttttcaggttgagacttatggagcagatagtttctttgggatgaacatgaacatgaacagtccgggactaggcagtcacaatataccgcctccttcaccacagaactctcaatgggatttcttttggaatccattctcggcattggatcagtatggatacagttatgataaccaaaatggtatggatgatgatatgagacggctgaggcgggttcgggaagaagaagggattccagatcttgaagaagatgaatatgtaaagtttgaggatcatcataacatgaaagcaacagaagattttaatggaggtaaaatgtatcaagaagataaagtagaacatgttaatgaggagttcacggacagtggatgcaagattgagaatgagagcgacaagaactgcaatggaactcaagaacggcgcagtcttgaggtgtccagaggaggaactacagggcatgttgttggagttacatcagatgatggaaaannnnnnnnnnnnnnnnnnnnnnngtacttgaatagaaggccaacaagcatggcagaagttattaaagatcttgaagatcagtttgcgatcatatgtaccgctggtaaagaagtctcgggtctgttggaagctagtcgagttcaatacacatcctctaatgaactgagtggtaagatttgtacttttctttgtttctgactatatatatgaaacgaatgtggttctgagacttcttattgcagccatgacaatgctgaacccagtagctttgttccgctcaggcggctcatcgagatcttcttcctcatcaagattcttgatcagctcttctggaggttcaagggcgagtgaattcgaaagcagcagcgaattttcggaagaatcttgtatgctctcgggtagccatcaatcaacattggaccgactatacgcgtgggagaagaaactctatgatgaagtcaaggtaataactgagacttctaatagtattttcagttcacctctctctggttaactgacttgaatgttgtgacagtctggagaccgaatacggattgcatatgaaaagaaatgtttggtgctgaggaatcaggatgtgaaaggagctgactcttcggcagttgataaaacaagagctacaataagagatctacatactcagatcaaggtctctatacactcaatagagtctatatcccgaaggatcgagactcttcgcgaccaagaactgcttacacagctgtttgagcttgttca

SEQ ID NO: 5118 - DNA, 2027 bp, Arabidopsis thaliana landsberg
ttcttttcatatgctcttcgaacacgttctccagactgttacaacaccacaaagacggctcagttataaccaacagagattaatatgtagtcactagttgcttatatctcttgttacttaccctaacttcatcatagagtttcttctcccacgcgaaaagtctgtccaatgttgtttggtggctacctgaaatcatgcaagattcatctgaaacatcgcttctgctttcagacccgctctctcttgaaccaccagaagaagtgatcaagaatcttgacgaggaagatgttgatgagcccgagcggaacaacgctactggatccagcattttcctggctacaaacacacataaaagaggaattcatatttataagtgaagtcattaaacagagaaatattgcaacattgttcataaactcaccactatggtcattaaaggatgatgtgtattgagctctaccagcttccaatagccccgagacttccttagccgcatcacaaattgttgtgaactgatcttcaagatctttgattacttcagccatgctagttggtctccggttcacatataccgtgaaccccgtcgtctttgcatcatctctaacaccaacaacattcttcatctcttgaaccttacctactccaacaacattccctgtagcttctcctcctctacacacctcagcttttcgctgttcttgcgttggaggagcaacgcatttctcgtctccctcattctcagtctcacacccgctatccgtaaactcatcatcatcctcatctccatcctcgtcttcatcctcatcaacatcttcaactttaacttcctcattgcaacaactcttatcaactttacctctattctcttccgttgctttcggattcggattatgattctgaaaccgcacattgacgacaggttcaggtttatgaggttcatcatcttcttccaaatcaggaatcccttcttcctctctaacacgtctcaatcctctaatctcatcatctataccactcctactatcaacacttcctcggtcataactattgtatccataataatccaacgaagaaaacggattccagaagaaatcccactgcgaattctgcggtgaaggaggaggaatgttatgactacttaacctttgctcaggagagctcaacggattccaaaacgaagatgaagtagacgcagaagtattcatattcatattcattccaaagaaaccatctgattcaccatattggttactactactaggtggagaaaatgtctcaactctaaacgtttcaggagatctctgttcgactctaaccggtctacttctattagccatcaaataattcgctttcacattcgatcttggcctaccttgaatcattttcggaggaatcgaagaaggcgaaatggagatgaactcaccgctattactacggctgcttcgacgacgtctctgtggcattctcttgaccggagtgacgaatgagtcttgacagagagtaggaacaaactcattgttgttgtctccttggaggataaagtcatggagagcatcagagacttttctaagagagtgaatataagcaatgtgaccagaagcaaacttagttctatgttcaatagcttgtttgatgaaacgtttcctgtctttacagatctgaactgcttcttcatcatctaacttggaatgagaacatcccatttctctctactcttctttcctaagctcaaatccagagctcaagacactcatacaaaagctatgaaacaactgagaacagaacaaaacaaagacataataactatgtctgaactcgcattaactgagaaaaagacaataagaagattctttgcttaatatacaagacaaagctctttagtccttaaaacccttgaagagattttgcttgttttctattaaagggtgagattgtactcagaaataacagaaacccagatgagaaatggtgtaaaatcttggatttggtgttgtgaaaatgtaaaaaggaaagtaaagagcaaagcc

SEQ ID NO: 5119 - DNA, 785 bp, Arabidopsis thaliana landsberg
gttctctctcgatgggtaactagcttcgagtgttcatcggctgagctaatggataactcggcgagtgagctcactgcaactgacattccatggcagagtactttaactgcaatctcagctagtttctctgcagtcattatcttctcttcttccactttctcagcttcaacaagctccatgctctctggtcttgagtacttcctcgaagaatctgttaccggagacgtgtcttcctttagttgccgagcatagattgcacccatccctgaggcaaagaagtcgagtttgtctagtactggcttctcgtttaatccgttgagtagccttgaccattggatgcagacttcataaattgggtgaggacaagacgttaatgtgactttctctgggtcagggtcacatctgaaacatctgagtaaccacccggttaaagagagtatgtaggatctttgtgatgtgatccatgcttggaagcaggctctccagtttcgaagctgaaccacgagatgcaatgctgatcgagctaatctttgagagttgatctctggtagtgaagtctgttgttgcttcttgtgacggttagaaggtgtggttgcaagtaatagtttggcttcgtccaatgttcgcttctgtatctggtgacactctgccatcactttccacatctgagctaatctgtaaaatgccattgtcagtcaaagagaaacatatgttttcaggaaacaagaaagatgttatggcatacccttgaacaagctcaagaagctgtggaagcagttcttggt

SEQ ID NO: 5120 - DNA, 3838 bp, Arabidopsis thaliana landsberg
  unsure (1)..(3838): unsure at all n locations
gcaaaaggtgagactcattcctctgttgctgtggtttacgttaggcttgctgacttgtacacaaagattgggaaaacacgcgattccaaatcgtactgcgaaaacgctcttaagatttacctanaaccgactccgggaactcctatggaagaggttgctacaggttttatagagatttctgcgatatatcagtcaatgaacgaacttgatcaatctcttaagttgttgagacgggcgttgaagatatatgcaaacgctccaggtcaacagaacacgattgcaggtattgaagctcaaatgggtgtgattacttacatgatggggaattactccgagtcctacgacatattcaagagcgcgatatcaaagttccgcaatagcggagagaaaaaaaccgctcttttcgggattgctttgaatcagatgggactagcttgcgttcagcgttacgcgatcaacgaagctgcagatttgtttgaagaagcgaaaactattcttgagaaagagtatggaccgtaccatcccgatacattagcggtttacagtaacctcgccggaacatacgacgcaatgggaaggtaaatttggaacttaaaacacattttcttgctaggttatgtcttttgggatttcctgcggtacaagcaatgtgtttacttgccttacaggttagatgatgctatagagatattggagtatgttgttggtacaagagaagagaagctcgggacggcgaatcccgaggttgaggacgagaagcagaggcttgctgcgttgttgaaagaagctggaagaggaaggagtaaaagaaacagagcacttcttacccttttggacaacaaccctgaaattgcaaatggacagagaccggtttattgattaaccggattatggtccggtctaaaatgtatatatatacaaaatacaagttcgaatacggtacttacacggtcgagggagaaggaaaaaaatgaagaggctttatgttttctagttttataaaaagtgaaggaaaaaaaaataatcttgcatttgttttctttataaataaaatgtaaagagtaaaacgcaattgatttggtcgttttgtaatgtgatttacattgaaattttggagtttaaaaatctccttgatggcagtttctctaactttgagcactgatcttcagtaaacaacaagtgtttggttactaaaacatcttgtctggtcttgtcatgtaatgttcatgaatgtcaacaaaaaacaataaccgaatatacacatacatatgtagcatgagaacataaagagacgacccaccgaatcaagaagttgtcacttagcaaagcaacaaaagaaaagttgtcactaaagcaaaagataatctgaactaggcggtttaaaatttcttaccaagcaagttactgattgtttgatgtagtcttttagataataactaatatcataagatgtgaatagaaacattctgcttaaagctgcatatattgtaaccaaggacatttttgaagaaagtttacattgattcaaaaaagaaaaaagagatgtgaatagaaattttggctagttacatttattagtttatatcatggcaacttattttttagtgagtttacatgctttttgggtagggagaggtggatccgatatcgaaccatcgaggattcggtttgcgactagcatattcgcggtttcggtgtaatgtatgccatcccaacttatgaaattttgacggttttcgcaggaagaactatagagttccgtcccatttagaaatattgttttcccacatcccattccgcgtccgatagccccaacgcaacaatagtcaaaaggatcaataaaacctgcattatagatttgataaaaccggaagtcaataagacgtctttagtctaaccggaaccaataaatcgaaccgtttaattggtttaatgcatacctagagcctttgctttggtgatcaagttgtatttggctgagtagacatcaaacataagtaaagaaagaagaaggtaactctttctttagttgagtgattttgttcttgagttgtttgttgaactcaattgccacattgttcagaggcttcaaacaaccgtagggatctcgcggtatagcgggaaaagctttcagaagatacggtaaacagccagtcggtccggtgttatgaattgagaagaatcttgctccttctttgtataacaactaataaaataaatcattgttagagattgttttataccaaagtctccgataattttaagatacttacttttaaggcaatggtgaggttttctatgattaagggtatagttgactatgagttgttcctctgtcatgttttggaacccaatggcgagatcgttctggccgatatcaaatgcataaagagcttttgacaaatctttggtgccgtgcaggacttctttgcagaatggagcttttcctacggccaaaaaacaaatatcaacaaagttctcattaaaaacaagtataagactagcttcagttttaaatcccggtttggtaatttgtatgacttaaccggatgaacttaccgttggttcgcttgtagagagacaaggtacgagtcttaaagtgaatgaattgggacacttgagtcccaagatggaatgggctaaaacaagcaagtgtggggcggatgcaagaaccaccagtcgcaaaattagcaccatgccggtaattggctccaaccgaatccaagtatggtgttaaatacggcaaagtaagattttcggctgccgaaaatcataacaaatatatcgtcaaaatcgattcaataactagaagcaaatatgtgtttgaaatatactaagggcatctccaaccctactctaagtaaaaatgcaaaatatttctctaaccctactctataatcgactctaaaatagaaatttctgcaactctatatatagagcaaagtgttaagctaagtgttaacaaattggcaacacaaaatttctcttatcttatactctaaaatcaatgtagaattaagttgctaatgaatatagttagtagaatttacaaaaggataaaattgaaaatcaaagatacttactaatgaaatctataatgagacgtccatcggagtgtcttccggcggatcttccaaaaaatgcaactccattcggtggaggaacctctccaatggccgcagagatagctccggtgtcagaatttgaatctccaaagttaaaaactgccggaaaattacaactactcgacaaggcagataatttctcagtgagcccgagaagtaaaacgatgatggcaagggttattttagaaatagccatgtcaagtaagtggatgcgatgagcttgacaagaagtaagatactagtgtggtatttattgaagtcgttggttcacgatgtatatggcatgttaagctttcctaatggattatattaaggtaagagggtataggaaattatatgatcaacaagtagagattataaaataaatagatctatcaaagtttgtatagcaagttgttgatgtaatcacgtgggacactttgcttgactatttgcagtcaaattttgatgactttgtggatcaaatggctaactagctcaatgtcaacgttttgtcgaagctaacacatatgcttaaagtgacggtaaaatgttaaattggatacgagaccaaacgtgaaaatacttgcaagaatatatatatatatatatatatatatatatatatatatatatatatattaatgtaatgttaaattaaattaaaaaaaataacaattttacaatttgtgcaacagttgttaaacaaattcaaaagaatgtaattgaaagca

SEQ ID NO: 5121 - DNA, 1331 bp, Arabidopsis thaliana landsberg
tcttgccttgagacattattccaatttttacatcaatatgttctaacaaaagaaatagttttttattttattttatcgaataaatattttattgagtaaaaacaagtagagaactatgactttgttacatgatgatattgaccgatgtgttgagaattgcttttttaaggaacacttacatgtttgcaaagaacggacaatcttgaatactacatctgaatgacttaatcatcccctgaagtttaaacccatagaaatttatgttattagattatctttttggattattattattattatatttattttgtatagctattgagttagctcatttaactcacgatcaagatgatatgagtccaaatttatatataaaaaatcatattataaataagatgagttgagttgagcgaactatcttattttgacatctatagggtttgggtatgtaacccatataataaatgggttgggtcaaacccacccgttaaaatcttgaacagggtttgagttattatccactttacactcctaaatagactcaaggcattgcattatacaaacgattagacctaggtacaaagatgtaatattaccaaactatatactactatgaatatattaattatatatgagtctatatattccccaataaatttcagtgttctttctctacttgagtttggttctaacacccaatgagttttagaattcgattcttaaagttaatgcaatgcattgctaatctctgggaaacattactagtagataagtgatactaaacatggaaataatcaagaggcacacatgaactcttctttcttctttaactttattcttctcacttctttcttcttactccactttactcttctttctcagacgcttcaactcaaaaagagaaaccagcatagttgtaatcttgaggatcagctatttttctgaaggatatttggcctaatttcgaaactcaaggtatcttctttttctttttctaagtctcaattcagcaaaatgtaacatacacaaatatcactagtttacatattttattattattattattattttcactagtttacatatatatatatatcagggtcgaagtaccaaatcaaagttcttgctgttgtttacgtatacgagagtgaattttgtttaatggatatctcaaatatttcgtgctttatttgtaaatcttcattgggctttctctacttgtttttttgggtttatataaccatttagctgatttttaaatgacttagaacttggatcttacagttagttttcagttgtgaaaccaagtttgtttaattcagctggatctt

SEQ ID NO: 5122 - DNA, 525 bp, Arabidopsis thaliana landsberg
taatctatatataatctctatatatggataagatgaatactattctactaagaataaatccatcttcttctactaccttcactaccatctagaatcaagactctaatgaaggagtccttgaagagcaatgctcacatacctaatgcataatggtcagtatgcagaaaccaaggaagaagatccatagccactgcgatgaagcttttgccatctccatgccatctttaaactttcttgaagattggtgtgcttagctgtccaattcagctcttctttgatttttcttggatcgctgtaaacctctgcgtaatctcctgcccgtctttccaagtaatcgacttttatatcaacgccggtcgcctttttgcacgcttccacaaactccttcaccgagctacctgcttgcacaacaattaataccacattctctgaaatccattcacttcactatcctagaatctttgccaaacatctaattttatacctttcccggtaccaacattgaagataccaactttgcggggt

SEQ ID NO: 5123 - DNA, 624 bp, Arabidopsis thaliana landsberg
gaaactgaaaggtctagtttcttgtattgttcaggaatatgcagagtttttgcaggagtttatgtgtgctgttaaacaaaactatggagagaaagtgttggtgcaggtaaattatatcattagcttcttactaaaaacttttgtttttagtattatgttgatataataacgtttcgtttcagtttgaagattttgcaaaccaccatgcgtttgagcttctctctaagtactgctcaagtcatctcgttttcaatgatgatatccaagtaaaaacttgtgttcaacattcgtatcatttgtaagttttttgaaaggtgcctagtagcaagaatttgttttgtatgttttaaattgtagggaactgcatctgtggtgcttgccgggcttattgcggctcagaaagtacttggtaaaagcctagctgaccatacctttttgttcttgggtgctggagaggtgagaccttaaaacatataccaaatgaacttttttttgttaagtatttgttatgttgctaaagctttttatcttctttgaaggctggaaccggaatcgctgagctaattgctcttaaaatttcgaaagaggttagatagtttttcgcggttccgcgccttcttgaca

SEQ ID NO: 5124 - DNA, 1126 bp, Arabidopsis thaliana landsberg
gcatggtaacaacgaaaaggcggtcgcttgcctacatttacttcaaaacaatctaacattcttaattggatcatatgatttcattggcatcaattattactcgtcttcttatgcaaaagatgttccttgctcaagcgaaaacgttacaatgttctctgatccttgtgctagcgtcacaggcgaaagagatggagttcccattggtccaaaagctgcatcagattggcttttgatatatccaaagggaattcgtgatcttatcctctatgcaaaatacaagttcaaagaccctgtcatgtacataacagaaaatgggagagatgaagctagtactggtaaaatcttacttaaagatggcgatagaatcgattactacgctcgacatctcaaggtggttcaagacgctatctcgattggagcaaacgttaagggcttttttgcatggtcgttgctagataactttgaatgggcatcggggtacacggtcaggtttggacttgtttacgtggatttcaacgatggacgtaagagatatcttaagaaatcggctcactggttcagacatttattgaatggaaaaaaagagaattgatgagatatgcaacattccaatatattaactaactagattaatacatgcacaatggtttgtttggaaaacaactattgttaatatacaaataaggtttgattttactgtattatatcaaacttaaatctcaaaaatagtggtttcattgtaaaacttgtgcacactaaattaaatggaatagtatgcatttaaataaaaaaatcaagaattttcattcttatttcggccttctaaaattaattaattagttaaattagtttgtgattttattttgttgtggttgccactagtggtaaattattaataatttaaaaatctaatattttcaattaaaattaatgatctatttttaatattaaataaaaatagttaaaattatagaaatttagttcatattgatatcactctaattcatttggaaaaatatttttagcacagacaacagtttatgcctgcatcattacaacaattttttttttactattttctcagaattttttaatactatttgagttataattgaaaagctaatta

SEQ ID NO: 5125 - DNA, 4551 bp, Arabidopsis thaliana landsberg
atgcgtcgaaagagttcaacagcctcgctttcattaccattaagagcactagacgaaatcatgcttgtccaagagacaacatctttacctttaattgattcaaatactcgagtagcatagcccatgttcctgcattttccgtagacatctaccaactcattctgtatcacagtatcaagtaaaccttttctcaaaatgtgacaatggatttctttgacaatgagcatggatttcagtacactagaagctcgaaggatgcttcccaggatcatttcatcaatctccatccttttcttagcaacatcccggaagagttctaaggcctctacatgacaatcattctgggcataaccggcaatgaccgtagtccatgaaataagatctttgtcatgcatcctaagaaacgcacggcccatgtaacatgtgaggttgcactttgaatacatatcaatcaacgtattcccaacctgcaaattagaatcccagccatgtttaatcacgtaagcgtgcaattccattcctgccaagagattgcttaatcttcctgacgctgcaatgatgctggtcattgaaacctcgtcgggtttgtggccagcagcgatcatatcagaaaagaactctaaagcctccttgtacatgagattctgtacatatcccttaatcagagaattccatgtgacaacatcagcgttattcatctgacgaaggatcctttctgcctgaggcattttaccacacctggtatacattgcaatcaaggcgttgcacacatataattcagaagagtgagttgatgatttgaggacagaagcgtggatctctttccctagctttgcatatgaaaaaccgtcacaggctgtgagagcagaaacaatggtgtagctgttgggggcagggccagtcatgtgcatttctctgaataattctaaagtctcgagagatttcccagacgtggaatatgaagacaaaatagaattccagagaacagcatctcctttctcttggaatccgtcaaacagacgccttgcagcgctaaggtcatcgttcttagcatacatggaaaccaacgcattgacgataaaaccagttgaatggtagccaagtttaacgaggagagaatgaagctcagagccacttcggatatctctaagtttggcgcaggctttaagcaaggcgggaaaagaggaaagaccgagaggaacgccctccacacgcatattccagtagagagcaagagcggaagcaggttcaccattcgaaacataagctccaatcatggcattccacgcaaaggcagttctgtcaggcatttcgtcaaacactttctctgcgtcatccagagacccgcacttaccgtacataaaaacaagcttgccggccaaaaaatctaattcgaaagaggggaaagtcttgaaaatgcgcgaatgcagctgccgaccttgtgagacagctctacgtttaccacaaagctcgagaacgtaggcaaaggcttcgactggagagttgttttcgctgacgtccagccgttgaaaatcttcagttaggactccgtcgaaacaagcgagcttcggagaagggacttggacgggctgattgctctgtcggaatgggtttctccggcaggatagctctgtcggaatactacaatgcagacgaacccttggaaacgaaatcgccgaagcagagtacatcatgttactcagtagtctcatgttagttaccgcgtattccatttatgtagccattgtccaatcatcatcatcatcggtaaaccattggtgttcgtgtttccgaattatctctctcgtttttttctttttcgggtcaagcttctgatctaacttctgagatagtaatatgggccagaccaggcccatattcaacaacaagcactagggcccgtttctgtaaatatgcatatcaaattaacagatcatacgataaggacgtgtggacgaacgaatcaaaaacgttattctaaacgcttaaacccaaaaacatcaggatcataaggttggcaattataaatcagagaagattactttattcacaagtaagcgggtttcaaggagaaattaattaacggagaatagagctgaaggagccgcgggtgtgtctccgcacgtcatctatatataatcatgcgttcgtttttgattgacatgttcttctttggtgtagcactaaacctaaaagtcaacgaaacataagaaacaaaaaaatgaggaagacgatcagcttctcagccataatcctcgtattcttattggtttccacaggtacatgcatactctcaatcaaactgcaacccgatctggaataacatcatatatttaattgctgtgtatacatataggattgatggagcaaggagacgcgcaagcgcaaaagtgtgagtgggagtgcaagcttctaccaaacttcccgtgctggttaaaaggtgcgggagaaggcctttgcgacaacttgtgcaagtacgaaggagccattagcggcgtttgcgtttctgacccccaccgctgcctctgtcgcaatcgcaagcccggctgctcctgatttcatcacatattcttgttcaagcagtatttaagcccgttttacacctaagaataagtttcttaaaaacacgcaaaataatattacgtcttttgtttctgataattaatacttttatatattccattttataagattttcaagctaaaagcaaagtatttttaaaaagaaacgataaaatgttttgtcatttttacacactattattgaaattttattctaaaagccatagcatacactacagtactaaataaagagaaattatacataaaagctattaaaaatcaaataaaaggaaccaaaaattctaaaaaatggaacagaagacgttgtggtgtaatgtaaccctatatattatacacatagttcattttgttggttctcagtcttcattagctttgattgatcgatacttgtacttttctttttcggacatgaacccataaaacctaatcttgcttcacattcgcctcttcttcgtcggagttttcattgttcatgagtaactcttcccaaaacccgtcgtcaagctccctctccacaccatcagtccgttgccgtccatatccttgcatctcaagcgccagagcctccagctccgacaggtgctccacctcttccattttgatcaagccagcctgatcaatcatcgcggcctcctctcggtctctcttctgctcgaaaatctgctgcagaagggaaggattctccaccgcacgcatcaagaaggacatcatatgcctctgtttcttctctgctccattaatcctctgctccatggcttggacgtagcctctcgctctttgctcctcctgtctgagcgtcgagatctccatcattaggacatgcctctcttctcggagctgcggaagctcgacgcctgggtcatgagcctcgggctgagactgagagtagttaagcgaaggaggggaagaagaggaggttcgtcgcttgatgcttttgagaaggtccctctgacccatcaagaaaccttcattcataaactcccatctctctgcctcgatctttctgaatccctgcagataaataagtaatcgaatatcataatataagtttttttttggtttgcgacgtaaacatgttatatataacagacgaagaacctgccactctactgcgctgtaaaaggaaagcaacattatcttcaattttatattttgttggatggaataattgaatattttattgcaggttgatatggataaaagtttccagaacttttttattttgatataaataaaggtttccagaacttgcgaagaaacttcttctctttcactactagctagcttgtttcgccagccattattattattgagcataattacttagtactaaactatccagtgaacaagtaattcacaaatagacacattgtttaaccttttgcagtaattaaaggccgaaggcattgttgagttcctccaagacataagattaagggaacactatagtgaaaaaaaaaacaaaaaatacagtaaggtcgtttagtggagaaacagagatactcacataagtgttaagttgtctgacaaagctggagaagttgttgtgcttgaagtatagaggcagaatagtggccgagaaggaatgtggatcccacacgacaaaactgatgcctcccctgttccaagacacaatgtggtttgtgtttggatcaccaaccatctcgaacgtctttgttagaaaaggagaaggccctgcttcctgcaatccctccataggcaccggcggtggcattgaccgtgctctggagcttgacgacgggtccatcttgttagcaatgctaatgctagaagtctaatgatctatgattggatttttcgtaaattataatccaaggaaggaaacgatgcatttggggttcctgtattggagaagaccaaaacagcacagaaccaaaagatgaaagagcgggaagtgtatttttttctttaaaacagagtactctgcttttgctggtgggtagttact

SEQ ID NO: 5126 - DNA, 1308 bp, Arabidopsis thaliana landsberg
ttaacttttaagtacaagttttataaccactcacttcttatcatcttatctgactatttttctttctaggattttgtataactttccgcccatctttagttttcaatatttattttgcggatttctgctctcgatctttatacttcttagattcataccgagatttcatctgttttctattttagaatcttcatttcaattcaagttcgtgtttaaatggaattctcattgatctccgataaaaatttcatcttaaacaacgcttatcgatgttctgttaatgatgatgcatctcatataccaaaaaataatcttaactttttcaatgacaatctaggtcaatcttcttgtactggatggtcatttcaccagatctgactgatatctctaatcagcactaccaccaaaatcttatacctttaatcccaaattacgattctcaaaatcagaatttggatactaatcaaaaccatttggtttacaactcttcctcatataaaattccatcaaacgacccattaatgagtatcaaatcctactcaaatgttgatatctctgaccaatctatggatagcatagccaacaacggaaaaatccatatgactgacaaccccccaatttttgcataccctaagggtatattcgaaaatttttatgatttgcggggaaatactataagagatgagattgtatacaatgaagagctgtctaataagggatatgagccaactcttgatcagataatgggtgaacctcaatcatttaatgtgccagtgccagaatatatcaaaaacacaaccaacgaaatcatgaatcaaagtgaagatgataagatgaaaaaaacttatcaaaagaagaatataaaggtggtgagcacaagcaaatatttgaagaaaagtgacatcgacaaagtaaactggacagaatctgaggacatgtaagtcttcatatttttttcattctcattaaaacttaaaactattattatatttcatccttggaaattcttatataattattttttattgtaaaccttttatttattttttgaggatgtgaaaatattttgtaatatatatagaaaattgaaagagacaatggcgcttggacccaaaacaaatggacaaaggtcgcaaaaaaaatcgaaggaagaacaggaaaacaatgcagagagaggtggtataaccatgctcgtcctaacacttttctttcatctcccattctcccaatattcttattttcataattttaaatagatgatcatcacaacttatatgtgtgtatatataaatgtgacaagcaacaatg

SEQ ID NO: 5127 - DNA, 469 bp, Arabidopsis thaliana landsberg
ttattacacgttctaccatcttagagattacaacaatacgattaaaagcatgtagggatgcaacataagaaaaacaaaaatagaccgacgatgaatccatgagatttcggagacaaatattgagaaaacataacacgagaaagcactaaaatacactatttttttcctcttaatttgatgacattggtttgtgaatgataatggatcggagcacaggagaatccaaaaccagagtttgattttgcatttgttgatgctgataaaccaaactatgccaacatgcacgagagactaatgaagctggtgaaggtaggtaggaggaatcatagcgtttgataacactttgtggtacgggtttgtggcggagaaagaggaaaacgtgccagagcacatgagggtgaacagaaaagtctttttggagttgaacaagcggctagctgctgatcatcgcatcgaggtctctctagtc

SEQ ID NO: 5128 - DNA, 5295 bp, Arabidopsis thaliana landsberg
  unsure (1)..(5295): unsure at all n locations
ttgtggcagagcctgcagatctgacgaattcccaatctctgcaagttgattcagcagtttctgtgttctcaactcgctcagcttctgctcgtagttactaacattgtctttccatgtaaagaacagttggtcgtccgtccaagcttcttctttcccctttgcaatctcggatttgcggaaccagtcctgaatcaaacccatagcagatttatatgataagatgtctccagaagcttttcttatgttcctcactagagagctctctgcgattctccgatagagctttttatagaagaatgaccgcgagccgctccattccacaacacttttgatcacaccttttgcagccattctcatggaagtgtcatggagttcagcaaatttggtagcgatttgggtataaactggtaaaagttgcttctctcgggttttaatctgtttctggagaagctcgatgtttgcatatgccttgtttcgcttggcatcttggatatttgctttcagattgattagcgtctggtccaaccttcccatgcactctaacagctctttccttctaaattttatctctatcatcccttcaggctcaagcacatttccacgagcggtttcatcagcgtacatttcaatataatccgaatttatctggctatcaacaaccacccatgctccacctcgcagttctcccatcattgggatgtacacaaacactggctgccgatatgttctcagattttctactatagctgaacccgcctgaagtattccttcaaaaagatctctctgcccacctgaaaaccctctccagttcgctaggataaacaatggaagctcttcccggttgaaatccataagtgcttgagcagtcttggccgctgaatcaggaaaccagacttgccctgcttgcggaaccactctttcatgagagtcaagctgtccaggatcggctgggatgatctgcatgacagtctgtgtctcaactgcaacaactccaacgggtattcccccgagcttggctctaccagtcactaccgtccttgcccagccttcaagagtctcaatgaaactatttttatcaaagatacctccaagccatttaccggtattgtctttgaccccagctatagccgctcgtgggtcgcaagagttctctgggacatactccacaattctctccggtggatctaaaggagcaagaacaggaagaggaccacccacatacgcaggaatgtagctcagccagttgagaattgctgatacaccttcgagatcatctgagactgtaagatgaacaacaccatttgtccccatgatttttgggccaccaagttgcatgtgagagctatagacctcacgcccaagcagcttgttgagtgtagaaaagccggtcaagatgatcggttggtctagtctctgtatgcacctcatgcccagtcgggcaaggtaagcaccaattccgaccgatcttccactaacaaaggttaaagtaaaagtttcattgtacgcccttgagtaagcacccgctattgccccacttcctgttaaattctcaactccaagaccatcttctttaccaacaattgtatcaatcacccaccttgtttcgccactagggagcttcacttcgtgcgcaatgacagatgatccaatccttgcatagtcttcagagcttaggtatatatactgaaaaccattaccgggggaaacttcatccaaccatccaactttgaagcatgcttttacttcttcagctacaccgagtcgggcaccagaatttgctgccaagtaaatcaagggaagctttttggtacaagcgagttcagtcacagcaaggaaaaatgcgtcctctctaggaccaaaagaaccagctttgaatgtgacatcattggcgacaatgagaagtttccgtcccataggaaactcaggagtcgacatctctaagatnnnnnnnnnnnnnnnnnnntcgttgagaccagctggtcgttcaaccggaataagagatgtacccaaagaaccttctgtattggagaatacaagctctttgacgttgatgagtctatccttatatggtttcttaactcctgggtgttgtgatgcccacaacagttccaaggctgtcccaaatgcctgaaaaggaaagaaataacataaggggggttggaaatagccaaaagagtaagcgtatgtgtgaatcttatgaattcagtaacaaaccaacgggaagtcatagcaataagtagtgttactcctccttgctgctaaacgttgcctgtcgagatatcccaggggcttatattgatcactgattggggtttcatgcaaaggtcccttcttggttattgagtggtagattaaactgtttcttccaggagtttcaacttctcggtatatctgaaatattaaatcacagcaggtaagtcatcgagatgtgtactcttactctctgtattgcttgtacaaccaaattttttgtaagcggaacttacgtggacagtgcatgtacggcctgtcacgtttgcaaccacaaccctccaagcaccacatgccagtccagaggacaccaaccacagccgcacttcccactcgcacacgcccaacctatgcattctcactccaacagatctatgtatctctcgtgctgcttcttctaagatcatttcaactgtagtttcttcatcctccgcattcacttcaactctcctgtaagaaacacgttgatattattaggatattgtctgacattacaaacaataacttgtcaaggacacagccatagcaacctggggaaaggcacaagatcatctatctgctgctcacgcaatatgcaaagaaacatatgtgcgtgatctggtttcattgcagcattatgggcattcagttccagttcctccatggcatccatcaaagacctcagaacacatttcgacgtaaacgccatggagatcagtgtttggctaagctgcttatcctgcccgggctgcaatataaatccatcgttcattgtagcctgtcgaacaagagatctcaggaacatcctcttgattggcactggcttgtctgtatcagtatacagatgccattgacgatctcgagaaggcgtatattgtatatttgagtatcctttcagcttatcctgcatcagacaaacagtaaatagccattaaaaagaatatgatatgctttaaacaagaaatttcatcgtcatgatcataccaactcaaggtaaatggacagaggaggttcaagatgacgcagcaacggctcttctacatcatactccttctccaacgaccaatggaaagaatgtctcatgggtgttcgtccttcatctcgctgaattatacagctgattacaccaacaccggcagaacagaggcttgaactcacttcttcctctttaagaattttggccaacttgcttactctttcctgagcttggtcttcatccccactgagataaacaaaccagacatgataacagattagctagacactatatcaccaaagctagtttatactgtgtcaagtacctgtcctgaagcagactcatctgattgttgatgcccacaatagcaatgtgcatcatattaccagataaaggagctcgggcatattcacagtggctatggtttgtttctctcaatgatgcatttattatactcggcagaaactgcagcgatttgattataaccatagtcccccgttttctcttactactcttcgcaacaattcctttttcagatatctcgtgatcgtctgggccagtgttttttctttcgaaatgttctaggaactcccaagaagcaatgacaccagactggtgccactgcatcctcacactttctttaacgacatagggctaatgacatgagacaagttaaaatggagtcaaaacaaattctgtctaatcaattgcactccaaaacgaattttccacataaggttaggaagaatgatctcgaacctggtataatctgtgaatataagtctcaacaacccgtctttgaagtgtgtgatcgctatggtcaaatagtcccacgagagcgtcttcaacagctaaagatgcgcttacaagatcttctattctttcattaatggcacttttcctcttgggagtatccatattttctccgtcctctgtaaacatttctaactctgaaaggcttctagcaatgtttgaacgaagctcacttagtttggtctgttcaagtaattgactcgccttgagcgccaactacacacacaaactgatcattagttgagagtgtagacaaaaatattataaaacataaagcaaccaaacgcacctcagagtagttagtatggttaagtgttgagaatcgaataagtttatctctgtaagcagcaggattagggtaaacaagctgctccatgagccggagaacgagtttgtttttgttttttatgccctgaaaagaagaaccaattcagtgacatagtcatgacggaaagaaaaacctggtctgagaaagatgatcacagacctggtgtgagagcactatatccacaattttcaacagatctttcttgtatagctgacgcatgcgttctataacatcagcctattcaagaaaaataaaatgattatttagacgcctcagacatcgctagtaaccaaaaatctgttaattagctattgagccatataataccagcatgttatcattgaataattcttctactgatagatattcttcaaagagagaatgaacaataacacgggcatgactttctctaccaccttcataagattttgcaaggctcatcaatggttcaatgagcctttcaagggcacctctctctttctcatcacaagaagataaatgtgcctgttgcaagaagtagacagaaacaattcagagagtaagaaacaggatggtaattctaatggaagaaataatagtcaattacctcaagaatgccttttaaaagtttggcagggaaatcggtggtcaaagagtttctggaaatactctcaaattccctatactttgattctagctgataaagagttttatttagatatgattaaaagtcttgaactcaaaacaaatatcaatatataannnnnnnnnnnnnnnnnnnnnnnnnnnnnnnnnnnnnnnnnnnnnnnnnnttaggtagtcgtgtcgccagaactgcaaagcactcttgccactgaagaaatgggagttcagggctatcaaggcaattaagtaagtcttgaacaacctgcaacgtatgagctatctcatagtcaaataatctagtagagaagttggatcaaataggaaa

SEQ ID NO: 5129 - DNA, 3616 bp, Arabidopsis thaliana landsberg
  unsure (1)..(3616): unsure at all n locations
taaagatcatataggtaaaagttgggataacaactttaactagcattacactgtaagtgaaagccactgcataaagacaaacaaggaaccttgcaatagaattagaggcaagaaagaccagctagaaagttgacaaaacgagagtgcaaatgaaaaacgaaaaactacaaacctgaacaacttcaagaatagtcttcatcactgcagcagcagctcgctcagtataatgacctctagcaacaatccgatcaaacagctcacctccttcacacaactccataactatatgcactgcatcatcatcctcaaaggcatccttcagcgacacgatatttgggtgtctaggcatatgcttcataatctcaacttccctcctaacatcctctatatccacagctgttctaagcttcttctttgatatagacttgcacgcatacttctcgcccgttttgatatcagtgcacaagtaagtaataccaaactctccgcgaccaacctcacgccccagatcatacataagagatatatcatgtcctgttggatctttcaaaacagagagcttgaacccagttccagatccattcgtagtgtatgcttcactataaaacgggttacttttgatctttggtttccccttcttactcccagtctccgaacccgggctcgcacaacaatttcccatttataattcgaatctgagaagtcctgagatttcatcaaacaactaaatcactcacaaacgcaaacatgtcattttttccaaatcaagaaagcttaaaactttatcaattcatctccaaatttttccaatttaaggaattaaagactctcactaatccctaaaacttacagcaagacaaattcgatttgataaaagggcaaaacaaacgatcgagaacaaaaaatgcaacgaaattaagaaccctagaaattgaagagctgataagtaaaccctagcaaatgaaatcaggtgaaacccaaaaaggatgaagctttaattagaaaggggaaacacaaacctgagaccttaaccggagaaagagatgatcagattgggatgaatcgacggaagcaaagaggggaaataagtgacagagagaaaggagaagaagcagaagagtcaaaaagtctccttctccctcgcttcttctttcttagtgtggtgagagcaaagagagactctttttttttggtttttgggttctctctattgtggagtcaggtgataacccaatttgtaaaagacagtcacacggtcacaatcagactcaccaccactctctctctcttttattgttccttcctcacaaatactaactttctcaaaataaaatatatttttttttggtttcttattgaacaagaacatgtgttattaaaagtttaaaacacaataatgtgtcatggattggcttttgtgttttgtcgcatctctaaggattttgataataaaaaaaaaaaagattagtcttttcataatccaccattcatacacatgttataggttacgttaagatagatatctctagtacaaaccaataattagtgaggcatttgatctatatggattgataatatgattaagatagatagatatgtctagtagaaaccaataaccttgagatttactggtttatatgtgtttcaaattttatcttgaagtagtcttactatatatataagaaagaaagaaaaataaaaaattaagagaaattttgaaaaaagccacnncnatccggtgnncacggagagcnagnnncncgagnnnatggacaataacataaagacaggatttgaaatcaataataagtagccttggccgtgacagtaaatcaatgcttataaaatatatttgttatcaatattcaaaactccaaagtaaacagtactaataattagaaccagtcaacatatgcattcaaaaaagaaaagaactaatcggtcaactcaaccatatgttccacgtttatcaaattcataaataaaaactactactactatttaactataaatatttttccaaacaacacaaaataatagcaataggacgtatactaatagagtaataggtgggagcaattgttagattgttaccaatcaaacgagccgtgaccaaaactatagcgcggaaagacaaaactatttaacgaaaacgatattgccatttgggtttgttaataatcactacttaccagtgctttttaccgaacagtaccgagccgtgactaaaaatcaagcatttcaatatcgagtatactcgatcccgattttggtcatccgtatataataactcttgatttccaaactcgacacagccatcgaaaatggcatctgggttttgctcactgggtctaactgtcaccacctccttattctcgtcccacgcgattacacggcgcgttctacccattctacggtggcgttccagttctatgtccctttctccgctgcgtcattcccgcgctttatcagctgcaacaactgttccgataagctcatccttcacgtgggacgacgtaatcgagaccggtcgggcagagtacaactcttccgatctcaccggatttttcgagaaaatcaaccgctgcaatcgcggatccgtaagtcctactaaatcgaatggttttagggtatcggttcctaggagagtgagattgaccaaggaaagctgaaattcaataaaaatgttagcttttcctcttttctatttataaagttcaaaacttttctgctatacgtttttcaggaaaagttaggtgagttcattccatttgttatagaggaacaaatcgttggttatattcataaaaggtaactgttcttgcttctgtgattctaaacttgaggttgtacaaattagacttctcttttatgcattcattcacaaactagttttagcagaatcttggattttgatgcttgtttgtctacattgaatagatttacggagtacttgagggagtttcatgatatctttacattttcacaaaatggttcttgtcctgaccgtgttgatggctatgtaacgcttaatctgatgcttcaaaagcctgaagatagaaccagagcagttgcagatgtgatcaaaatattgggtgacaaaggaatcattccaggaatacgtaatgaggtatgggtctatgttttggtttgatctcctaactctctaatgatgcttcatttatgttgataatttttctttctcaccagctgtatcctgtgaaaccatcgtttaatgccccggtctttttttctctagagcgtgctgctgctccttatttcggaattaaggtaaaaccacactccactgaattggttaagcttgtagccatgaacaccaaattatatgctttgccatcaatacatgtgtaccgttttcttttcctggttttgctttgcgttccttatgcgagttatctgatatagggttacggagttcacatgaatgggtatgtagaaagagatggacagaaattactgtggataggtaagagaagtctctcaaaatccacgtatccaggaatgcttgatcatctggttgctcgagccttggtaagatttatcttagtcttaaactaaccatggttgtctgctgatgatgaaagtaaattcatca

SEQ ID NO: 5130 - DNA, 541 bp, Arabidopsis thaliana landsberg
  unsure (1)..(541): unsure at all n locations
attgaaggttaaaccaatttagatgttttgctgtgaaatctgttcttttataatggaaatatttaggtgcatgggtcgctcacttgttacatctgatctannnnnnnnnnnnnnnnntgaatgggtatgtagaaagagatggacaaaaatttctatggataggtaaaagaagtctagcaaaatccacttatccaggaaaacttgatcatctggttgctggaggattggtaagatttctcatttacttgtcgattatacatcatgttgtagaatgtcctatatataccagataataataattcttatttgagggaatcgaaatgcacatttttattcggtcatttggtgcatagcctcacgggattagcgtttgtgagaatctagtaaaggaatgcgaagaggaagctgggatttccaaagtcttggctgataggtaagacactgagccatgctttatgtggtgttggaaaggcatatttgcccaagtccacacacaaaaaaattctaaaactaaaaaaggctacgaaagtactaattcctt

SEQ ID NO: 5131 - DNA, 2791 bp, Arabidopsis thaliana landsberg
tgtttaatactctgcaggatataattgctcgttttggtaagctagagaagatgccattagacttttttacggattttgttcgtgttgctcaggacgaaggtcgtcacttcactttgcttgcagctcggcttgaggaaattggttctagttacggtgcattgcctgctcatgacggtctttgggactctgctactgccacatctcacgatcttttggctcgtttggctatagagcattgcgttcacgaggtgagaaaccatttcaacttcttgtaacttactctgttttgattgcctcttagtcactaaaatagtatatttgcaggctagagggcttgatgtactgcccacaacgatatctcggtttaggaatggaggcgataacgagacagcagatttactagagaaagttgtgtaccctgaagaaatcactcactgtgcagctggagtaaaatggtttaagtatctatgtgaacggtccaaggatcctgaattcaccatcagcagcaaagaatcagatgatagcaatgaagagataatcaacaagtttcattcggttgtaagggagcatttcagaggaccgttgaaaccgccttttaatgctgaagcaagaaaagctgctggctttggtcctcaatggtatgaacctcttgctgtcaaagagagcaatgcctagcaaaatccaacaagtctactgcttttcttcttatcttttcacatacttgatgtttcaacactgttgttaccaacttaccacggttttgtgaaaggagcactcatgcttgaattcagtatctcatgtaactttaaccttgtaatacatttgtttgacttatacaaaggattcaaaaagcagtttttcagttttgtgtccaactggtcttttcaaggatgcgtgaaatagaaaaaacatatgaagaatggagtttggtcagtttaaaatcttgaaggaaagacaaaacaccaacgaggaaattaacagaaccattcttcagtggagtttgtctcagcggttctgaagagtctcgattgcctttttccacactgaagctctctgttttgcgtcttcaaatgataaaaccttctttggctgcacaaatgcaagaagaggtcacaatttcagtttcatcatctttgatctttggtggatagaagaatagggaaatgatgagtaccgtgcaaatcttgaaatgtgaagggctagtgactacaacgttgaggtcattcgagttatcagaccatataatgtttcctttcacaactagttttgacgggtcgacatagatcagcttgggtttgttggtgagtattagctgcaccttcttgctcgttattttctgaagcttcttcaccgctgatatcatcagaaccgattctcctggctctaaaaactgttgcctgtttatcaaatattcacaagaaaaaaattagcagattgtctaactgaagtatagttttaggagctttgaacaaggttgctgcccagaaaacaaatgaagcttaaatgcccccaccatcttgaatcaaaagagtctattgaagcaagtcgagttatggaacccgatgattcagaagatgtaggaggagcactgtgcccctcgttctgtgtggctaaagaatctccaatatgtgtcaggttccatggagaaccatgtgtgtcatccctctcgggagatgctgtctgagactgcatcagatgtaaaaaaattgacttaataaccgagtaaaacaataatgataataaagggcctcataattccaaagtacatgaggagacataccgtaggatctggagctagttttggaggagtccgggaccttagattcttccagtcaactccattaaagaaaggatgtctcttaagagcaacataaccttctgagccagcacctggccttctgcttggctcggtatcctgagagaatcgcacatttaaagagttactgccatatcatttgattggtgacaacggcttttgatgcatcttaccagcaaccggtcgatgaggtctcttgctgcttctgaaaaatgatttgggaactttatatctctggctataattctttggaaaatcagccattcacttgcatctttaaatggggaagtccccgaaagcatctgatagagagtgcagccgagagcccaaagatcattcctggtgttccacagagtaccaaagaaattgtacaaagtaagagaggcatcgcaatccacaaaaccaaaacgcaaattacagaaacagaaaactcttacccgaaagttgcgggagaggagttgagaacttctggaggaacatatgcagcagtcccgacaaaagtgcacgccttatcgtctgtatacgtcaccagttttacagagacaggcttaaagcagaatctgacaataattattgataagaccttaaagctcagagataccagaaaggattatggacggtcatgttaccagaagctgcattaggtagaactgtgatctggctatcctgcatcggctttacacttccaaaatccgcaatcttaatgtgtccatctgaagtcagcaacagattctccggctaccatttcaagaaaaacacttagcacagctattgttaagaccataaaagagaagctattcgaaagagaaactaccttaatatctcgatgaatcagtcccatactatgtatatactcaagagcatccacaacttctgcagtgtagaaccgagcttcatcctccgatagccgacctttctgcacaaaaaaaggaaccatgatgttatgtcaaattccgacaacattgaatgaatcaa

SEQ ID NO: 5132 - DNA, 1813 bp, Arabidopsis thaliana landsberg
  unsure (1)..(1813): unsure at all n locations
agaagaccaggagctggatcagaaggttatgattctctcaagagacatcctttcttcaagggagttgactggaagaacctaaggtcacaaactcctccaaaactagctccagatcctgcggtatttaccttctttagttacttctaattgccgcaccaaaaaaattcccgtcttgtccttctcttgagtcagttttatctttttcagtctcaatcagcatctcctgagagggacggttctccatggaatccaacacatgttggagatacctcagtcttgcagaacgatggacacaatggactctctgaatcctcaggttccataactcggcttgcctccatagactctttcgattcaagatggtgagactctcctaggcttttacttctttttcacgaaaactctcagttttaaaatctaacttggttttctaatgtttgaatcgtaatgtaacaggcaacagtttctagaaccgggagaatcggttctaatgatatcagcagtgaagaagctacagaaaatcacaagtaagaaggtgcagctaatactcaccaacaaaccaagactgatatacgttgacccatcaaagcttgtagtaaaagggaatattatctggtctgataactccaacgacctcaacgttcaagtctcaagtccttcccatttcaagatttgcacagtaatacccaatccaatggctcccttgttcaggttttttcctctgcaattgaaatgtgattgttgattcttgtttttgttttggcagccgaagaaagttttatcgtttgaagatgcgaagcaaagagctttgcagtggaaaaaggcaatcgaaactcttcaaaaccgttgagactcgtagctgatggtgtcaattcattaagttcctattttatttttcctcccttttctttaattcaattgattacatctcatatgcaaagagaagaagagtcttctctgcattcaagacatgcctcgggccgtaggtttcttctccgatcccagaagatgataactaagagttgcattactctgttttgggtccagtgtcagatttatgaatgacagtaaccaaagtaaaagtgtaaaacctaagctaatatggatcggtttgctgtttcaatttcggtttggttccgtgttactcaattatatttggtttaagttctttcattcggttttctgtccaagatgaagagagatggagagagttaaaagagttattgtacgactcatcaacttgcgcaaacacaacacaaattgtaccaaagtttgtctgtttcgattctcttagatgaataatcaactagggttattataagaaacttaaaaggctaatagtagatttatatgaaactgtacatcactttcaatttttgtttttaaccaaaaagaatcataaatctaaatcaaatattttgaggttaagaaaaactgatgcttttagttttagctatacacaagagtaaaaaaaaaagaagatgtgactcccttgttccaaaaactaagggtgtcagtttatatggttatgctcccgccatttcttccgacggttttttattgatgattctgatcctccactggctttattctgtttaaaaattacatcttccttcggattctgattcactcatttaggttggaaatannnnnnnnnnnnnnnnnnnnnnnnnnncgcatcaaaatttgcttttaacccgacaaactgacttccgacatgagcacatcctacttgaggccatcgacatactccttctcttgtacgcaatggacacaacgctttacaaactcgccctttcgggtttccagatgt

SEQ ID NO: 5133 - DNA, 733 bp, Arabidopsis thaliana landsberg
  unsure (1)..(733): unsure at all n locations
tctagaaaagactggctaaaagtgaagcctatcttactagttatcggtcgatgaggtctcttgctgcttctgggaaatgatttggaaactttatatctctagctataattctttggaaaatcagccattcacttgcatccttgaatggggaagttcctgaaagcatttggtacagagtgcagccgagtgcccagagatcatttctgtttgaataagttccagaaataccaaagaaaaattgttctaagtaagaggatatgtagtaatccacataactaaaagactacttcaaaaaaaaaaaactccatatattcatcacatagtggtcaaagtttgttctaacacaaaactcttacccgaacgttgctggagaggagtttagaacttcaggaggaacatatgcagccgtcccgacaaaagtgcacgccttatcatctgcataattcacaagtttacacaactatcgaaaagaccttaagctcaagaatatagaaaaaggatcatgaacttcatattaccagaagccgcattaggaagcactgtgatttggctgtcttgcattggctttacgctaccaaaatcagcaatctttatgtgcccatctgaagttaacaacagattctccggctacacaatcaaaattaagggataattgttagcaaaatgatgcccttgntggatcttataagagatgatatgtgaaagagaagctaccttaatatctcgatgtatc

SEQ ID NO: 5134 - DNA, 3258 bp, Arabidopsis thaliana landsberg
gaccaccaaggttgttgtcctctcagccagctccaccgcctacgccacccgtttctttgccatctccgtccatggttgtgtcgtcctcttcatcttctaattcatctgccaccaattctatgtataatcctcctccatcttcgacggctggatatagcaattctctgtccagtgataataatgttcattactttgattaaaatcagaattctgtgttccttaattttttttaaatactattatagcccttattataagctacgagattgaatggtgatccatgttaaagatagggttttcaacttttgatttattttatttttcatattgattaatgggttccattaccatactaacgtacgtaaatacaatggtaaagaatcttagtatcatgaggttgaaaaaacatttacacaaaataacacaattccacattaaatcagaattagaaatctaacatattgttagtcctgaaaattgagaaattctactaatgaaattatgagcttataattattaaattacatgagatttaacattaaatggaggcgttgactaaacatataaatttggcaacgagcattcccacgtacctctaattgtcattaatatattattaaatatagtttttaattaaaggtattaattgatcaattaattaatcataacccaaacagaatctatttatatcccataacagagttccagagtcaccacatgacgcaattacatacatatagtactagtattatctgatttcttgattacacagtgtcccacaagctcttaataatttacattaatgtttcttaatctcaaccattacctacaggctacagctcatgttttgcttgttaacatacacaatgtattctatatacatgtatgcagtatgtatatattttcttagatttttataaatactattttgtaattctgctatataaaagtataatatatgatatatccatcaatgtataactaaaatttgttacgaaaaaaatcttttaaaaaacactagaagtttttttttaaaaaagacttaacaataaaactttgtaggttttagtgagattcactgaagatcaaacgattttcagttttttttaacagaaattagtaaaagtttggtactgagaaaatatagcacttaaaaaaaaagagagaggattggattcaccattcacaaaatggtaaaaatactaaaactaaagtgaaagagagaaagcaatattttcttcttaacacttctaattgcacaaatacatgaaacaacaattattaatcttcttaactctaaacaacaattttgtcttttaaaatatgatttttaagattatcaaactttgatacaactagttaataactctacttcacattgctcgttagcgaatctactcacagatattcagttttgggcagcaaaattcagtaacattcaatttaaattcatcaagagggagggcaataagataacacatgatttggcgaaatttggttgtaattcatcttgtttttattctgattctggaactcttcctagttggcttcaaaaacatcactgtaacaactctatttaatcaatgaatttgttttgacgtaaaaaataaataaatatgattttaaagataattaatagtatttaagacgaaatgcgtgacgtttcatggaatcaaaacggcgcgtagtgcaacaagtatatggttaactgatacgccacgaaatagtcggggataactaattcaatcgttaccgaaccaattcaccggcgagagagaatgaatacgccgatgtcactctcggcggcgcgtggccgtatgctaccttttttagagaaggagaaatctgaagaagagtctgaaactctggaatcgagtctcttacagctaatcgacgacaatcgtcgatcatcgttacagctccgggaaaaaaccggtacgtaaatcgacccattcctcagctaattctgattcaaataatcgagaatgaaaaagtgagattcacagagacacaaaatggaaaacagagagatcgagaaaggaagcaatcaggcacgcggcgagaacggcggatctgctagtgaaggcggtgaacggaggagtagaggaatgtttcgttaacgagaaacgaattgagtcggagattaggaatcttgccattacggtggcgaaattcggcaaacaaacggatcagtggcttgccgtcactcacgccgttaatagcgccgtaaaggtttctgatcatctctattttctacgagtcttcaaaatcacgtttcgtcttctttgttttgttcaatgatggatctgtgtgttgattttgttaggaaattggagattttgagaattggatgaagacgatggagtttgattgtaagaaaatcactgctgcaattcgaaacattcatgaagatcaacaataagagcaagttattgtgattcattcacttgttggtgttttttgatagagagttcttatagccattgatgttatataccacttctttagtgtttctctgtttgagtagtggaaatgattggatcaaaagagtttgatagtctactcaaagtaaaaacatgaactactcttttggccttgttgggttgtctttgtgagtgttacaagatattttcttcgtacttctcttcttcataggcttgttctttagcctgagtaggattcatcatgtgccttattatcaagacagactctctctttttgacctcttttgctgagtgagtgcggttaggctgatctagctcgtctggtatcatactcccgacctatgccataacattcttttgtttgtcaaaagaatgacaacatcaaaaagcatcttcacctatcaaaatgcagctgagttgttttcctttaactacttttcaaataacgttcttcaaacatgttttcagcaagccgcaagagaaaataagctatttttatgagaagaactaaaaccacagggaggcaagtcactatgacttaagatatataatacatcatcagaaagtttgaatgatagttaagcctcagttagacccacaaccttttctgcgcgagtatctgctaggcaatgacatagaaatgtaagcttttaactgttaagtggctctcttttaacgaccataaatgagaagcataatcatgtggaaaccaaatcaaggttagtaccttcaaaacatgtttgaaagagaagagcttaacgtaatccagtttacaaaacgaaaaactaacgaatatcacgaatagtgagtgtac

SEQ ID NO: 5135 - DNA, 4022 bp, Arabidopsis thaliana landsberg
tcaattacttcttgtagctcattgaccttcttttgtagatgaagctgattctcttgcatttcagcgatacacttgtgcttcacttggaaacaagataacttggtcttattcatattgcgacccattgctctcagtctaccaggactgtcaggccctaacagttggcttaatgaatcttgtgcttcatttgttgatggattatcactgttaacaatctcttctgcctttttctgaaattcataagatacattttaaaatatcgtgtgattcaaaatgacaaaatgcaaatcaaacaaaacaaaataactcacaatcttttcagcaacattcgtattcagtggtgtaccatccttcttagtacgtgacttaacccaaacctttagccttgtcacttcagatgggtctgcactagcagttttctaaacaaaaaaaatgatctcatttaatacataagtgtttggactttggaaaaagggtgagcaatatgaacaatataagtgtgtacaactgttaccatgtcttcggcaagtctaaccattcccctgcgactacaagtatgtggaatctgattgcgccttctttccttgtagctatcgcttataacctaacagatgaacgttaatttctaatgtatatagataaatttacaaattccaaatgcataccttaaattcttggctagttttgagcttcacaaatttacgccaatcaaaaggagaaatgtttttaggtcgcatgttcatcctctcgtggttagtcttagcttctctaatctttgtaacttgccatgatttccaggacctccacaaatatcccatctgcctaagcactgtaaccttttggtactcttcatctagttcaaaccttgcctgccatcaaaaacaaaacagtcaagtactcatcaatatctaataaacttgtaaattttacacaaatcttacctgaacagacttccagagaactgtcctgagttcttaaccaatcttagtccaacgttcaattgtgactggaacgtgttctattaccaatgcccctacatatgatgccagcttaactgagcctttaccaataggctctcccatgttagtgaactctactcttactctggcatttggatccttggcaatatccttcaggatagttggtcctcgatgtcgcttacgctttggctcaacacaatcatcaacaacagataaaacaagctctccgtgaggctcttcctcattgaccttatccagatctccatcaaccacctgatccggatctgctacttgatctggttccaaatgatcttcatcattcacctgatctccatcaaccaagtgatctggatctgctacttgatttgcatctgatacttgaacttcatctggttctgcatgttcctcatcattgacttgtggttcaattgttccaatatactcgacctcatcattggcattctttgaattgaccttttttattacttttacctcgctttttcttctgttgtcccatcttaaatcacatgaaaaaaatgaaagagtaacgggttaagtacactgtatgcaaataagacattgaacacactatggaaaacagacatcaaacatagagaatgcaacaaggaatgaaaatgaaaaaaaaaaaaactacatttcacaaacataaattccttcacaatcagtcctctcattctcagcttcataccaagtcagcgtctatgtcaacatttggtggcaatgtgccaatcgctgcaactgaatctacaaactctttctgactgaatcttcttgaagaacctctcaatgcaacataccaaggtgacgagccatcttctcttaggtaaaaaacctgttttgcttgagaggctagtatgtacggacccctcaaaaatgagacttgactatgattcaggtttacaagtgtaaaaccatcctcttgcttcactccattgccttttactgcccagttgcaccggaacaatggaacgtaaaagacattataatccagcaagataatatcagtaatacagccatagtatgaaaccaaatcgaccacttgagatgtgtcttttgctctagacctacagatagcagttgcctcatagtacacaccactgttcagagttttttttatccactgttcttgtatgaaatcgctgcccattcactatataaccagtatatgtccttgcacaactacgtggaccataagctaaccatttaagtgtttcttcatgtctgtttgaatcaagaggtatctaacaaatttaaaaagaaaatgtcagacacctatatgcttactgataaagtatagtgttcaagtgtcaagtgtgagagataaacatgcctgttttttaagccatgaagcaaaattctgagtgtgcatactccataacagtgatgcatcacgtctgcatcttacatttgagtcttgtagatgttccaggtgctcactaatacaaggagaaataagaagtagttagagacagccatatggataagtaaaatatatatagctaagtaaaatgaacatgctgactggaacttactcaacataagattcaaagactgccatattctggatgacaaccatatgggctatttttgtctccatttcagtaagattaatataagagcctgctgagattggaggcccctcaagtataaagttgctctcatactaagtaattctatcaacactttcctgaacatttgttgtcttcttcaaaaattcactaaaaactgtatgcattcttcagctagataacaaaatccttcagaactttcataaatctttcaaacggatacatccatctaaaatgactggtccacctaaccgagcttctctgcctaaatgtactgtcaaatcctccattatatcaaagaagcttggtgggaaaaacctttcaaacaggcaaagagtttcaacgatctcagtttctagttccaaaagttgctccatatcaattactcgttgacacaagtggttgaagaacgtacataagcgcctgattgcaaccctaggacctttaggtagcaaccctctaagagcaatatgcagaagtagttgcattaacacgtgataatcctgtgacttaagccccgtgaccttacactcatctaatgagatgcctcttgatatgtctgagcagtacccatctggaccttggaagtcatacaactgtttgaagtcatacaaccataagatggtcccttctggcagtcgaccctccgatcgagtatatcagtcatttctatcactttttactattttcttcatcaacactaggactgttagaaaaccaaccaaattctgcctggcttgacttagaaacttctgatcatatctcatctgtctgcatcacacccatttggattgacacctaaaatactacaacgacaggattagtgttttaggataattgagcaagaacctattatcaatttggcgccgttgccaactgggtgcttgtttgctatatttgagatttcaaaattgttcagatcaagttcgtttttgttataagagatactaacattgtgtcttttcagactttgtatttcaggtacttagcaaccaactttatttgtcacttataggtaggttgctacctgttgcatgcatacacggtcacaagggaatcagaacctccttttcaacgacaacatcgaccgcatagcttttgttctcagagaaaggagaaacacagtcaaccctataccccagcaaccactcgatatggctgacgaacataatcaacaaaatggccctgccaacattggtgctgggatgcaccacgtgatcaccgtcaggggaaaggaattgcacctcctgctatccagaacaacaacttcgagattaagagtggtctcatctcgatgattcaggggaacaaattccatggtctgccaatagaggatccactcgaccaccttgatgaattcgataggctctgcagcccaacaaagatcaatggtgacagtgaagactgatttaagctccgctggtttccattctgcgagggcgataaagcacac

SEQ ID NO: 5136 - DNA, 1263 bp, Arabidopsis thaliana landsberg
caataaacgcccttagaagttgaatcaacagagcgatctggatttatgaataagcaagaacttatatcaactggaatcatcaatccaaagtttttatcatacatgtactactagacactccaggaaaagaagacaaaaaaacagaagatattaaagattaccttgtacagacggagatattgctcagcctgcttcctactctttcgcacaagaactcggaaatcaggacccataccactacataaaaggcaacaccaaagttagcactgaaatcattagggtactaagggaaaggttgttttccatcagtagcactagcacctgatgagagagactaagtacccaaaacaaaataaaaaatgtatgataaatccaatttgcaagctataaaaccaaattcgctattaaaaaagaagtatggatagctgaagagaagaacctgtaaacagttccaatgttgggagtcaaatgttgaatcttttgaacctgaaacagacaatagataaacattagtttcgtaggagttactgaaactatgcaaccgaaaggaaagtaacacgagcaggcacagaatgaaaaagaactaattgctataaagagttgatcaaacttacagacgcttcatcaaccaatatagaaggaagtttcttttcagttgcaatgacaactccatttgaagctgcataaagaaaacaacagtcatgattaccaaagacaatgttccttaaaaatctcctctcgaatttgattaaatcattgaaaaaacctttaattccaagtgatgtttggcctgatccaacagctgttagggcatgttctatctgaaccagcttccctgatgggctgtttcataaaccacaacatgaatcaaaccccgaagaaaccgttccaaatgctcagaaagagataacattgatatgataaacaaagttaatacctgaaggtggtgagagaaaacgagtactgactgtcccccattgaaaaccaactaaatcaagctgcaaaaaatgcgaaatagtgtcatctctggaaatttagaaacgtggaagctaaatctgttcttcatcaacaatgttcaaacttaaatgaaaagaaaccacgtctgagcaagtaagtagactgaagcgttcaaatctgacaaagcttaaaaacccggaagagtctcatcgccatgggcaatgtgtaaggaaaacgatgaaaaagacaagatataccaaccctaattaagaattgtgagtgaatcaaatcaaacacaaactcaaa

SEQ ID NO: 5137 - DNA, 1517 bp, Arabidopsis thaliana landsberg
ccccacgaacagctcacgactggatgatcaagcgtaggtgataaatatcaaaagcaataccttcctcttctgtggggcgccggttacctctcttcttgcttcttgcacacgtgaaggttgattgcatcagagatatatttctatgtagtttctctacttagaacttcttgttgctgaactagttagatagattgtcgtggagagatatgtagtcggttttcagagtaagacaaactttacatatccaaggtcttaaccaaagttgccgaagaactatctgatgaatccttatgtaacattgagaatttgatatccggttaagggagaaatagaccgttttgattgaaagttggtcttgtacagtatgtaagttcctactggcatttacaacacagcgtatatgtagctttggctaagtaatttgtgtgcatgaaacttggttatatgaaactgaattttcacaacagacgtttaaatgagtgaaaaaacatattctaaattattgggtcacgagtctccttaacaaattccaaaagttttacaaaagcaagaaccatcaactctgagagtatactgagattcaaatcaggttggttgcacggttaagtgaaagttttactcgacttcagccaagtaatcatcgatttctgctggtgttagcaccctgcatataacattcacttttcagatattgatgggaataacaagattttttgtttatattagttttgtagtcttgaatgtttacctgaaaactttgtcagtaccgattttgccaatctcgatgtttttgcttgagatttctccctcgaaactgtgaaaagacacggaggttataggcttttgagaaattctgaactctggaaataaagtaaattaagttttggtaaaaatgctcaccctttctttaatgtcaatattgccgtgtgaatggcatcatcaagttccatatcttctgtgtacctgatcagagactaagatgaaatgacatgcttccaagatcataaactcatcaccacaaatggtaaattattatcacctcttctcaagaaacgtctttgcattcgaaacattctttcccattgcagaagctttccatgagaaataagagccagatggatccacctagtggccaatgaaaattatgaaataagatgttttcagtttacgggttttacttcactttgagcaggatggttatattttctttaaagttctacttacttgatacagttgtggacccttgtcatcatacccagccaccagtagagaaactccaaacggcctaacaccactattaacagcagaaggagacagagattagaagcaagattcagtagtctagtttgcaaatacagatttgcattaacaacattatctcacgccaaatcaatatcaaaactgagctaaaaagtgcatagagagactcgctctagagttgcaatctctgagccaataacacttttgaaccctgttgagcatatgggaggaagtaattacataacacttgatatagt

SEQ ID NO: 5138 - DNA, 3680 bp, Arabidopsis thaliana landsberg
actttttgtcaattttactcttttgggtagttacttttttttcttctaataattgttagctttttttgctagatctctgaccgggaaatttttgattggttcaatgatattattttttttggcttatcaggagcagatgcaatgaagagggtccatgtaggacaatttagtactagtagactaattaaaatgtaaaacagaaaaattagtagattaattaggactagtggtcaattaagtactactattagacaaattgtactagtgtcgtcaagataagtcgtttaactttcgatgtgaaagcatattatcccggcgggctcatattggttaagaaagatgtgacggtctgaaaagtgaaaacccaatagaaacttaatattaaagcaactttaaaaagatttttgaaaaatttccaaaattatctcagttaccaaaaataattatgatcctaaatttgacttctacatgaattaatgagaattcaaacagtaatttgaggtacccgaattaaatagatttccatgttaaagggggaaaacagattttcccttggacgacccctaataatcttgggctgacccttacattttcgataaacataaactgaaaatagtccatagcccatacactagcatagactgaacacaacactttaaaacttcaacttattttcgttttacatgtacacaaaacacaattgcattgcaatacatttctaagatgatctcaagatcttgaagctgcggattgagctctaacctcaagttcttgtagaaactcagctactttttcgacctccggtgccacattcttcaccgtttcatcggacaagaaccggtcggcccatttacaaagagaaggagtttttgattcgtctaaaagcttttctgctttaaatttctctctagctttcaagagaaccacaaagcttccaaagcaaatatccataaacccgattacttcaccgccaaaaaagggtttccctttgcttatagaaacaaacgcatcctcgagttgcaacaacccttcttccacttcttccatggctttcgcttttgcgtcttccgatttagctattgccgccactctcaacgccggaaaccactgcatttttagtttatgaataatatataagctacaattgtttatttatgtttgaattgcgtccgtatattataaaatcctattcaccgtagcatagaatcaccaacggagacgcaaacaaacaaatgtggtctagtgtcagtaatcaaacaaatgttgttctcttgtaagcctgatgattcttatttaaatttatggataagaattaggacatttttatgttagaaataatgtatgattatctaggactaataatgtataccagaataaacttatatgctactactagaagaagtatttactggatttcattagacctgagttgactagcttgtgatagtattggtaatgtgtcttcatccgagtttatatccacgtattatgtaatacaacattactctctttttttttgtcatatataaatcactcaaataggacgatctaagtatatatccccaagataatccatgcacgaaagataaattcattggaatgtaacaataataataaaaaagttcaaaaaaattccatcaaaagaaaactgaaagaaataataagaaattgaaattgttggataaaggaaaagaaagaaaccaaaccttgttatcaacgaagtcagaccaaaagcgagcaagagcacgatcataaggatgtgaaggaagaatggacggtgcagatgagttccacgtctcatcaatgtattcaacgatgttgagagactcgacaatcggtttgttgttgtggaggagaacagggattttcttgtgaaccgggtttgatttgagaagaagctcactcttagttccaaacagattttcctcaacgtaatcataatccactgatttgagacgaagagcgatcttaggtcttatggcgtatggactgtaccatactcctaatagtttcacttcctctttctctcccatttgtttttttgtgtatagacgtttttttttgtaatttggtttctaatgaatcggtgaagaagaggatgaggaagaatgaagaatcctccacgacactttcttcttcttcttattttgtctgtttctaaacggacatatcatgtgttgcttgtcaccacacaatattattgcaatgttcgaaacgatgctattggctttccatacatcctctagacccgggtcagcttttaatatataatttacatacatttccagttgagctacttttttttttttaacactaaataaagaatgagtatatatttgaatccattaaaaagttaaaatttaattggattaaattattaaaaagaattagttaataaatatttgataccattcaaaagtaattgttaatatatatctgaatacatttttgagcaggataagcatctaatcaagaatggtagcgtaaatatgatcagattgattgaaaacttgaatcattgtactactacatgttactagagagactcgaagatttgcattcgtacactgggagcttaaggactaagatcatggagaataataaccaacggtgtccctaggcatcgatctactatacgttgtgggggatgcatatactaattaatggagtcatgtactatggagcaactgtttatgttggtgatggtattgaagtggaacgcaaactaatgagcttagacgttagatctgaaaagttcaaccagatcaaacttccagagggttattataggaaaagttgttatatggtaccttatgtgggaaggttagccctagttaagacttttaaattcccgtctattgatatatggattttgacgaatggagatagacacgaatggacgcataatcgcgtttttgactctttctgaaatggacctaatacggaaagaaaagccaagcttttatggtgttagtgatgctggtgagattgtttttgcaccatcgatattgtttgaatcgttttatctactatattttgatccgaggagaaacagtattagagaagtcgaaactatgggtgatgaagttagactttctgacaagtatatatgtacaccatgaatgtttacccaaatcacatcgaaagtcttgtgtctttgtgaagtagcgccttcatcggtcatgttttctttgttttcacctttgacccttaatatgtaaggataatacataagtgaagaaagaagaagaagcatgtcatatattctcactccatcaaagtttatttttgcactttaagaaggaaataagcacggaggaaatgtaatagtttctctcaattttattgattagcctaataggaggtttatttatacaaatatataatttgtttagcaagttttttacatttaggataattctaaatatcttatttaataataggaagatatacacaaatattatgtttcctaataacaataaggaaatatatttcacaacgatctcgtaatcccgagatctcctaacaactattttgctgaatagtgacagacacttgttctattgttgaatatgtcccagcataatatttttaattagttataaaagatttttagcaaatgagaaatagaaccatgttcttcttttagattaactaacatatgaatataccatatgaaa

SEQ ID NO: 5139 - DNA, 4947 bp, Arabidopsis thaliana landsberg
agcctttctgttttatgaacttaatgtaacgcaatgtacttgtaagaagggatctgagtggattgtcgtgttaccgttgtcgctttgcatctcattgttgatcaattctatgaggctctgtatatcagatggagtgatatgtggattccctttctcaaagaagtaaatgtacctgttgtatatgaaaaaaacatttttagtattgagatgctgctttgtgtatgaatctgtgtgtcagatgtttttgtttgtttgttgttaagtatactgacttgttcaagatttcaacaaacagcgtgactggtccgctgctacctctggttgcactagccatttgttgagctgcgttcgctatcctcagtgcacgtcttaaacagagaagaactctgcagaataacattgagaatcgattagttctggagataagaagatcaatgacttacccatggttaagttttctctcggctaatgacaacgaaacagaaaataagagaaaaatgtgatagtaatgaaagcggaaaagaacttacctttctccatctttaataccatctggatcatcgacccaaaagaggtgagagcatgcgtaaaccgctcggcattggtcaggcttcttaagaagccttgctgagtactggtcacaaagaaaatataagcgtttggatagaaattgagaagaaagcttgtaaaatgagaaatcattggcaaaatatttgtaccccggttgccttatgtgtcaaggtgtccctattttcaacaccaaagacattgatcctttgcaaggttccaacgatcagatgaatcgcagttacctgtgccttcgagtcctatattataatacaacgcaccacaagaataatgcaagtataaacttttatgagacttttagttatctttgtgtaaagttaactcagaaagaatgaagaaattaccgcaatttcttcctcgtataacataaatgcttgggtaaaaaattcataagcaacaggctcaagatcacagtcacttgcggcctgttcatgaatccaagataagacaaaatattgagaatgctatgtcagattctgccttgctacaaaaaaactgagataaaatgaacaatagattactggattccattaatattgtaagtcacgttattctgagttcgaaataatagtaaccctaaccctataaattacctctgcgcactgaaggtagagccttagagccagttcaggacatggaactgaggtaagaacctcgattgtctgaaaacaaaagcacatgttcaatggattacaaaatatattgaccattatattatcccaaataacccgatattcaaaaaatgaatcagtttgattgataaatgatctacttaatacgtcaaatacacagtaaagtgcacttagaaagggtactcctgcattacttttaaatgaatctgagtttatcaaagagataaacaattcacaagaatgacgttaaactcctgagaagccacagcctcagtgaaataacaacacatatttctctatcttagatatgtgaaaaacaaaagaagctcataaacctggttgagaatctgaaaaatctttctcggggttgctgaatcttctcctgctatatctccaccctgggattctagctgcctcaccaactgtgaaagaaacattatgcaactcgtaaagtcaaccgcttgtcttcaagcagagaatctgcatttaagtaaatacaagcatgttatagggaaataagagatatataccctaactgcagaaaaaacaagtgggggaacagtaaaaggcaagcgtcgaggtcctcctgtcataagatgtcgtctcacaacacatataatctgcatatcagtaaaatacccagttaagatattcggttgctcatacgatagggataatgttttaaaagaaaccatggcctcatagcccaatgtttatcgatttttttctgtaaaagaacgccaatgagcctaagccggtctgcaggtcaacatacggatgcagaccgcttcatggtagtggagcatgggggcagtagggtgttttgggtgaagtggagcaacagactaagatttacagttccacgaataaagggcatgttaaggttcagtgaacaagtcgctttagtaaatttatgatgtttaaccttaagcatctcctctggttcttcattatcaagcatatgtatgagacgggctactgaattttgttcctcctggaaatcctcctcgtcaagctaaaaaagacacataaaatccatcaggaccgaggtgttatagtagagctgatcagagtttctcactgcaaaccacacggaaaaaaaaacaaaggggaaatgacagcacctcctccgcgttggtttcatccaaatctttaataagtccttttatcaattcaaacagcacctcaacctagtgaacacaaaattagcatattattagtgcaaaatatttacatctttaattgaagagagtaagagtagtataccttatcagcagttgatatacacgaatcagttttcattatactttgaataattagcatagccattactttgttcgttccatcatcaagatgatccatgacacgcggataatttgacaatgtaagagctgtaactatgtcactgtacttttctaaaggagcactcaaaagtgccactacttgtttcattgcacgggcgtcctccagcttgggcacactggaaagcttaactacacatgcaccctacaaagttttcggatcaataattagtttaacgccagggctacaccagattcaagtaatcataaaactttaaaaatgcattttacacctttacaatgaaaatctgaatctgaacatatagtgtagacagagatacaagctacagagacaatactgactaaaagtttagaaaacatatggcaacgaaaggaaaccataccaatacttgatccacatagtcaagccgatcaggatgaactcggagagtaaaagtcaaaagagagacaaacagagtcatagctccgacaataggcatctcaagctgtgtatctatcacctgtagcccacaccaagtccataagtcaaatatatgtatttcaagaaaaatattgcattatatgcaggaggctgggaaagcaaagactcaaagaattgaggctattgacgaacagaatctacaatatgaactaaggtggttggatcatccagcaatttgatagcttgatttttaatggtctttcattttaagttctacataattttacatctgctcctcttctagctactgaagtctcaaatcttacaactagaggacagacatgttcaaactacagtggcttattttccatcatatgtcaaggaaggtagctgatttgacgatgcctaacaaaagagctgattaagagaagatgagcgaagattggaaaataacattacaaaaaaaatcaagctgagtacttctcagggtataggggacctacataggaccattctaaaggccattatgattcaagtatcaaacagccaaaagaaagttgcattcataaaagattttcctttattggaacccacctttccaattgcattgctcaatttagcaaaagcttccacttgcaaaaattcgtgtaacacctgctcagaagttaagaataagaagacatctagctaacaaacaaaaataaaaaggaacgatgatagctcaatgggaacttacatctggacttgaggcagcatagtttgataaccggtccattagttgggttaacactatcttcgtgtcaacagttggctgagaaattatttcttaaggtcagagaggaaggaaaaatgtcaaataactcttgagtgagaaaagtgctgatagtgaattcaatagaaaagtgctctgttgaggattccctgctcagagtttagtaattccagtcaaactgtaagagatcagggacctctttcaaaaacttttaattggtgagccaaagccctagtcaccaggaaataaacaaaaaaaaaactcgaaatcctaaaaatcaacaagaatagggaatacagacagttcagatagatccttttaggagataatggcagcataagaagagttaatcagaaagcaccaaacaaagcattgagataactagaattgcattggagagtagaaaagagaaaaatatcgattgctagcctacccaccatcagttgggtacaagcagccaataaggtctcaagagtctgcaaatggtactcatcaggaaagacttgaattatgcactccatcagataatactgagccaacttatctttacagttgacgacctgttcaaggttttcagatttagcagattatacatgaattgaaaccctataagaaaggacatggtaatagatgcaaaaatgagctgccgaacctgctctaagaccctaggaagaacagtctctttgtacatctcaaggtcaacaccttctatctgtcctagaacatgcagattttttccaacctgagaggaaaacattaaatacaacttagtgggcagtacatagcaaaaataggatactaattcaagtagtggtatcgatgttacaagatcacgaagttcgttcctctctttctcctgcttttctcgaactgttcctggtccctgcagtccaaggaacacctcagctcaggttcaccaatatcaatgattcacaagcaccacacaacctgcatgaccaaaagcatgctcttcatcgttcatttatgcttcagtcagaggcatgcaagtgcagaggtgctatgcgtatctaaataccatcaactcttcacagatcgaaaattcacctgatgctgtattcgaacccaaagcttattcatctctgtgaaattttgtagcacaaactccacagcatccatcacagtatttgcatctctacaagaagatcgcagggcgagtaaacaaacaaacagctacccaatcttatgaaaaac

SEQ ID NO: 5140 - DNA, 3309 bp, Arabidopsis thaliana landsberg
ctgaaagctaccttatgtatagttctagggatgatagtgtagagagatgttatggaaacgttcaaaatggcagaaaactggacctggagaagcaggaggacagtcatggacagtgaaatggctcaagttcgacaactcttatttcaaggtctatctctctatctttcttagtaacttggtttgggactgaaaaagagttttctatgaagttttctaaaaatagttttatcaaccattgacttctatgactttgcaggatatcaaagaaaagagggacgacgatcttctggtgttacccactgatgcggcgctatttgaagatccttcattcaaggtttaaacaacagtgattgctaataagatgcctcagaattagtagttcactgttacttaagaggaaatgtttttaaaaacaatagtttcttacagaactatgcagagaagtatgctgaagatccggctgcatttttcaaggactacgctgaagcccatgccaagcttagcaatctcggtgcaaaatttgatcctcccgaggtacaaggaaaggggagaaaatctaatatctatgcacttgtgtataccattataaaccatacgtttaaaatccagttcagtgacttaaaatctaaaactgctaatgtgtcactatgaaactaatcagggcatagtcattgaaaacgttccagagaagttcgtagctgcaaagtattctacgggaaaggtttgtccttacaaaacaaaaatgcgcttgtgtagcttattctaatataggattcggttcttgttttaaatctctccggcaatattttgcagaaggagctttcggattcgatgaaaaagaagataagagcagagtatgaagcaattggaggaagcccagataagccattacccacaaattacttcctcaacatcataattgccattggcgttttggtcctcttgtccactctctttggtggtaataacaactccgatttatgtggtttctaattgacaaattatatattttgatttctcttacctacatacataattacgtggtgatcatatattccttgcaaacaaaaacatcattgttaaagtttgcttgaataaaatcaccttataaataacattgtttatttggtttttagaattttgagattagtgtgagtttcttaagtataggatactaaaataatgtgtgtgaatcactgctacgcctttgcacgaatagattcaaaaattaaaataagtttttttgagattcattaaagattcttctctttttgtaaagaaagaaaagtcttgtcgcttggattaggttaaccatcgaccatcgtacttgtttccaaatctatacaaacaaaggtgattatttttttcatgaacaggtttagagaacttttacaacaccacgtgtgacataataaacgtgcatagttatgcttgatcggtccttctcttctcaatttttttaatacccaggaagactattggctaactaatatttagtttgttgggataatcaatgtgtacttaacaacaaccaactttaaatattaaattctgaatctagaaagatgtatgaatttaggttggtatggaaaatgatgttccttcttctagtgacgcaagaatgcttacggtgaaccgatgggattggtcagactcaatcaatcccattgttctaatcgatatttgaaacttttccctcttttacttttgtatatatgattgagcttatgtttcctctgtattttatgacgaaactaatttcatatagtatattgcaatcatgttactattatattgattttgaggaaacattatgctatggatttggctgtttggtgattgggataatgaagtgcatgtgagcttgattttggtagcacatgtcctactttttcatccaatagtcttaatgtctcatgttatagatgcattattttgttatcaacgacattatgatatgggaaaaatgtgaaatttattaagagaactttttttacatcatggtgcgttgtactgctgttgtgtcatgtgtgcacaaaaatagaaataatgggcaaaattagtagggaccaaaactaaacaaatcttaatctttagggaaaatatcgtaaaaaactaaattcccgcgtcaattgtgaaaatgacaaatacacgtagacgacaaaacaaaaaaagaatacacgtctccttcgttgacagtctctcccggtgaattgcgaagaatttcagatattaaaatcttttttcgttcctcatcgcggccactttcttcttccccaattcaatatgcaattaatatattgcccagatcccctagctttcttcttcgcacatctttatccattaaatttactaaaaagttgaaaatttaattgcaagacgacgactttgaaatttccttttttgttttctttcatttgtctttctcctctgattcatgttttcacgttttcatataaatcagcaaccatggattcttctgctttttcctcctccatcactcgtataaaactcgttttcacgaaaattcttacttaggttcttcaaatcacaattttgctctgttccttagaaaaagctaaactttgctctgtttcttcaacaaaaaaagtgaactttgctctgttccgtccatgtccgatgatgatcggagtggaagcagaatgagatttgaagcaaacgtctagagttccgacgttatgggttgcggaggatcaaaagtagataatcaaccaatagtgattctctgtagagaacgaaaggagctgcttaaagcggcgtcgtatcatcgttctgctctcgctgtcgctcacctaacttacttccagtctctctccgacgtcggtgaagctattcaacgtttcgttgacgacgaagtcgtagctggtttttcttcttcttcttcgccggattctccagttcttacacttccgtccgacgaagggaaaccgacgaaacacaagaggatttctccttcttcaaccacctcaatttctcattccgtcatcgaagaagaagacactgatgatgattcgcatttgcatctaagctccggatccgaatccgaatcagaagttggatctaaggatcatatccaaattactagcactccagaacaagagcggtcaacggaatcatttccttccggttatcatccaacaaactatgctccaccggtttacccacctggttatccacccggttacccattcagttacccgaccggttattcatcgggtaattatcaaccgggttacccgaattacacaggtgagaatccatacggaaatcgaggaatgtattacatga

SEQ ID NO: 5141 - DNA, 1324 bp, Arabidopsis thaliana landsberg
gtgatatagattcccattagtgattcagaaacacaaagctgcatcaaatattaaaaatattaataccttgacttccttgtacagtttcttttcccacgcatacagtttctctaaggttgatgagaggtttccattgaagcctccattaacatcttgtccattgtatgatttcgccttttttcgagttctagatgttaaacgtattgatagtctgggctgagagtgcgatgaccgtgtggatggtgctaccagatacatgatcctggataagataactgaaaagcaaaacttttcatttaaaaccccaccaaacaaaacagtaaaaaagaccttcatctaaaaagcagtgcggacagaatacatggttcatagttcaacaccaagcaaatcagtctaaaccacaataatttaagatactttcccattatattggaatttagagtttttcaacatttctgttcatattacaattcatcaaataaccattaaacttaagtttatcagcattactttgtaaccatgacataacattgcaaaatttaaacgcatgggttacaaaagcagatagttttattctagctgtaaactaatgcatgatcatggctagcaaaacatacgagttaagacacagtacctttaacgccattgtttttatgctgataaggcaacttgccgacttcaagtaacaaagcaacctccttcccacaagaagaagcaatctcgaactcactcttgatctccttaacaacttctctgagatccctagtggcatgaatcgacaaactggataagctacttatcttggaagattcaacatcaaaagacgaagtgctcgttgtttcctccaactcaaagctcactccttttttcctcccatactgttcttctacttctctcgagctctttgtcccagccccatgactgattgaactgatgctgctactctttccttcaccaccattaacatagtgaaactccgattctacatcacttcctgaaaaagacgaaattgtctctgaatccaatgagctctcagtgacttgttctggcattggaacttcccttttgttaatgttcctctcaggaaaaacgttgtgcttgtgctcgtctctgtgttctttaaccttctccaatcctggtctcttgggacgtctatacacttgcttgataacttcttgctctgttgcttcttctagctcaggaatcccttctctttctctaacttccttcgaatcaggactgcttgagattgacgccattcccatcggataatatcccgaagcacgagaacgggcgttgctggtatcataagttttaaacacat

SEQ ID NO: 5142 - DNA, 1884 bp, Arabidopsis thaliana landsberg
tgcttttatgtactatgataggagatattctagaaatgcttttagaggtcatgatgtgtttgattcacatgcttatgactcttatgctatgactgcttctagttctcatgttatgcatggtagaaatatgtctaggagaaatgctattcatcatgtgcctagaaagaatgttattcatgctcctaggaaaagtagtgaatgaaccttctacaatttattgtgctttaaatgcttcctttgctatttgtagaaaggataagaaaattgttgctaggaagttaggggcaaaatgcaagggagacaaaacttgcatttgggtccctaaggatatttgcactaaccttgtaggacccaacaagagttgggtacctaagtcccaagcctaaatttgccttgcaggtttatgcatccgggggttcaagctggattatcgacagcggatgacaaaccatatgacgggggagaagaagatgttcacctcctacgtcaagaataaagattcccaagattcaattatattcggtgatgggaatcaaggcaaggtaaaaggtttaggtaaaattgcaatttctaatgagcactccatatctaatgtgtttttagttgagtctcttggatataatctgctatctgtgagtcaattatgcaatatgggatataactgtctatttacaaatgtagatgtgtctgtctttagaagaagtgatggttcactagcttttaagggtgtattagacggcaaactttatttagttgattttgcaaaagaagaggccggtctagatgcatgcttaattgctaagactagcatgggctggctgtggcatcgccgcttagcacatgtggggatgaagaaccttcacaagcttctaaagggagaacacgtgataggtttgactaacgtacaattcgaaaaagatagaccttgtgcagcttgtcaggcaggtaaacaggtgggaggagcgcatcacagcaagaatgtgatgaccacatcaagacccctggagctgctacatatggacctcttcggacccgtcgcctatctaagcataggaggaagtaagtatggtttagttattgttgatgacttttcccgcttcacttgggtgttctttttgcaggataagtctgaaaaccaagggaccctcaagcacttcctcaggagagctcaaaatgagtttgagctcaaggtgaagaagataaggagcgacaacgggtccgagttcaagaaccttcaagtggaggagttccttgaggaggaagggatcaagcacgagttctccgctccctacacaccacagcaaaatggtgtggtagagaggaagaacaggacgcttattgacatggcgagaacgatgcttggagagttcaagacgcccgagcggttttggtcggaagctatgaacacagcctgccacaccataaaccggctctatccgcatcgcctcctcaagaagacctcctatgaacttcttactggtaacaaacccaatgtttcttacttgtgtgtatttgggagcaaagctacattttggtgaagaaaggtagacattctaaatttgctcccaaggctgtagaagagtttttactagggtatgaatcaaatacaaaggcatatagggtcttcaacaaatcatcaggattagttgaagtctctagcaacgttgtatttgatgagactaatggctctccaagagagcaagttgatcttgatggtatagatgaagatgaagttccaacagctgcaatgcgcacgatggcgataggtgatgtgcgaccacaggaactacaggaacaagatcagccttcttcctcgacgctggtgcatccccaactcaagatgatggataggtcctcaagaagaggagcgtgatcaagggggag

SEQ ID NO: 5143 - DNA, 2537 bp, Arabidopsis thaliana landsberg
  unsure (1)..(2537): unsure at all n locations
agtcttcattgggtcattcttctaactctttcagctgttgggtcttgggccttcttttatattgctatagaataggtgggtgttgggtctcaatacgtaacactttactggctgaagaccagtctatctcatgtagagtannnnnnnnnnnnnnnnnnnnnntatttgttgtgtttaaagttttatctttttatctccatatgtctatatattgttttgtgtgtatggatttaacaaatctagaccaatggataaagtttttttttataattttttgttttgttttgatagatgaattttggctcctatttccagtctatctcaggcaaaggtagagtagaggccagcaccaaagatccggtatttgttgtgtttaaagttttatctttttatctccaaaggtttatatattaaacttatataaatggtgaatctggataggttgatgatcaaggtccatcagatgaaattcattcccataatggccccttatatataaatgatgaggagggagcgaatgaaacggtttgtcattctcaataatgcaaatgaatttggttttgtaacatatattctaggatattaggaaactaaatataaataactagcaggaaagaagctatcctcgacctcttcttaaaagaggaagagacggaatacttagaagtgaaggaaaattaaaacaaaggttatatttactccatcttctcgcaccagaaaaatgcaggggaacaagaaacaaaaataccgcttgatagcctcgattttgaaggaaacgaagccaaaaggaaaagaaaatacaaatcaaccttcttcaatagtttagtttttcttatgttcttgttacgtttttattcagatctttgctgaatttattcagttaagaaacaaattctatggagtctttaattagttttatcaatatattaattatccaatttataacttcgtatccaaattcctaaagaatacatacatgaaattatcacaaaaaatcatacgtacctgttccattatcaaaatcagtgacttgcctgatgaattgctggtggagatattaacgtttcttccaacaaaagttgttgtttaccttaaacatgcaaattccttttacatataccaatcaattttgagtgtctgatgggtgcattgatctctatggcattatcaaagtcacataaggctatgagaaatctggtaacatgatctccttctgaagctttataagcttttataacgcttcttctgaagggtttataagcttttataacgcttaacgcttcgtcagttcgtctgaagtttggccatggggaccccctctccatcgtggattctctctccggcatggagagctcaagctctcggggacactccgaaggattcctctgtggagactgaggacgatttatccgccaccacctcatttgggtctaactctaactcttttccaaccggtttctcttctccagagaatgtcatacctgacacatatggaaggtaaaaaaaatcttcctactaaatcgacatgttagaattcaattattttcgttcaaggtataaattattcttttcagttatacacactttaaaattatgaaagactagatggtgagcaaaatgattcttgataacaatggatttcttactatctagtggtagttaaaaaacatattttgtgtttgtttttccacatattgtgtttgttttccaaaaccgctcaattgcgaaagcttaaatgttgtgtatagggaggctgagaacaaggaggaggtaacaaattacttagatgcaattcttgaggagcttattcttgagatgactgagcatagcttagatgtggttttggaggctaagcaagatatctgtaggatatatggatttgatcctcaaagttctccaatgcacatagtgagccaaggtgagtcactaattcggatggtatttctgagccataacaattaatattacaaaagcttagaaacttcttataaatggctcatacaagcttttaaacatcttataaaaatattataaaagctttttataagatgtttataagcgcttttataagatgtttgtaagcttcttctaaagggttcagtataagcttttattacgcttcttctgaaaaattataagcttttacaacgtttcttctaaaaaattataagcttttacaacgtttcttctaaagggttcagtattagctttataagcttttataacgtttcttctgaagggttcagtattagctttataagcttttataacacttcttcggaagggtttataagcttttctaacgcttaacgcatcgtcagttcgtctgaagggttcagtataagctttataagcttcttcttagataagcttttataagaaaatttaagttatattttaaaactataataacttttttaacaaaaaaattataagattttataagattctgttataaaaaaaaattagaaatttgataagctttcattgtactggaatatgttttatcagaagtttgatttctcatatacgctaca

SEQ ID NO: 5144 - DNA, 1053 bp, Arabidopsis thaliana landsberg
tcgagtatataaagagagaagataatgaggtcgagtggtgatggattggtgatgatggcgttcaagtcgagtggtgcggagaagaagagcttgatggtgttaagcttccggcgttgaagtcgagtgcttgtgaggaagagagatggtgaggtcgagtgaatgagagtatgtagaaatgaaagtatggttgagtttggacgaggatgaggtcgagtgaagaggggttatggaggagaaaacgatgaggtcgagcggtggagttataagcgtgggggagtgatggggatttcttggttgcttgtgaagtgttggtgagagggatggggccgagtaagctgagatgggaagaggatagggagtggtagagtggtgagggaagaggcatggagatttcgttatcaccttgtggggagcgtgggagacatggctgcagcagtgggtccctctttgtcttcttgtctcttctctgtattctctgttcactagaaaaactctaggaaatcccgcaatcctctgtaacttgaaagactccctggaagactttgtagcttctgttggtcgagtaaagtaatgatttaaaagtttttgggttttaaacatcactcacactcgaccaatgtactcgatctctagaccatcagtagagtaaaagttttgaatttttactctaccttcacgttacttcttttttttttttttttcctgagaaccataaacacaactaaaacaaatcaaaaataacaagaaagtaaaaattatttacaaggataatcatgggacttcctcccaagtgagcttgtttaaagtccctagcttgactcctcacacttatcaagaagaaaatgaatgatagagagggtctgcatagtcctctcttgtatcatcatcatattcagcgtcctccctggagaggtctgcagcagaatactcgattcccctctcttcaaaatatgcttctttctcttctggagggtaatctatctcttcagaccatcttgaagtgaacttctttctcgggatagtgtcaatctcgcctttaggttgagcttcctt

SEQ ID NO: 5145 - DNA, 1926 bp, Arabidopsis thaliana landsberg
atccatatctttggttcattggcttgctgttctgtgcttattcagttttttcagatgttctaatgcaattatgggaatggtattctctttttattaccataataccgaaagttgagtaataatgcttttcttagggctagcttccgagtcaaactaattatcctatagatttcttgaattcattaatctcttgtaaaacaacttatgggttgggttgtgtttgttcttagttgtgagaatttgtttgatgaagaagagaggactccctgatcttatttgatcttattttgtttttgatagatgaatttgtgtagatgtggtttgcctccaaagattgtcacatcgtggaccgataacaatccgtctttttgcttgaatgacttctttttttttcaagtttttaccaacatatctcggtttagaccaagtttgtttcacattttgtgtgcctgatgcattattcacattgtgtttcaggtgaggccaacttatacaatgggagagcagaagaaaagtactaagacagccatgcacatgaaaaaatttatgtcttggaaagtagatcgaagagtatcagagcttgttcaagctacctacttcaagaactttttgaagtttgaagaatctaaacataagctaaatttgccgcttcttacagcggtcatgtcattctttgatgacaaacaaaaggctttttcctttccagcagaaaattccatggttgattttggcctggaagacattctctacattacaggacttccaattgatgggaagcaggtatatctttttaattttacttcttactagatttgtcatcagcgaattccatgcttgattgtatgcttgcttggtacatgtatcaggataccagagctctaaaaaataagtaaagaaaaggctcagagattgtcaaaggagagaccaaccagtaaggccttcggcatttctcctcacctgttgcaaatccaatttgaagatgtcccaaagaacattgaagaacagaatttagagccatactttatggcctatctccttttcttgttggtaactttggtcatgtcaaacaagacctaagctatatctccaatgtttcttccactgctacgaaaagacaaggtcaacaaatatgcttagggggcagcaatgttggctatcctaaacgaatctttatgcgaatagaaggaggcttttactaaaggttccaccacaaaactctgcggttttgcctttgctctgcaggtaaagttttcaagtgaaacaaaaactaattatgttgatgttgattatgtgtataatgttaactactctttattatttcgtgtaggtatttgcattagagcgatttactgtctttcaataaccatctccatccagttttcttttaatggttgagtgggaaaaggtatataaaccgtataccaaaatttttgccagagggagtctgggacactatcaagagatccttcaaaacatgaaggaagatgagctacctaataaaatctcatctctttgtcagtatacatttgttctatattaaatacttagattatattatttcagattaagtggcagccttatagcaaagttgaattgcccgaatacacctctcaattgcgtatggtgtttgcacaagtaataagcaatgagaatgtgacagctaataactatgattaaaccttaactctagtaaagttcaccttaagttctagagtcttcctttggttccttcttcttactctttctgttgttgggtcttgggccttcttttatattgccgtagaataggcgggtgttgggcctcatacgtaacattaccccctcctttaagactcaccttgtcctcaaggtggaagcgaggaaactgtcccttaatggttgacacccactcccaagaacactcaaaatctggcagtcccttccgct

SEQ ID NO: 5146 - DNA, 790 bp, Arabidopsis thaliana landsberg
  unsure (1)..(790): unsure at all n locations
gacttttcacatttgcatcagcccatttactggttttctccggcaaagtctcgaccacctcagtgacatgtgaatggtcaacccatctattgctttcattccacttgtttggtggctctcccatctccaaggtctcgtcattcctaatcggaaaactatttagtggctctcccaaatagttcggttgtatgcgatggtgttaaagcagatgcatggaacatgtgcaaataccatactcaattgagaggtgtattcctcgggcaatataactttgctatatggctgccacttaatctgaaaaaatataatctaagtatttaatatagaacaaatgcatatgacaaagagatgaaattttgttaggtacctcatcttccttcatgtctacaagcatctcttgatagtgtcccccacttctgttggcacaatttttggtatacggtttatatatctttgcccactcaaccattaaaggaaaactggatggaaatagttgttgaaagatagtaaatcgctctaatgcaaatacctacacgaaaaaataaaaaacaattaacattatacaaataatcaacatcaacataattagtttttgtttcacataaaaactttacttgcagagcaaagacaaaaccgcagaaaaatgtggtttgacctttagtaaaagccttcttccatttgcataaagcgtcttttaggatagttgaagatgatgtctaccctctaaacacacangattatatggcagacaccacccaaacccaaggcgtacacaaacacgtaacagtgt

SEQ ID NO: 5147 - DNA, 570 bp, Arabidopsis thaliana landsberg
gagactcttactttaatgtgttggcagttcaacgccaaacagtatgttggataaggagattgattcttatagatgctcaatacaacgatttctttaggctggttagttagaccatttctacaaacttgattcttctaggagttggtttacggttttcttgattttttttttttttaactcgttgcaggatcatgtcgaaggatattacaatctatctgcaaaaaccaaaagcttcttctctagtgcagttgcaaagtgggatgctgagttttatgtcaagattgatgatgatgttcacgtcaatcttggtaccaaaatatgtttctagcataaaaaaaattataatattttttccttgaactaaaattgttgaatatatttgctcacctctttgctttttcaggcacgcttgcttccacattagctagtcaccgttctaagccaagggtctacattggatgtatgaaatccggtcctgtccttactaaaaagtaataatcccaatgtgtgtgttgttatatatatcatttttttgaatattctattctatttatttgggtttctaaccag

SEQ ID NO: 5148 - DNA, 2698 bp, Arabidopsis thaliana landsberg
agtcctaatggtacataaatgattaaaagacaggactaaagttctgtgtttcagtatttcaactttctagccaaagagaactataattaaaatgtttctgaaacttttcttatggctcttaacacccactggatccaaaaccatttccaaatcataaatgcatccagcaaaaatgttctcagaaatatttcaaattctcaccaagttgcgttatttcaccttaagtcgtgtcgtgtgatttcacctcgatatgttggtaacatttcacttccatcattcaaaaaaaaaaacggtgaatgaccaattttagtttggatgatctttctgtctgttcagatttctcatcttcatccatgttacccctgcagttttaaagtgaatgagtatcaaattaagatattcccaacaaacgaatcattatagcatataacacaacaaaagtaaagtttatttgctttaaagaaggtaccaagaaaacagaccactataatatttgtaccagttatatgtaacctaatggcacagacaaaagaaaaaaggaatccatttccgagtgagactggtgaggaaagatagaaaagatgcatctcctactgtgtaacatcaactttttatcccaaagatacacaatcttccctaatctaatgtttcactaaaccagctattaggaaagtagcaagaaacaatgttatacaaaagcacatatcaaagaatcttgctttgattttggagctacaagaaaaacattagatactagattcatgtagatttccctcgcaatttgcaaccaatggaagaagatatctcataaagcaaacaaaaagaatcattttttattcgttcatccgtgggaccaattcctttacctctgatttaaaacaaaggcatgtaaagataaagagagagagagaaactgtttactgaaaaaaaagcaggaggtggatactaatgctatgagagtgataaaagtagcctttaacaagattgattgggagaggctttgtccttttggctactctatggacaacttgagttactacgaatggggtggattcctgttccccaaacataagtagagttcactaaatggaaatatttcatccgtacactctcaaaaccgcacaaaatcaacaaaacttttaagattccaccactgttaaaaaatagcaaaaagggaaagaaaagaaaagttaaatcaaaccttgctttatatatgagaaactcctttacaggttagacacatatatgatatatcactgggtcagaactatctaccgaaactcggttttcgtcaagaccataagtagaaaacatatattataagccctaacaggctaatatcaaggaacagtgagatatcagtaaaatgagccaggagatattaatatttgaatgctgctatatcaaagatagggaaagttcatggctgctccagttaaaaagctcatgggtccctagaagcaattctgggagatatgatttgctaaggccacagccacatggcactactattgcagcaactggtatgatggacccattttatataacaaagcatattacgctgcaaatgattttataaaattagacactaaaggtaaaggtccataatgtgagcttgatctttatagcttcttattcatccaaccataagtttttctaaatgaaatatataaaaaaaaattcctcattaaatatctgaaaaaaaattgaaactttacctttcctctatataaacaattagcctccaaacctttactctatataaacaacctccaacggaaacacagaaagccaccaatctatcttaaaactaagttatcatgtgcactaccatttccatttccaccataaaaccaactgagtatctttcaagaaattcttggaagttcttactcaagaaaattactatttcatacccatgatcaatcaccaactccagcaccatccccatatgtaggcgataacaactttgatgcaaatgttgttatggtcctatcagtcctcttatgtgcacttgtttgctcacttggactcaattctataataagatgtgccttgaggtgctccaatttagtaccatctgaagctggtggtgacaactatcctgttcgcttgaccaacacaggagtcaaacgaaaagccttgaagagtttccagacagtaagttactctactgaactaaatctgcctggcttagataccgagtgtgctatctgtctctcggaatttgtagccgaggaacgtgtgaagctgttgccgacatgccaccatggattccatgtccgttgtatagacaagtggcttagttcacactcgtcctgtcccacctgcaggcactgcctcatccagacatgcgagaagattgccgactgcagccaaacaagctcgttaaactctactcaaccaccacaagacagcatcattctccaaatagcaccactagaaccggaaagatggatacgctggtttaggtgaactagaactagtcacctagatatttgtagcagctatgattaaactactatgttttagaattatttgagattacaagcggtctacacttaaaaacaagtttagcatttcaactgtaaagttgtaaatattacgagaatgttactttcttcatatcttgaactactaaatgtttatatttcacagttacaagccaataaaggaaaatttcattagatctgcaacg

SEQ ID NO: 5149 - DNA, 3535 bp, Arabidopsis thaliana landsberg
aggaatggaaaatgaagtttctctccaagatttttgatcttcggaaatcttagaaaggatggctgaaaaagtatgtgtataactcggctgtatatagttatgttttctggggggctcctactctggtgtcagtctccacttttggtgcttgtatacttcttggaatcccccttgaatcaggaaagatactctctgcacttgcaaccttcaggattctacaagagccgatctacgatcttcccgacactatctccatgattgtgcagactaaagtctctcttgatagacttgcatcctacctttgcctggacaatttgcagcctggcattgtagagaggacttcctaagggaagttcagacgtggcagtagaagtgatcaacagcactttatcttgggatgtctcatcctctaacccgactctcaaagacataaatttcaagatgatttcctgggatgaaggttgcagtttgtggtacccgtggctttgggaaaatcaggcttcctttaatttttactaggagaagtccccagggatctggaagagtttagggttgggggaacaaaagcgtatgtgcgcaatctccttggattcagagtggtaaaattgaggataacatcttgtttggcaaacctatggaaagagaacgatatgataaggtgcttgaagcatgttctttgagtaaagatctggagatactttcattcggtgatcagaccgtcattggagaacgcggcattaatttgagtggtgggcaaaagcaaaggatacagattgcacgtgctctctaccaagatgctgatatctatctgttcgatgatccttttagcgctgtggatgcacacacagggtcacatctctttaaggtacaatcttctctcttagccattagtgtgattgtgatgtctccttctctaaacaatcatgtatcaaattgattttcattctcatacttatttcaggaagttctactggggcttttgtgttccaaatcggttatatatgttactcatcaagttgagttcttacctgctgctgatcttatactggtatgtgaatagtttactatcttttatcttcttatatagtctatattttgtatcactgagaatatgaaatcatccaaaatcggttttcttatgcctcaggtcatgaaagatgggagaatcagccaagctggaaaatacaatgatatcctcaactctggaactgatttcatggagcttataggtgcgcatcaggaggctcttgcagtagttgattctgttgatgccaattctgtttctgagaaatcagctttaggccaagaaaatgtaattgtgaaagatgctatcgctgttgatgagaaactagaaagtcaggatctgaagaatgataaattagaatctgtggagccccaaagacaaattattcaagaggaagagagggagaaaggtagtgtcgctttggatgtgtactggaaatatatcacactggcatatggaggagctcttgtgcctttcatattgttggggcaagttctctttcagcttctacagattggaagcaactactggatggcttgggctactcctgtttctgaggatgtgcaagctcctgtgaaactttccacgttaatgattgtgtatgtggctttggcctttggaagttccctctgcattcttcttagagccacgcttcttgtcactgctggttacaagactgctactgaactgtttcataaaatgcatcactgcatattccgttctcagatgtctttctttgattccactccaagtggaagactcatgagtagagtacgtcgctggccactatccttatttgaggatttccatatatatatctatttggtaatcattgtgttccattttttccttgtataggcttctaccgaccaatccgcagtagatttggaactaccgtatcaatttggatcagttgctatcacagtgattcagcttattggaatcattggagtaatgtctcaagtttcttggctggtttttctcgtcctcacccctgtggttgctgcctccatatggtatcaggtacttttcaataaactttacaatttagtcttccataagagttgttgattctgacaaaattaagtcaagtttatttaagtgatgaagttgtgacaaaaagctttcaactttgcagcggtattacatagctgcagcacgagaactttcgcggttagttggagtatgcaaagctcctctaattcagcatttttctgaaacgatttcaggggcgacaaccattaggagtttcagccaagaatttagattccgttctgacaacatgaggctaagtgatggttactctaggcccaaattctatacagctggagcaatggaatggctttgctttcgccttgatatgttgtcatcacttacatttgtcttttcattggttttcttggtctccatacctactggagtgattgatccaagtctcgcgggattagccgtgacttatggactcagtttgaatactctgcaagcttggctgatttggactctctgtaatcttgagaacaaaatcatatcggtagagaggattcttcaatatgcaagtgttcccagtgaaccacctcttgtgatagaatcaaaccgacctgagcaatcatggccttcacgtggtgaagttgaaatccgtgatcttcaggtatccatatctattatactttactcctatcaaagtttgtgatatagagctcgcacttgttttatattataccttgaccgtttggaatatttggacacattgttaggtccgatatgctccacatatgcctcttgtgttgcgaggaataacatgcacattcaaaggaggtttaagaacaggaattgttggaaggacaggaagcgggaaatcgactttgatacaaactcttttccgcattgtagaaccttcagctggagaaatcaggattgatggagtgaatattttgaccattgggttgcatgacttgcgtttaagactaagcatcataccccaagatccaaccatgtttgaaggaacaatgagaagtaacttggaccctcttgaagagtacacagatgatcaaatctgggaggtgcgtcggtttaaatctctgaaagtcgcacgttcttctttctttaactagtttaaacaatgttcagtcttggctaatgtttgcgcggtgttttaggctcttgacaagtgccaactaggagacgaggtgaggaaaaaagagcaaaagctcgattccagtgtgagcgagaatggagacaattggagtatgggtcagagacaactagtgtgtctcgggagagttcttctcaagagaagcaaaatcttggtgcttgatgaagccactgcttctgttgacactgcaactgacaatctgattcagaaaacgctaagagaacacttctcagactgtacagtgataaccattgcacacaggatatcttcagttattgcacagcgacatggttctgcttctaagcaatgagtttgtctgaaaaaaatctcaaattcattcgatggaacttgtgtgcata

SEQ ID NO: 5150 - DNA, 3894 bp, Arabidopsis thaliana landsberg
cagttcctccccgggtaagagaagatttgcctctgaatctgaaacgtcattctcgacatggtacttagataaatacttgacattgaagacgttggaggtgcgaatgtgctccggaaagagaagacgatacgcatttgggttgatacgctcaagaacctcaactggtccaatcttccttgaacgtagcttgttgtactcatgagccggcatgcgatctctggtcaacaccacccacacgagatctccgggttcgtacagtacctctctccgcttggtatcaactttacctttgtattttgtagcagaaagctccaacagtttcttggcctgttcatgtgtatctcgtaaagaattaacaaagtccaccgcctgaccatgcattcgtcgtgtgtcatgtaaagaagttaaatcgagaggaccacgaggcaacatactatacaagatctaaaacggactgaaactcgagctcggatttgatgcatgattatgagcaaactctgcttgacataagcgcgtctcccatgaacgaatattatccccaaccttacaccgtaacatattacccaatgctcgatttgggacctctgtttgaccatccgtttgagggtggtaggcggtgctcatatccaaacttgtatgcaacatcttccatagtgaacgccaaaaatgacttagaaatcgtgtgtcgcaatccgagacgatggaggtcggtaaaccatgaagacgatatatctcttggaagaacaattgagcgactcgcaccgcatccgttgcgcgcttacgcggaacaaagtgtgccattttagagaagcgatcaactacaacaaaaatagaattattacctttttgagtcctaggaagacccaaaataaaatccatactcaagtcagtccatggttgcgttggaattggaagaggaagatataacccagcgttggttgcttgaccctttgctaattgacaagcacgacaatgttccacaaacctctcaacatcccgtcgaagcattggccaaaaatatgtagctaaaacaaattgaagagtgcgatcccgacccacatgtccttcggagtggagctcttgaatgacccttaatcgcaaactgcaattcggtatacacaattggatcccacggaacagaaaaccgtccgtaagtgagtaatctgttcttccactagctgcaacatctgccaaaatgggactaaaaaaggggtctgccttatataattcagaaaaagaagcaaaccctggtaccgccacatgcatcgttgttaacaacgaatgacgtcggcttaacgcattagccactcgattcaatttacccgctttatgtcgtatagataacttgaattgttgtaagaaagcaatctatgatgcatgaccagatgacaccttatcttgactatcaagatgttttaatgcatcatgatccgtgaataagataaaatcacggtgaaccaagtagtgacgccaacgcttaatagctttcactatcgcataaaattcgatatcatacgcactatagcgatggcgagctcctgccaacttctcactaaaatatgccaccggattagattgttgactcaaaacagctcctatcctcaatttagaagcatcacaatgaagctcaaatggtaattcaaagtttggtaacgccaaaattggagctgaagtaagcgtccgtttaatctcctcaaatgcccctcgagtttcattcgtccataccagcttagtgtctttcatacaatcggttagaggggccatgattgcactaaaatgaggtacaaaccgtccatagaatgacgccaatccatggaagctacgcacatccgacgttgttctcggttcgggccacgatcttactgcctagactatagtcaaatccatagacaagccttttgatgagactacatatccgagaaaaagaacacgatccactcacacttttgttgtgccacaaaaaaaacttcacggtgtaacaccactaaaatttgacgaagatgatcttgatgctcctccaaagacgaactaaaaatcagaatatcatcaaaatacataaccacaaaatttcaaataaatggtcgcaaggcttgattcatcactctcatgaaagtactaggtacatttgagagaccaaaaggcatcaccaaccattcaaataatccttccctagttttaaaagccgttttgcattcatcaccgggatgaacacggatttgatgatagccactcttcaaatccaattttgaaaaaattgttgccttcccaatctggtcaagtaaatcatctaaacgaggataggaaagcgataccgaactgtaatcttgttaacggcgcgactgtctacacacattctccatgaaccgtctttcttagggattaaaagagcgggaactgcacatggactcaaactctcacgcagccacaagatcttccaattggtggcgtaactcctcatgctcttgtggactcattcagtaatgagggcgattaggaagtgctgctcctggaactaaatcgatttggtgttgtatatcccatggtggaggtaatccctgaggtagctcgtgtggaaacacatccgcaaatttatttaaaagatctattatccacagtgctaaatctgtaggcggagagggagtcttattggcagccataagaagtaccaaaaaacccgtatcctgaaattcactcacaaaattcgttagagaacataacaacacactacttaactccttatccgctgtttcctgaatagtctgctcgaggtggccaggtcgcaaggaaaaacctgagggatttgggatgagaataatcttgcgattagcaaaaacaaaactgtatacattggtctttccattgtgagaaacgtcatggtcgtattgccaagggcgccccaaaagaaggtgactgacatccataggaacaacatcgcaaaagagtttatatttgtaatattgaccaatagaaaaaggaaccaagccacgttgactaatgcgtatctctgtcctttctttcaaccaagtcaatgtgcaaggtgctggatggttttcccgtgatagtcccaatttgcgacaagcttcctccgacacaacattacggcggcttcccgcatcgatcacataacgacagacttttcattttattgtacatgtagattgaaagatgttagtacgtaaccaaggatcttcactagccatgggagccaaacacatccgcgctactaacaaattcccggtatccccttcattacgatcttcttgaagctctgcactttcctcaaactcgtcgacaccatcaccactgtcatcccattttacttcttcaattaataaaccacgtgtgttcttttgcgggcatgccgtcattagatgatcatgttctccgtaggtgaaataccgcaaggcattgggtcgattcgatctccgaagttattgtgtttccaccgcaaccttggaatcgctagacgcacttgcaacttcacgtgataacgtgggttgcttactagctttgacattagctactcctgtgggacgattccagttagttacattccaagaagaagttgtcttgaattgttattacaatcgtagttggatcaaattgtaataacgctgtctgaatttggagtcttaaccccctatgaaatgagaaaccaatggaacctaactgtcaaaaatctcattccttgttatcaagagataaaactcatctgcatattcatctacagaacgagttccttgacgcaaattctacaatctcgtatacatggtacgatcataattatgtgggagaaacatatgcttcaagtgcttctacaataattcccaagaatctatctttgccgctacagcgcatgccagagctggtatccgctgcaacctccaagaggct

SEQ ID NO: 5151 - DNA, 1965 bp, Arabidopsis thaliana landsberg
ttgggaggaatttttgtctgtgtttgtgatgcgttataattgctttttacttctagatatgtgcaacggaagtgatcgtcttggacaaagagaagctgaaggtatattctattgatggtctttaccattatttttagggttttaaattttgttctcaattttgtttctgcctttggcttacaagttactagagattctgtagaattcgagaatggttgaccaaatatcaagtcacttcatcttaatcttgtgtgctaattagaacatggaatttgtattatttgatgatatctcacaaaagttctctggtcttttgaaaaatcagagatttgcaccaacaatgtgagggtcttttcatataattcattaagatcagccactgatagtttccatccaacgaacagaatcggaggtggtggctatggcgttgtctttaaggtaataaaaatgataacttctcttacaatctgcttaaatcatgttgaggttcttctggtgaatgtagtaaagggttttgaatcttgcagggagttttgagagatggcacacaagtagctgtgaaatcactatcagcagaatctaaacaagggacacgcgagttcttgaccgagattaacttgatatcaaacattcatcatcctaaccttgttaaactcatcggttgctgcatcgaagggaacaatcggattcttgtctatgagtaccttgagaacaacagtcttgctagtgttttgcttggtaacttttgccacaattgcattcttgtctaccaaatcccatttgtgtcctgtttttctgatcttgtttgagtgatatcaggttcaaggagtagatatgtaccgcttgattggtccaaaagagctgcgatttgcgttgggacagcttcgggtttagctttccttcacgaggaagtcgaacctcatgttgttcaccgtgacatcaaggcgagtaatatcttactagactcaaacttttctcccaaaattggtgatttcgggttggctaagctttttccagacaatgtcactcatgtcagtacccgagtcgctggaacagtgtaagaatccctctataaacatatcagtttccatctttcctctacatgtattttcagctgatgaaactgcgactacaggggatacttggctccagaatatgcacttcttggtcaactgacaaaaaaagcagacgtttacagcttcgggatacttgtgcttgaggtcattagtggtaatagtagcaccagagccgcctttggagacgagtacatggttcttgttgaatgggtaaagctaaaagcctcgtacctcaacaaaaatatatatagctctatgtttgtgttaatgtttcttacaagtgaaaaaataatacattttcaaaatgtaaaatgcgaaaacaaacaatattcaatgctttaaactctgtcttgggcaggtgtggaagctgagagaagaaaggaggctactagagtgtgtagatccagaactaaccaagttccccgcagatgaagtgacccgtttcatcaaggtggctcttttctgcactcaagccgcggcgcaaaagagaccaaacatgaagcaagtgatggagatgcttcgcaggaaagagcttaacctcaacgaggatgccttaacggaacctggcgtctacagaggtgtcaacaggggacgcaaccaccgtggaatcggtcttagggtcggccaaggaggcagctcacaggagagctcgtcaacgcaacgtgacaaagggaaaagctcagccgttcctcaagggtcgacgtccaactctaatatttccttccagagcatcacagagttggctcctagatgatttttttctgttaatagagcacaattttattcttgagtatattaattagtttatgatgtgttaatatcttatacatagggtatatatgaataaccaaagatgctatctgataaaatgtaatgtagttgtctgaca

SEQ ID NO: 5152 - DNA, 1103 bp, Arabidopsis thaliana landsberg
ctgtttcctgaaacctacaggctataccaaatacataacatggggattcccagacagtagcttttgatttatgagctatgatcaggacaaactgctatcaacccatgaaaatctccatgaaagcaaccagattcagtgtgctggtgtaagtcacgatgggcgcattgtggtcactggagcagaggatggtttagtgtgcgtgtggagagtaagcaaggatggtccacgtggttcacggcgtttacggttagagaaagccctatgtgctcacacagctaaagtcacatgtctacgtgtaagccaaccgtacatgatgattgcaagtgggtcagacgactgtacagtcatcatatgggatctcagttcattgagttttgtgaggcagcttcctgacttcccagttcccatttcagcaatctacataaacgaccttactggggaaattgtaaccgctgctggaactgtccttgcggtttggagcatcaatggcgattgccttgctgtggctaacacatcgcagttaccatctgattcggtattatcagtaacaggctcaacatcttccgactggcttgagacaagctggtatgtaactggtcatcagagtggagcagttaaagtatggcggatgattcattgtactgatccggtgagtgccgagagcaaaacaagtagtagcaacagaacaggagggctgaatttgggtgatcaagtgccagaatacaagttgattctacacaaggtgttgaaattccacaagcaaccagtcaccgcgctccatctcacaagcgacctgaagcagttactaagcggtgattcagctggacagttactttcatggacagtaccagatgagacattaagagcttcaatgaaacaagcttcattaaaacaggcttcattaaaacaggcttcactgaaacaggcttcatcggtttagaatccaaagcagagaccagtaaatccccttttggtttctctgactagaatcgaaagagctggccagggaacttaaggacaggaccacgtaggaggaagcagaccaaagtctgaacatagtgttgtctccgaaagagagtatagcgagccactgtcaactctgt

SEQ ID NO: 5153 - DNA, 755 bp, Arabidopsis thaliana landsberg
tatttcgtgaggaactagatgcatcgagtgtttcagagggtgcagaggaattaatctgtctgttgttcttatgacatgagctttcgggaatagttgcttaggagtttgcccgaaatgattcatctgcgctagtatagaagctttcaatgcggggtcggtaggtgcatcaatatcaacatttccttcgtatgtgtaatgatagaaaacattcacagcttcttctgcagcctgagaataaacatttcataaaaggaaaaggaaaagtaaataacataacaatactttgatttctgcattctacttgactagcagcaaagggaaaatattgtgtaatgtacctttcctctctgtttgtacccaaatatgagatctatccaatgatgcaaattctctgagacatagtctgactccaacgcttctctgtgtttgaggatgaactcacgaacactacctctagcccaaggaggtaaaaagacatcaccaacctgaaattatgcagcaaatatatgtgtatcatgtcaacatgagaggaaagttgtaaatttaaacaccactgaatgactttgaactggcacaaaccttctctcctgactgtttttcacccagatcaaggctgaatctattttcctaaaaactcgggcatgtagaagaattcaggaattagttctttcacgtctgaagtatttccctttcctgctgcacttagccaagtatctttaatactattgaagagtctatcagcatgatcaaactga

SEQ ID NO: 5154 - DNA, 349 bp, Arabidopsis thaliana landsberg
gatttgttctaagtctcctgaccatcagtgattgctctagatactagtcctagttttagatgatgcttttgattctaaactatgaagcttttttgagtgaagcttttaatatctcatctggtactgtccatgaaagcaaatgtccagctgaatcgccgctcagtaattgctttaggtcggtcgtgagatgcagagatgtgaccggttgcttatggaacttcaactccttgtgtaaaagcaatttgtattctggcttctgattccccaaatttagacctcctgttctgttgctaggtgttttgctcgcgacacttaccggatcagtacaatgtaccatccgccacacttt

SEQ ID NO: 5155 - DNA, 589 bp, Arabidopsis thaliana landsberg
ggaacagcttgtacggtaccaccgttcttttcatcttgtttctttttatcctctctactggattgaacacaatgcgtttgtttctttttttacattttgttgctgtttatttttctctagtaaaatgaataaatctgtcaatctattcacatagttagcatgggtgggtctcttttttaaagcttagtttgagtagtgtttaaggtttctattctctattagtttgtttactagcatccttgaatggtgtttctatttctttgccgtagtactcatgtggattattatagatgagattttctgtcttcattgatctgcgaaagtgtaatttattcttttttattgttttcctaggctcgacacaaccatttcaggatcagctaaacaggaaagtaacgagggaggccggcttttcaaattaatggcgaagtctttctcgaaaagatggcaaaatggagaaatcagcaatttccaatacctaatgcatctcaataccttagcaggacgtggatacagtgatctcacacagtatcctgtatttccgtgggttctagcagattatgatagcgagagtcttgattttcagatc

SEQ ID NO: 5156 - DNA, 652 bp, Arabidopsis thaliana landsberg
aactgcaatagcgaaagctggtgctccagctcctttttcaattgccaatagcaacagctaaggcagtgacagtggcggaatgcgaagaaggcattccaccagaactaatcatacgtttagagtcccacctcttttctttgtacctgaacatctaacatacatcacgaaacaactgagaattccacttctttcaatcttaactacaacagatctatagctacacaaatgccaacattcaacttctgagacctaatcatgagcaaaaatttgcaaatcctaattaatccatcgaaaatcgaaaccctaacagtaagaaatttgttaaatcacagatcttaagcagagatcaaactaatctgagaaaacgaaagatttgaacggaccaattagtgaagactttgaggaactgagcaagagcgaaggcaagaaaagcggagaagattgggagattgtgaggaaacagattatgcgacggaggagatccgtacaacgccctatttccaccacctaacgaaccaacgtccgccgctgtcatcacctcgtccattaggcgatatacaaccgcgaaaaaaatcccgatctcgtcttcttcttcttcttcgatcaaatcagatactgtcaacgtaaaaaggtaaagagattcaggagaaga

SEQ ID NO: 5157 - DNA, 799 bp, Arabidopsis thaliana landsberg
gtcttttcttgagcataatcatgttcaaaacaaactacttcaacaatcaattcagcatgcagaaacaagtaggattaaaatggacagtagttcttatagccaagcaaaaacaagcatagaaaagactgatggagatacaatcattggacgaaaatgttgcatcaatatatattagttcttaaacgagaataaaatttccaaatgagacataaaagcattatccatctctagcttaatacaacaagcgaagagataaaaacaaaacccagtaaataagtcttaatacacaggtactactgtccacagttcctctatgaggctggggctttttgtttcttgggcatgcggtaaccaccaacaacacaggcatggtcacgctcaaacggctcgagagtcacctgttctgctggtttaaactgctcttgttgcaacttcttcacctcgctctggaagactgcttctgctgcaactgtagagtcgatacagttggcctgaacagatgagacatgattatttagcgacggaaatacaaattgaataataacagaggagaacattgttgaatttgattaaggataagagcactgaccttgattgagataacaaagtgtccaccagttttgaggaaaaatgaggcattcagggccaagattcttgccttcaagagttaggcaaatagatggatttcaattaaattaacataaacagagaaccaaaatgagacattaacataaacatagaaacatttatggaatcattgcagatttctggagcaatctctgctagctcagcaagattg

SEQ ID NO: 5158 - DNA, 2552 bp, Arabidopsis thaliana landsberg
atcatgtcgttgtagtactgaatgttgtcaatctaaaagggtatgatgctagcaatcaagatgcaatcagagttcacagagtcaagccaagcaataataggttttggggtttctagtaggtctaagtgaacatgcagaaaacaaaaattcaagcagaaacagttaaaacactcgaccaacacagctcgttgccaagcactgggtgtggtcgagtgacaggtcgagtaacagacagaaaatgtaacaggtattctcgactgcacagtctcttgccagacaactgggtagttgccaaacaactgggtggtcgagtatcacgcaaaaaatgcaaaaagtaaacaacatgcagcaagatgcagtaaacaaagcagattaaacaaagaaatcaattagatgagaaagtcccgaggatggggtaattgagtagtttcgtttcctcagtttacaggtgattgacatgctcaataaattatccctagaaaacaagttcgataaccaaatctaaatgccaccgcaacagagaccctcaagttaaaccagtcccagactcaatcaccattgacgagagctaacctaacaggcattacgaatcaacaagtgaaatgcttaattctcactacaaccaataccttggtacagggtcacgaatctctggaattagtggttcagacatttcatcgaacaccttttgggcgcagaaatgtctgggctcaaattccagttgatcagaaagcaataggcattaagaacaactaatgcagaagggatctaacaatcaatactcaatcacctagaatactgagaattctacactactctaacccatcctcagaaacctattcactactcaaacatcataacagaaagcataaacgttgaacaagttgaaaacatgatagcaacagtgtaacagcaggatgataacaaaatgaacaacggtaaacaaaatcaagaaaaaaagctgaatactgaatactgaatagataaagagaaatccagattacaaaaggtttagaacacagtgtctgcggaataaaactagaaaaaaaaacttgtttgcgaaaatgtgaagtacatgctacttatagcaaaatattttgaagccctaatacttaaagcgacgcagtattgggacggattaagaactgtactcgacccaggtggtcgagtaggaggtcaagtgaatagctggagtcttcttttcttccttgtgctcgacggtctggttgagtgcagaatgaaaaagactctgaagctcttaatcgagtatgtagtcgagtggtggtgatggtgatactcgatttcaaggtagagtggtgagatcgagtggttgtctggtaatggtggtgaagacactcgacctcagggtcgagtgaggtgattgagtgatggtcaggtgatggagatgaagacattcgacctcgtggtcgagtggtgaggtgaagtggtgatgtcctctactcgaccagggggtcgagtggtctgctgaggttgtgaagcgtctactcgacctgggggtcgagtggttttgcatgatcaggtccgcttcttccaattagctcgtcaatagctccgaatcaccttaaaacaacacaaatatgcaacatgcatgcaaaactatcctaaacatgcaaagtgatgacaaatgatgagaaattgtataaaacagtgatgatatggtgctaaagtgatgacaaatggatgctcaaaacatgcaaaatacacacttatcaatacacatgacataaagtcatatttgactccaaaacactaaccaagcttcttcttgcttctcaaagctttgttggtgtagctgaagtctatatgagtctttggctttgtatcttctaacaaggaaacactacttaggcttttcagattgggttgcagttctagtttttatacttaatcatacacatgacatctagtcatatttgactccaaaacattaaccaagcttcttcttgcttctcaaagctttaatagtgtaaccaaagtccacatgagtctttggctttgtatcttctaacaaggaaacactatttaggcttttaagatccggttgtggttttagttcttatactcaatcatacacatgacatgaagtcatatttgtggatgtcggattcacacactcaagtatttatttatttagtgagaatgattattcttgaggacaaatgtattaaaaaatagatcaacgattatagagaaaactatgagtttttgtaagaaaatgtgtatagtaagtttgcacaaaaatgcgtgtgtctttacatggtccttgacccataatttatactcacaaaatacatttagttctcattcacacacaattattctaccttaaatgtatccgttgaaaaacctttgtgcgtgaggtacacgcgcgcgattcttttctcccaatcctcaccgaagctctcttctccgtcgtttttcgttttgcctctctggtgtccggtttcgtctggcgccatgagagggctcttgctacttattctctgtttctacctcttcagtggtcttggcttcaaatcgactttctgctc

SEQ ID NO: 5159 - DNA, 262 bp, Arabidopsis thaliana landsberg
ggacggaaagtgtagcctcctatgcatcgatgactgtgttcctgtcttcattttcgaacgggaagtgctcaacactggtcatggggcgagatggaaccgcacaccggagatgcaatcaatctctgcccctaactccgcaaggttgggtggaacgagaagccatctgatttgtatgcaaactggagcccgacaaacctacactagcccgcgcgagaggatgatctccacttcagggtgaggccggaggctatccaatgccgat

SEQ ID NO: 5160 - DNA, 5392 bp, Arabidopsis thaliana landsberg
  unsure (1)..(5392): unsure at all n locations
aggaacttaattagtatgatttaaatctgaaattttagttagaaaccgttatgattaagagactgatacacgatagctagtaagatatatcattatgcgtaaaaccttcatacatattttagtattaaactacaattagtcaaaaaaagaactcaactttcggttgataaaaaaaatcaaagttccttcaaatagcagcattaatttgatgagtaatttcactttatcagggtcgattatatcattagacacgctaatgcatcctcaaaacactcttaagaatcctaattattattgttggggtagtggtgtcttcgtcctagtttatttttcggttggatcgaattgtatatttaatttcataaggacatatttgtctcaaattttgggaggtctgaaattctccattaaaggcttcggcaatccaaaaataaatcaattattttcatagcttgtttcttatcaataagaaaataaattactatcattttattattactgttattattatgatcatatttcctgcgtattaatcaagtatctaccttagaaaagttatttgtctccttattttaatcattgtacactacaagaaaacagtcgatttgcgacggaacatttcgtaggtaatccctcgcaaatcatgattaccgagagatttgtgaggaatagcagtttctcgcaaatcgcttctcgcaaatggtaaaatatcgcaattccctcgcatattttgcgaggaactgttttcctcgcaaatcacacgcaattatcgtactagtacttccctcgcaatttttgcgacggatttgcaattcttttttttcgcctagcaaatctctagcagaatttgtgatggatttgcaagcgttctgcaatgttttctgatatattaagacttgattagtgtctgattagtgattgcgagtcaattgatatattaacacaattgaagctgaaattgcataagtcaaaaatgtatactaaattgtttgaaaccataagaacttgttctaaagaaagagataacaaggcaaaaaagcaagacaatgttttcaaaatacagttgatggaggagaggatcctattgcaaggttagctagggcagcaactgttgtctcctcattagccacctgctgttctggagcagtagccacaggtggagcatttgcgttggcctgtcctgtctgtgtcgaggaaccacgtcgaagaattgcagctaaagcaggatctttttcagcaagatagtcaaacaggatgtcgaagctattgatcttctcagcctgagattgaatgcatgcttcagcggcagccagcttctgagaaagtatgaccggatcatcactaggaagcattggaccactatgggctgaggatgcttcaaactgcagagatccaaccccataaatccttcctttctttctcggagcaacctgcaaaggtcacaaaaactcacaacgacacaacagaaaacaagtgagaaaacaagttcaaaagaattctgacacaaagtataatgaataagctgccaagattacgagaacttgatatcaagcactagagacacaacacaaacatttcagacaagtacacatcacatacatttcagacaagtacacaacagaattcagacaagtatacaagtacacaacaggacagaattcagctgccaagtacacaacaaaattcagacaagtacacaacagaattcagacaagtacacaacacaacaagctgccaagaaaaagcacagaaaatttacctcagtaaaaatcttgttcttggcatgaaaagatannnnnnnnnnnnnnnnnnnnnnnnnnnnnnnnnnnnngcacatatgagactcttcctcttctatcctagatgtcacttgcttgtagatctcctctgacttcccatcgatgaaagttccatccgcttttctgtgtgtctcatctagcagctcaaggaaatcaggagttgtttctccagtttctcacactgaaacacaaagagataaacacgttagattcataacattgtagattaagtaatggtaaggagagaagaatacttatctaacccgttttcttgcacgagctttgtaagaggtctggcctgaacggtgtttatggatgcctttgccatccggatcatgatatctagcatttctgctggtgttactttttttctctgactttggatcttgccaaaactgtactagacctttccacaaatcaggatcaatccattttggcttggcttcatcacccttctccttccaatttcccttccaccttgacacttgatcacacatcctagactttagctttgcttcaaactcaacccttactcttttgttaattgaacggtcccagttatatacttgctacaaaacagacaaagcaaacatcaaacatcagactacaaaacagacaaagcaaagcaaacaaaacagacaaagcaaacaaaacaagcataaacatcaaaagagcacaaaacttaccgcaaacgtttcataccatcgatcgattgtagcctttgatgtctgtgaccaattggcatgaggttctttgaaatctctttcaaatatgctgcggactgttgctgcaactgtagagtcatcgtcaaacctacaacaacagcaacaaaacacataaggatctctatgtctttatacttctaagaaactacaatgctaagtacaaccaacctaaatccagagacttctaaggcaggaccaaacttctaaggcagaaccaacctaattccagagacttctaaggcagcatcaaacttctaaggcaaaactaaccaacttacaagacctaattccagagactataagcttaaccttaccatagagtacccggaggacgctttgggtctagccttgtcaagccagcacgaccaggactatcgaggagctcttccagtgtcagattgttgagacggtcagcttgaacatcagaatgattgacaaaaggctgagtcgttggcgttggaggcgatggtggaacggttgaacctgaacctgaacctgaaccttgaacccctgagatattcccaccactaagcggagaattgacatgcaacgggtcacgctgctgttgtctaaaccggacataagtattatccgacggcatcttgcacaaaaaacaaatcaagtgttagatctgggaaaaaagaagtaagatcggagaagaagaataggtcagatttgagagaagaacttagatcggagaaacagaggttacctttgaggcaaaatagatcgagtcagagaagaagagccgcgacggttctggagcacagatcgaagaagaagagaggcggcgaagagagtttgcgccgtaattagatcggagaagaagagaggcggcgatgagtgtaacagattagagaagaagaagaagaagagttagatctgggaaaaagagtaagatcggagaagaagaataagtcggatttgagagaagaacttagtttggagaaacagaggttacctttgaggcaaaacggatcgagtcggagaagaggagactcggcggttctggagcacagatcgaagaagaagagaggcggcgaagagactctgcgccgtaattagatcggagaagaagagaggcggcgatgagtataacagattagagaagaagaagaagaagagaggcggtgacggaatcagatcggagaagaagagctccggcgccgaagagatcagagaagaagaagaaaaaatttagggttagggtttgatgcggctggtttgagctccgctcaaactaggtcttcgagtatatataggaatttatttcctcgcaaaaccctcgcacagtttgctttgaaattgcgaggaagatttttaaaccaattaaaacgcaccacatattgcgagagaattgcaagaacacctaacaagtccctcgcaatttatgatttttaataatttagggtttagggtaaaatttgcgagggaagtgcgagtgcgtctagcaattccctcgcaatccttcaaccaaataactccaccattttgatttagtgtttgaatcagatctgatttagattctcctatttcgaataagactcccagcaaattaaaacatgactaaatattttaaataatttaaggtttatggtaaatatttgcgagggaactgctacgacagacttgcaaatctctcgcaaaaacctcgtattgttgaatcaatttgaaaaaatacaagaaaacactacttaaaattattcggattagttattctgaatcattaggaagttaaatatctacattagaatctaatttcatctcaaaaacttcaaatgtgcatttttcccaaatacatcaatgatgaacttatgtgttttcaataatatgaatcataagtgtttaacatcttcaatatgaaatgtcatattgaaacatatacaatatgtttttgtgcatcaccatataatcaacttgtatgattatacagtcatttagatttacatttataatgaaaaataaagatcgcaaatcactttttatgtattttagggtttagggtaaagatttgcgacgtatctgcttgggatttgtgacggataatatctttcttgcgaaaccatcgtacttccctcgcaaatgtgcgaggaagccttccctcgcaagttttgcgacggaattgctacgcgcgtccgatgtgtagcacgttactcgcaataccctcgcaaaaactgcgaggaatgccttccctggcaacttcctcgcaaattgactgttttcttgtagggataggattaatctgtatttgttggaggtggaggacatagttgcaaatatggaagagttaaagttttttttgcacaaaatcctaattaaaacttaggtagctaagtaatttactatatctagtactaaattaggatcacaggccatttgtgaaggtatattaccttctttctccaagatggatttcttcaaatgtgggattatatacttgttagagcctcgaattttcataatttcttgcatgcacgattgcaaagtcaaaaaaatttggttcacttgttttgcgggatgttcgtcaaatgaattttctaccatagaaataagatcttttatcgtctttggacacaccttgtgttagagtgtttgaatggcactaaaaaatccaagatctaaaatattcaagtcaggcgaattcggtggttgacacatcaaacgaatgtcaaagccatgatgagaaactactactcagaattcctcatctcttggatcaatgtgagttcttgcattatcttgttaaataaaaataggttttccaaaatcatcgtgtggccatctttaatgaattcctggcccaaatttttcagttaaaaactccttaataaaatctctcttgatggatgtcgtcggctttaactccaa

SEQ ID NO: 5161 - DNA, 1687 bp, Arabidopsis thaliana landsberg
taatgttatatacatcctctctagtacatatcatgatagcatcagagtagatgccctgggaccctcgaagtagtattttcaacttatgagatcaggagccacatgtacatgagttttggaagttactaagtgctaagtgtttgcttggaattttttttctcccatcagcctatttattagttggtatgttttcctctgtctgaacaactttttgaatgaacctgcaagtgtggattgcggcaaatgttttatgcctgaatttgaagttcattgattatagcttgcttgtgtgctacacttgggtttttaatgtggcatatgaggcactgactgttagggtaataggagctgtaacttcataacaagagtatgatcttcggctggtaatgacccactacgaagtggaagtgatgtcttaggggttctagcatcaagtgaactatattaatttgtgattgcaataaatgataactaccttaaacatctgtggccatacagcagttaagagtctaattactattatatttgcatattatgtttcagggtcggattcaagaataagattgtgggatattgaatctgcacgcaacaccctggtgaactttgaaactggacgcatccagactaacaaaggaatccaattagatacaagcgatgatccagctctggtatttgttccatgcatgaagactgtgaaggtagtcaccaacttactattgtatcagcatatcttctcattccattacctggattatttaatgaattgtgctgcaactgtatataaggcttttggcatgtggtcgggtagaacaacactgatgcttcgtggacactacgaaagcgtgaacacttgctgctttaattccaatgatcaggtatgacttaatccttataacctttccacgagtcattggactttgtaggtttgcaaagtttgcttgaacacacctctaaatccgagttacttgtcatacttgctcataggaactatacacaagtggctcagatagacaaatacttgtgtggtcaccaggcggaacagtggaagatgaaatggtcagaactcagaaccatattctattactacttcaaattctcatacatcaattgttacacgagtcttcttgtttatgtcattttgatcaaaatttgactatttgcaggtgcaagatgaagtagccgaagataaagacaattggagcgactgagaaaacaagtttcgggcagtcttctttcccaatctgtgaatttccatgtgcgttgttctgagtatacttttcacaaactcgtattactatagtcgggttttgattgtttataaagtaaaactgaaatatttgtcagttaattagaatttagttcatactactaaaatgaagactaaactcgttccgagtcaatgcgaaccgaataaacaacgatcgactgtaagaccaaaacgaatctctttattcggcgaagaccataaatttgtaactaaagataactacgtcaaagtgtaaaagtaaaataataaaaatctatttgaacacagttcttttactgggtagtttcaccctttacaaaatttgcagaatgtagttgcagcctattcgactttttgtaaatgaccaagttggcaacttaataaataccgcgtggtttatagctcatgtgcgtagacttccgtgtgaaaatggaagcggca

SEQ ID NO: 5162 - DNA, 864 bp, Arabidopsis thaliana landsberg
gccgactgactcgactgacacacagaggcaggcaatccacagcccaagcagtttatttggtaagtttccacttggttctagaggtcgaaaacgctcactagaatctacaccaaagataattaaaccagtaccatagttgcaacgaaactgatacaagtaccataagtctatagtatgtagataaagcaaccaacactacttagtctctatatgagtcgtagcagttttgacattccctggtttagtgaacatctctctctattaggaattgttgacatagcagattctctaggtttccactttggaagctaactcaagtaaaccacatcattttttgtgatcaattcagctataaatcctataaaaaccttcaaaacatatactaataccaccaaaatcaccgtattacaaaggcaattacactttcacaactttgcaggttttcataagtttcgtatattcaattactgacaaagctcaatataccaaacgcttagagagagaagaggttcagaaattctatgtaccagtaaaagtagaatacacactatgatgatgaaggaaacacatctttaacagcagaagctgcagtcaaataattaagtgtattcctcaaagtctctctttctctttttaacctagccgccgtatcttcaagctcaagcaacgcttgctgctctctaggagctccttcaaacgtacttccgacgaagaacgaaaacggcgtcggaaactgattcctccttagatcttgaacttcttttctcagccttaccattcaatctatttgataacctaatcacttctttcattagaacttcgacttcattagctaacgaatcaagattttcttcaccggaagga

SEQ ID NO: 5163 - DNA, 3284 bp, Arabidopsis thaliana landsberg
gaaagattacgatctttagaggaacaactcagggataagttaaagttcagtcatattttttttactaaaaggctaaaaccagacatattgcaatataagaaagaagatttggtatgtacctgcgaactgtaactggaacctgaagatgccgctttcttctctccaatgtatcttatgaagctcctacagaccaaatacaaaaacttgtaaacgaagcaattattggtagtggttcgtttcagaaccaacaatccggcctgtgatctaagaggaataaaagaactgaaaatttgattgtatgcaaacccctaagaaagagaattttaagcagatatttctgagagttacacaccatattccagtatcatctgcggcaaataccatcgggttgctgtcatatccaacccctatcaccattttctcagaaataaacaggacctgaaatagcaatttccccatagtatatcaattcaggacataacacaccggagaaaccaggttctcaaaagtaaaataaaggtggatgctgacccacatcacgaagaggcaaatctcggaatgcaacgctttgggctaaaggagaagggccaacatcatcaacaaagtaaatcatggagctatgacctatacatgattacataaacacgcaaagtgtgacagatggtagtaaaaactgcaaccaagttgaagttccattgtattatttcagtagagcgcaatggaaaaacatcccaagtctgaaggattttctgacctacatatgctaaggtgtttccacttggagaccatttaacaccaaatgcccaagaatatgagagatcaagctgaagaatttgctgtttcaacaaagccacagtggaaaaaaaaactccctaacattagatgagagagtagactgaacatatatatggcagaagtggtatactatttactaaaagaaggaaagccagccaaacgagtcaaacctccccaaatttcgtttccgctggtgagcctgcttttgaatccctgtatcagcccattgaaagacaaataagaaacggcctcatgtttgaaaaaatgttttaaaagtagacgttcaagtaatgagcatactttgtgtcaactcctttgataaatgttgaaaatacccgacattttccatctgttgatgtcgttgccagaagaacctaatgcataacagacaatcagagagcacagcaacataaaaaagcatacgagaaaaaatgatttagaagattaactagtttgtggagattgatattctatttttagggatcatgtactctatactcaatctggtggccaacttatagaatatttttggtagagaatgcttttacagagagcctgcttattattttaactacatgaagtacaagaggttctgttgattgcacgtacattattaggatgccaagcaacagatgtgactgaagattcgtgccttttccggattagcttactgacccacctgcaaacagtaaagccaagcaatgtcagatactaaaagtttacatgaaagtatctttctaaaatctctaaacaatacacagttatgcatgccaagataataaaaaatatgattggtgctaatatcatgccagtacataagacaagataatatcattacatagaccaacaacaccattcgtagcaaagaagtcaggaaacttgccaaagaaaaaatcaaggactaataatgagaattaggagcagaagaagaaaataccagttattctcttgctcataatagcaaatacaaacagttttagcaccacttccaacagcaaacttgttctctatgggtattgagcaaaaagatgagaacatagattagaagctgtagaaattataggaaaattacactacatattacggaaattaagcttaagaaccagaaaaattaaacatttacctttggggctccattggacacaaagtgcagcacgatttagtctaagaataacgagagttggtacccattcagctccttccaggctccagacgtaccttcaagaagcattctaaactcagttcaacgaacgaaaaaaagtgaaggactaagattaacaggtttggagtttctcaaagtatatcaaaggtagcaacttacgagttcctgtcatgagaaacagtgacgattttgttggactttgagctccaatctattccagaaacaatttggtcatgctgcaacaagacgaacaataatcatgaagttgttgtaagggagattcaagctgtctatacaacacttatcagcgacaagtgatcagtgaaatgagaatacataaatatacgaaagtaaggaattcccaagaagagaaagcaaaaggaatgcaagttcaaaagttacagaaagagagggagagagaaaggtttcaccttttggaggacatgtaacctctcccagtggtcttgagacaatgatttatagatatgaacttcagtgctgttaggacagagagcaaccactaacaagtaaaacgaaacaaatgtcaaagcacataaatttacaggctttggtacagacgttaaatcatatgtaacttggtacatttgtttagaaaagcgcatctactaatgtacaatactagataccaagtgttcctaacaagagacaccgacaaacagacatataaaacattgactcgaagaaatttgattaccaagatgtataagaataacacaagtcaatttagttgtatcatctatctatcttcccagccaaactaactatagatagatcctcctcatttataattctaaaacggaaaaaacgacggaagagagaaagaagagaatcacaaaatcagagaggtgttagaaacatactggagagatcaggactccaagcatggcaagtgattgactcagcgaaacgatgaacatccaccactgccatgagtgatccttgttgtcccaaatgtgttgtaatgaagacagtcttttctctcaaattgacatctacagattcctaaaacggagtcgtacggtgaatagatggacagataattatgatgaaacgccgatgagatccggagcttgacgacgacacagtcgcaaacgtgaagtgaaagagacagattttttttttttttttttttttactaaagccccaatttttatgaccagatcaatttcagttttacttggacctttatttttgggcaaaccagcataataataaggaaaaaatcgaattatttttatttttaaatctatagttctggaatctgcattagttcttttttttgattttttcgataaaaggcttaagt

SEQ ID NO: 5164 - DNA, 1650 bp, Arabidopsis thaliana landsberg
tgtttatcggtcatagctccatgatttactttgttgatgatgttggtccttctcctttagcccaaagctttgcatttctagatttgcctcttcgtgatgtgggtcagcatccactcttttttttcttttgagaaagtgttctcatgtgttatatcctgaattgatatattatcgggaacttgctatcttcaggtcctgtttatttctgagaaaatggtgataggcgtgggatatgacagcaacccgatggtatttgcctcagatgatactggaatatggtgtgtaactcttagttttctctttcttagctatttccagacaatcaaatacttcaattcattaattctccttagctctcaggccggatagttatttctgaaatcatccacacaccgatgattgccttgtttacaagtttttgtttatggtctgcaggagctttatcagatacatcggagagaagaaagcagcatcttcaaattccagttacagttcgcaggtacataccatgttttctttcttgaataaaatatgagtgaacttagcttattcctgaagtgttcctctaagatagtagtaatctttcgggttagtgtagttgctccttttttctccttgggtttactactttgaactttccacttgcattatttgtactgttttgtctaatcctttttttcattatgttatctgttcagttttctgaagcatttggaaaattctacggcagtcaatcaaagtccacaacagccaacgatgcttctgaatcacgtggaggtgttcatgatacctgcataaagtaattatttcttaagctaacttttcttttaccaaatcatttgccagaaacctgcctcattaactcttttacttcgattgtctattaagaacctgacatggaaggttacctgaaaattgcagttccattgtgtctctgagcaaagcagggagtcctaaagtaatgcgattcagcacttcaggtcagtcactaatacaaaatggaattagccgattcagttctcaaaaaacaaaccagcagtttcatttactcgcataacggattgttatttataggattggatggcaaagttgccatatgggatctggagaacatggaacaagaacttggcaatcagttttaataaacacacaaataaaacaattctggctcacaagcagggttttacttaagttgaaactactttttcaatttcgtaattgtttcactttgtaaactgccacaataaaaggccttattttcttggtttgtgtaagggcaggtattaataagtttcttggcttcatgatttgattcatttagttagcatcttgtaataccttttatatatagtaatatcagctttgtgtcgaaaggagtccatattgaaccaaacacaacaatttcgcaaaattttcaagttcttgagaagaagcaaaaagctttggtcctccgaactatgccatatttaccacaaaacgagatatcgacagacattaatcttctatcagatgacagaagtgtgattcagaagaccaaatattctttgaatgtttctcacttattgcacaacaactactgtcctcgtcctaagcaacttccagagtacctagtttttaaagcatgaactagagttgtaactcagaagcgga

SEQ ID NO: 5165 - DNA, 560 bp, Arabidopsis thaliana landsberg
  unsure (1)..(560): unsure at all n locations
aataacccacacataacctaattagtacaatataatgaacacacaaactttaaattctctttgatcacgtaacattccaaatgttgcccatatgtgcttgactaaatctgcttgcaattcataatggacacttgaatcacgcaactcggatctagcacgcacatgatttgtaaacgcatgtaacacctccgttgagaatggttccagtgtactatatcggcacacttatgactattttgaatattttgtcgcaatcctatttttacatgttttaaaatatttttgtagaatataatagcttgttcgatctgtagtatcgatgatgtccactggcagattcacatcggactgttaactatctaataaaatattaccatgtcataaaccaatattcttatttttgtgtatttatatatttatcaagaacaataaaattaaaatcattacttcgacatagtaattagtgactattactaagagtgttaatacagaagtggaagaaatttattttaaatattattctttccttaggatacaaaanatattttttggtaaaattt

SEQ ID NO: 5166 - DNA, 961 bp, Arabidopsis thaliana landsberg
aaaaaaagaattaggtctgactttatatttattttctaaaagatgttaatagatatattaaaaaaaaggctaatccagtgtaattaattttgaaaaaagtataatgttaacttatttgggattagaaaagtgaatatatagaatgcctttatcagttactcatactcatactcatactcatactcatactcatactcatagtgaggtttagttcagatttttacatggatggatttgattaaatccaattatgtatatttaagtatttaactaatgcagaatttagatcttatttttttttttgcttattattatgatgggccgcccctaagacagggccaaggaaaatagaaaatgatctggtcataaaaaattgggctataagagtaaaataaaacacacaaacaaaaacatccgtctctttcacttacactttcacttcacgtttgcgactgtgtcgtcgtccacctccggatctcatcggcgtttcatcataattatctgtccatctattcaccgtacgactccgttttagaaatctgtagatgtcaatttgagagaaaagactgtcttcattacaacacatttgggacaacaaggatcactcatggcagtggtggatgttcatcgtttcgctgagtcaatcacttgccatgcttggagtcctgatctctccagtatgtttcttctatctctctgattttgtgatgatcttctttctcttttccgtcgtttttctgtttttagaattataaatgaggaggatctttagttagtttttctgaattgacttgtgttattcttatacatcttggtaatcaagtttcttctaaatccctataattgagaatttcgagtcaatgttttatatgtctgtttgtcggtgtctctcgttaggaacactcggtatctagtattgtacattagtagatgcgctttctaaacagatgaaccaaatcta

SEQ ID NO: 5167 - DNA, 486 bp, Arabidopsis thaliana landsberg
cgtggaggtgttcatgataacagcataacgtaattgtttcttcatctaacttggcttgtaccaaatcattttccaaaaaactgtctctttagctcttttacttgattatctgttaagagctgacgtagaagtttacctgcagttccattgtgcctctgggcaaaggagggagtcctaaagttatgcgattcagcacttcaggtcagtcactaaatttaaatttatataacccttcatggaatcacccgattcaattcatacaaaatgacaggtttcattagctcgcattttcggtttattatttataggattggatggcaaaatagccatatgggatctagagaacatgcaacaagaacttggcaatcagttttaataaaatctggatcagtagtcagcttacttaatttgtatatcagattttgtttcgactagccttttcacctttttccaatttcgtaattgtcacacttggttaactgcata

SEQ ID NO: 5168 - DNA, 3068 bp, Arabidopsis thaliana landsberg
gatcacccctcttgggcttcctgttgtgcaaccctattgcagaagtgaaagacatctggtaagtattatccattaagaatccttcatgttatttaaaaataatctctctgcgagccaataattttgactttgtaatcaaatatggccactgtgattacagataagaacatctcttcaggttttggctctgcagcgagagggtaacacggtaaagccgatttgtttgtttctttgttttcactgagcaagactatcagtgggtctttgcttaaagactatcaattcgcaggtggatgttaggaaacaaagaactgcatttcctcccaactttgtgcactcgctggacggcactcacatgatgatgactgctgttgcatgtcgagaggccggcctaaactttgcaggttagttctgtcaattcgactaatggcctaccaacaaaaaaagaagtattatcttcttattgaatgcttgggttctgcaggtgtgcatgactcatactggacccatgcatgtgacgttgacacaatgaacagaatacttagagagaaattcgttgagctttacaacacaccgatccttgaagatgtaagttttcgataactctctagttagaagcttaggactaaacgtctgactttctttttctgcacatctgccaaaacaaatgaatgtggttttcaccagacgattttcaaatcgtatgtgaagtattttccagcttttactgatcacaagtttatacttacgatcacaagaaatcctgaaacaaagctatctttattgaatatcaacattaatgatgatgctctagttagtacttctttctctaactgtatttaggatttgattgaagcgtttgtatgaattacagcctcgattggcttgttgacattgttgtgttcttgatacagttgctccaaagtttccaagaatcatacccgaatctcgtgtttcctccagtaccaacgagaggtgatttcgatttaaaggaagttctcaaatcacagtacttcttcaactgagtcatgcatgtagcaccagtgaaccatctgaagaagggagcaagtttttgacgcagggatcttccttggtggcctgtaaataacatccaccacctcaaaatgacatggaaagaaccagaaatgtgcaagaaagacaaactgatactgcaacacactaagattctgacataaattatcttgcagcagaagaggaattcagacaaatctacttagagaaattttggcagcattgaagaagtttctagctcagtaggtaggtcctagacagtcttgaataattgatgtaaggtatgagtcatttgcatcaagcttgtttttggagatgagattaggattagagttgtgttgtatctgtcattcgtaatgttgtacagagagagacttcatatacaaaacaagaacacaataacgacgatttagtaagtttaaagaaaatttagcaatgaatgggtcatcaggatttcagggcctgagtcccaaagcccattttattataactacgaatctgccgcttttgcgatttagggacattttctccttccacaagcagtttagggcttctctttctcgatactctctaccaacctcaacaatggcggagcaggtttctaatctcttcttttctatcatttttgtaaaagatcatgtctctttccttttttcttctcctctgagctcttagctccaatttaatgtgtgttgcagacggagaaggcattcttgaagcaaccgaatgtcttcttgaggtaaaagttaacgaaaacatcttttgatttcttcatttccttagagtatcttcacttattacgaatcattttcagctcgaagaaatctggtaaaggaaagagacctggaaaaggaggtaatcgtttctggaagaacattggtcttggtttcaagactcctagagaagccactgaaggtacacaattcctctattacactgtctttaagcaacggtttatttagattatgtcctaatttggatgaaaggtcacttcttttacaagtttcctctatggtttctgaaattggaatgagttatgtgtttatgtagtgtttgagttgttccttgtttgtgaattgtgtaggtgcatacattgacaagaaatgtccatttactgggacagtttcgattagaggtcgtatcttagcaggtacttgtcacagtgcgaaaatgcagaggaccatcattgttaggaggaactatcttcattttgttaagaagtatcaaaggtgacaaaaagatctttacttttagcttccttctgctgcgataccacctttcagtcttttaactttgaagtatctacaggtatgagaaaaggcattcgaacattcccgctcatgtctcaccgtgtttccgtgtcaaagaaggagatcatttgatcatcgggcaatgcaggtgaggacagtaatgatttatcttgaattcattagaatctttgtgataaattacatgctaatagataccattggcttaaaatgatgtttcagaccgttgtcaaagacggtgaggtttaacgtcttaaaggtcattcctgctgggagttctgctatagggaaaaaagcattcaccggaatgtagagacttcttaacttgttgggatcgatcgaattaagagtattttggttttcatatgttgtaattgtcctcaagagaaacctctgttttcatttgtgttagctgaaaatgttactgtttcaaaacgttttcacttacaagtaccattatacataagaatcatcctcttatgtttgttattgttagagctggctttggtttaaaaatcaagtgaatttaaggtagatgtgttgtcttgtgtaaaagatctagatcaaaatgtgtttgaagaaaaactgttggtcttagtgaataaggaaagtctaaggatgttgccaaaatgtgtttgaagaaaaacaagtcttggcaaaaatttagcacttttggaacgacaaaagacacgccttatatttttgaatcttttgtagtcttggataaaatcagcgactttccttgcaactctttagccttttaccttg

SEQ ID NO: 5169 - DNA, 1639 bp, Arabidopsis thaliana landsberg
  unsure (1)..(1639): unsure at all n locations
gcaacatagaaagttataaggtcaacatcttatattgattggggtgcgtttgttaatttgttttgtatttgtacatcttttcattgaaaggctttctcttagctttatgaattggtaagtacaataatacatatttgttctttatgtcgtaatttatgatcgcatcccccggcccctatcataaatgtagtagtacgtaagtggtccgatatgtaaaacgagaacaaggtcccataatttgaaatgtttgcatcataaaatgttttgctcaaccaaatcaatgtagcataagataaaatcaaatcaatgttttagctacgaacgagtcacaatagtatagcgaacaatttatccgtggatcaaagttggcccaaaagggcccaacatttcagtagccggttaataaaatgtaaatcacggcccataaaacaaaggcccaaacccaaataaagagagagatcttcgaaactagggtttcttccggagcttcactacttgagattactctcattcgctttcttttgcctctcgcattttcttcatcctttttgcctcagagctccgtggagagcagcaatcagtagccatggctgagcaggttcattttcattcctttgtgttcatttctacattctgatagatactctttacgattctcattctcttctttcttttgtagactgagaaagcttttcttaagcaacccaaggtcttccttaggtaaattcatctgaacaaatctgagaatcttattacttccatttacaaatcgattcatatgatttatgtttttttttttgtgtgtttcagctcgaagatatctgggaaaggaaagagacctggtaaaggtggaaaccgtttctggaagaacattggtttgggtttcaagactcctcgtgaagccattgatggtttgttgttttttcttatacttctgattatcatttaagcgaaagctccaaactttgatctgaatagttgattcagtgttgtgtattaggtggttaacagtataatctaagtttttctgttgaaaactagagattttgttgttggtgtttagttgaatatcattgagtgtttgcttttgattagatttgaagcaaaacctaaaaatttcaggcatgtttcgtaatcttgatatgtttattgtgtggaacaggagcttacattgacagtaaatgtccattcactggaactgtttctatcagaggacgtatcttagctggtacttgccacagtgccaagatgcagagaaccatcattgttcgtaggaattaccttcactttgtgaagaagtatcaacggtaagtacattgtgatgaacctatgttcttgaacaaagatttaacatcaatggctagaaaagattatcttcttaaattgtgaatctgtgttcttgttagtccaaagatttaacatcaatgctaaagaaaactatattcttatatttttatcagatatgagaagagacattccaacatccctgcccatgtctcaccgtgtttccgtgtcaaggaaggtgaccatgtcatcattggccaatgcaggtgaatattgtgttgtcttatgcttcttatgaantgattttggcagtgcggggaaaacgatatctgattgtttgtgatgtatgttgcag

SEQ ID NO: 5170 - DNA, 718 bp, Arabidopsis thaliana landsberg
agattactcagaaaatgtctcaacaaccaaattagagacttttaaccaaaatcctctaagttctctaaagaatgcaacttttttaacaaatgaagcttcttctagacatggtaaagcaaaattgagagctgagacataaaaacagtaccttcaatagcctctcttggagttttgaaaccaaggccaatgttcttccagaaacgattacctcctttaccaggcctctttcccttaccagatttcttcgagctgatagaacatttgaatcataagcataaagagaccatagccaaaatacaaagcaattgaatttttgaggtgtgacaattaccttaagaaaacttttggttgcttaagaaacgccttctccgtctgcaaacacaccaatccatcattaaaagccaaaatcaaagaacccagaaaacgagaatccaacaactagcaatccccaattataacataaagacaatgtaatgtagatccaaacctgctctgccatggttgaattgcagaaaccctaaaccttgaaatcttctgacgaaaaccaaaaaccctaatcacggctttgttagtatatatatgggctctacttgttttgggcttaattaaggacttcaaattctttatgactatccaatccggttgaaccgatacgagaaccaaaccaaaacagtgttagaaaaccgatctgaaactgaacctaaaataaataaacaat

SEQ ID NO: 5171 - DNA, 1403 bp, Arabidopsis thaliana landsberg
aatagcacacttttaagttttttgaaaaaaatagcattaaaaagttttttagacataaatagcactcaaataattatttgagaaattcttaaaagtaacacaaaaacaagttttatggacaataataataccataattttatataaaatatattcaaccaaaataaattagaaataaatttaaaatattatatttgggttctctatttctaatttagggtatatatttccaactatttaaaagaaattttgattcattttaatattagtttatggtattatatatgggtttcctatttccaatttagggtatatattttcaccattttaaaagatatttttcattttaaaattagtttgtagtattatatttggtttttttttatttccaatttagggtatatatttccactatttaaaatttttttaattcaatttaatattagatttgtgtttgccctcatttttatttggggattgatacaaatggtaataaaaaaactttattatttaattaatttataaaagattaaaaattttatatgatatttttgaaataataaagttttttagtgtcatttgtgtcaatccccccgcatttaatctattaataatctgacttattttctccccaatttagttgacatattcttaaccaattttaaaccggagtataatcaaacttttaaccgccggttcgaaaaaacaatcaatattttcaatctgtctcctaccaatggtcgttaagtcttttcttcttcctcctgcaacctcttcttccctctctcagtttgatttgaccggagtatatggcggaagtacgatcacgatcacggagaacggaggtatccagatctatatcttctcctttgcttcttctgctcgtatagtttggttaaattaggttttccgaattttggggataacgatcatgtgaaatgttgcagagcaattgggctacaatatgctgctcagctttctcgtgtctccagctctactgggcacgtattgttctccgtaaatggttcaatgtttctgcttctgaatcagattatagtgctgatagtgacgatgactacgaagatagatcacaaggtcagcttaaactctgattctccggaaataattaggttttgtattctctactgtgactgaatctgaatttggtgtagcagaatttgatccaattagctctggagttaccaatcctcgtgttgatactgacggtgatgtgatatgtaactctcagatttcaatttttatttctagaatcattcattgttgctaattttcggtgatgatgttttcattagaagaacattattgctcattcagatccatttttcttaatttcagataggcctaagcttagaagacgaaattctaaaactttcagggtgcagt

SEQ ID NO: 5172 - DNA, 468 bp, Arabidopsis thaliana landsberg
ctaaatgcccaacaacacttaaaattgtaatttttatatttactagtctataacgtcaagtggagaggtgaatccatagaaggtagtctgtgcttttggtttcaccacccctttcatgttcttcatcactatccggacccctttcatacactgttcaaatgaaaaccgtcctcacgggaatgtctcacaagatttcacattatcaacaatccttaatagtaagtcctctatctttgcatcacctttcgaatctactctcacaaccttggataaaaataacaagattgtcaactttatcctagccacagacgtctcacttttgaactcttccatcaattcacttccacgtcttttattttgatatcccaggcctcttaaacatctttataacaaacttcacaatgtgcaacttcttataattatcatgggtactcatggcagtcctacccagtcaaaaactcatgcttt

SEQ ID NO: 5173 - DNA, 629 bp, Arabidopsis thaliana landsberg
  unsure (1)..(629): unsure at all n locations
ataaagctgaagaatcagaactcactaaaccaaagcttaagattctacaagacaaaatagcatttgaaatctatcgactatatgaacaacacaatccaagagttccttatctattataacgagttaaaagcttaaacataccatcaatggcttcacgaggagtcttgaagcccaaaccaatgttcttccagaaacggtttccaccttttccaggtctctttccctttccagatttcttcgagcttgataaatcagaaacaatgaacaatataaacaacttggaacttaaatacaatgaaacaatagagaacagagagaaatcgaatcgcaaaattacctaaggaagaccttaggctgcttaagaaaagctttctcagtctgaaaattagtgacagagaaaagagaagagtattagaatcatttgagtgaataaggatcaatagatcataaaacgaggataagcttagaggagagaacagatcgagtaacctgttccgccatggctgatgttgagctcccgcgtgaaagcttgtaggcaaaggaggtaggagacgatagtgcggcagcgattactgaaatgaaaaccctaattgcaagacctctttatataagacattntctacatgaaa

SEQ ID NO: 5174 - DNA, 1406 bp, Arabidopsis thaliana landsberg
tcaccatggttatttatatgcataaaaataataaataattgcatatattgatgcaatcatggatggtgctgaatatattatatagttttaaacacccggtttagtccgaactggttcgttaatcatgtgtcctccaactccgtatcctcctccgtagccacctccaccaccgtgaccaccacatggtccacgtcctccactcctccatatgcgtcaagtctgtggccagtgctgatcaaacatatcttgataccttaagcaaagcttaaaaacagtcctttttatacattatgaaaaatcataaataataataaaatatacattaaacctctaaaaatacactttaacaacaaaacaaatttcaaaaatacacttaaacaacaaaataaattccaaaaaatgttgaaaagtccaattttgaaaaaacatttcacaataaatcaaatttcactattagagatactaattagtttgtatctaaatgcctaaacaaaatcttaaaaggctctaaaaatatatttatggtaaaaggactcaaaataaatttaaagtaaaaagccattaaatattgaggcctaaatctattgcttcaatggcccttatggaccgggtctgtctgtggccccctcctccgttgtgtcctccatggtcgtgaccaccttgtcctccgtggccaccgccataaccttcaggttacacagtttcatcactctctggtgtcaccatgcctacctaaaaataaaacattatttcaaagatattgttaagcatgtacttgcaaaatgttaaatgtgcgttcaataaagatttgaaagtatattaatgcttttttcaaaaaaggtttacaaaattaaatatacgttctaaacataatatgcacacaacttctaaaatggtactagaattccacacttcacttaagtgatgtaaatttatcaaatggtactttactgttggatgattgaaatgtataaaatatttttatcatatatcttgtttctttaaagtagattgaaatgcatacaataattttacttgccgcagacacttcggagatgacgagaagaactgcgaagagacccaacagaagcaaagccttgaaaataagggtaatgtttggaagatgattatatatagatctcttacaaccgacgtaagttaaaactaaaaacgaaaatattaaaagtctaattctataaggaaaagatcagaacataactgcgacaattaagaagcttctactgtctttatctcccttctttgatgatcccatctctcgtatcggtttcatatatttaatgaacttcgtaagtgttggtgtatgcaaaacctcgatagtctctaggtttttagtaatcattttccttttattcctgcaggcttttggtaatcttttaagaaaaata

SEQ ID NO: 5175 - DNA, 1124 bp, Arabidopsis thaliana landsberg
aagccccttgcccttcctacttgtgtcctccatgcccgtggcctcctcctccgtagtggcctccccctccgtgaccaccatgtcctccgtgataaccttcaggttgcacagtttcctcactctctggcttcaccatgcctgcccataaccacatgttatttcaaagacattttaatcacgttcaaatgtgaattcttcttcctgacttcaactttgttttcgaccttaaaatgttttttgcaattataaataagtacataaagtcgaactatagttttaaaaaatatactttcgaaacatatttacacaaaactacaaggattccacatcacttaggttaggtgaagtgtgttctaactttaactaaagtaaaaaatggaaggaccaaagagttggataaacttatcaaattgtacgttaattagttcaaattcgattagctagactgaaatgtataaaacaatttaacatacccgactgccttgcggcagaaacttcggagaccaccagaagaattgcgaagagacccaacagaatcaaagccttggaagccatgtttttcaagatctaataactctcttagtatgttaagtaagtgatgagtaaaatgttacgctgcatgctgtctatttatagaaaacgaagaggatagggaatgagaaaagtaaaagaactactccatagtagaataaaaagtaaataataatttatcaaaattaagcaaagttaaatgtaatttatcacagtataaacaaagtagtaataatataagtatcagagtattatattatacgtgttgcgtctggacccttatcgtccgttgttagattcattgtaactacatttgaaacaacgtgaatggcaactccactagttatttaataattctataaacacagccctggaacaatatcattatattaggttgttaatgtttattttcgttttgttaaagaatgattgtaggacagaaaaatcgtccaccattaatatatttgttaaggatctttcttgaaatacctgccgacagacggataaagacaaatctatatgcactgaacaagagtaagtagagcataaaggagaaatacgtagaagcaaaactactgaggacttactttaga

SEQ ID NO: 5176 - DNA, 429 bp, Arabidopsis thaliana landsberg
atggttgtatttgtacagtaagaccctaagattttgtagtttttgtcctgtctactattgtcggatcccatgggactgaaatcataaccttcataactggatttgaaccatctaatctgtctcagccatgggttgcaaatcccaatcccataacaggttgcataaagaaataacccgtcgcaatattcgacgtgcatgggcatataaagtttataaccgggaatatctgagggcaagttatgcacctctatagatgggccgtcaagattaacgtccaccgagcaaatcttggattcggcaagcaagatgaattgtggacgggcgagacccaaatcactgctgaagaacctcctttccttgaaaagagtgttccatctcttgcaaacacatttaaatcgagcgagaatttgtattggaaggtgagagagt

SEQ ID NO: 5177 - DNA, 2963 bp, Arabidopsis thaliana landsberg
cctctttctggtaacgtaggtgagtccacactaccacagaatggcgatcaaaatgactcgccatgaaagtcccagctccacaggttgcgttagggcactccttcctcaaacgctgaacctttccagatccatcgattttgtaaatctgaagaacagcgagcttaaccttcttatgcttgtgcttgatcttcttcggcttggtgtaagtcttcttcttcctcttcttagcaccaccacggagacggaggacgagatgaagcgtcgattccttctggatgttgtagtcggcgagggtacggccgtcttcaagctgtttcccggcgaaaatcaatcgctgctggtccggtgggattccttccttgtcttggatcttcgccttcacattgtcgatggtgtcggatgattcaacctcaagggttatggtcttccccgttagggttttcacgaagatctgcatcttttgaggcaacggctgctgaagattatcaaaatggggattttgtaggcgaaggagacctctagggtttcttagctcaattacgttactacccttattttatttgggcttagttttgggctttcacagagcagtctattgggccattaagctcaccaaaagttataaaaaaaagaatataaaaatggagatgcagggaatcgaaccctgtgcctctcgcatgcaaagcgagcgctctaccatatgagctacatccccgaatgattctctaacacttttttaactaaatactatcaacgattaatttatttatgtatttgtttgactggccttgatgattaggagacctttgatattcttcttcatctagcccttttatttagcgagccctctttcgagaaccctagatctctcttgctcatcaatctctattgttgtcgtttcgaaacaatttccttatctcgatctcaaattcaggaagagacatggatgatagctgtgccgtctgcgctgacaatctcgaatgggttgcctatggatcttgtggtcaccgagaggtttgctccacatgcgtcgttcgtctccgattcgtcctcgacgatcctcgctgctgtatctgcaagaccgagtctcctatcgtttttgtcaccaaggtgatcacgttttcttaatcactgtttgctcttcaattgcatcaaatagataattcagctagaattttgtaattgcccttctattacaattacataatagtgatgaagttttgaactttatctatcttagctcctttatgtcccccaatgaatgcatatataagggatttcgtgtaaattttttgtcaggcattgggtgattatacaaggacgatcaatgatttctccaccttcccatcagcaccaagggaaggtcgagtaggagctttctggtatcatgaagacactcaggctttctttgatgacttggatcagtacaggatgatcaaagctatgtgtagactttcttgcggtgtttgtgataagacggaagataaacctagagaaggaggaccaagacatcatcgtcagcggattaagagcgtcgaacagttgaagggtcatttatatcataagcacaaattgcatatgtgtggtttatgtctagaagggcgaaaggttggagcttcatatctgcagcttatttgttattatcttctcggaaaatttgcacatttgtttacatctgtgtgtgtgtgtgtctctctctctctgtggacagatattcatatgtgaacaaaagttgtatactagggcacaactgaaccaacacatacagactggtgactctgaagttgatggaagtgagagtgaaaggggaggcttcgcaggacatcctatgtgtgaattctgtaggaatcctttctatggtgataatgaattgtatactcacatgtctacagagcattacacctgtcatctatgccaaaggtaatgccaatttatattatgaattcttactgttgagagtatgtaacctgaatgacttcattgattttaatatccaatataggtcacagccagggcaatatgaatattacaaaaactatgatgacttagaggtaacatcaacaactttcattacagcacaggttaaattgtggctgcatctgttctgattctacatgttcatgcaacagattcatttccgtagagaccatttcctctgtgaagacgactcctgccttgctaagaagttcacagttttccagaatgaatcagagttgaaagtaaacacttttaaagaatttctcctgtatctttttttttagtttgactccatagacttttgttgaggatttctattcttttttcagaggcataacgctattgagcatggaggtaaaatgtctcggtctcagcgaagtgctgcattacaggtatgtaacacctcttgcatgttgtcattgttaatttatggtccagtttgattgcctgtgtttaacaattggattcaactccagataccgacaagtttccgatacagtcgtggaaatgatcaagagaatcgtcgaggaagaccccgatcatttcgtcgcgagcctggtgatgaagaatataatcttgcagttcatgccgctcttcgtttatctgagtctgagtattctcggcaagagcctgctcctccaccctcaagtgcaccacccggattctctgaaaacaacaacatacacgtggatgatactgatccccttattcagccaatggaatctctatcaactacagatatggaaccctcttcacggtatcttcaagctgtaggaagctttggtggtggtggttcacgtcttggagaatctgcttttcctcctctttctgggcaacagagttctggacagaacgtagagagtttaccaactaacaccatggctgctcgtctaagacgccaaacaaatcgaacttctactgcttccgctattgctagtccttctcaaggatggccagtgattaatcgagggccaggacaagcatct

SEQ ID NO: 5178 - DNA, 754 bp, Arabidopsis thaliana landsberg
acttattccatagtttctcctcttaaacttaaggcacttcattacaaacgtaagtgtattgtcatattcacacacacgtaagtgtatatataaatgcaatcgaacactcatggtggttgatatattatgtagatttagtgaccaggctgagtctgaacagcttctccggcatatgaacaacaccttgagcagccatggtaacctttgtagcagcagccgtggcggcagtaacttccccctcctccttgtctcccaccgcctccttggtatcgtcctcctcctccttggtatcctccccctccgtggccaccatggccgcctcctccttggtatcttcctcctccattgtcaccgaatccaccaccatgttgttcaggtttcacagtttcctcactctctgacttcaccgtgcctgtccaaaacaccacagtatatcaaataaatatatatatatatactttagctcttgcaattgtgcactactatacttaatatctattttaaaatattaaaattcatatctgtaaattctttttaaataatttaaaacgttagatataagttagatataaaatttgtgcaaaccataaacaattaatggagattgtttgatatatacgagcaacaaggattcaacatcatacttaagtgtcttttcttacgagttacgagtgttttgacttagcaggtcctaataatttccatggttcaaaccaactttccagatttaaaactgttgagagatcaaccgaaa

SEQ ID NO: 5179 - DNA, 320 bp, Arabidopsis thaliana landsberg
gttgtgggatatccagagaatcattaaccggtgcagagagagaatcgacggagggaaagcactggaaaactgattccggctaaggaagagagatttgaggttaacgagatgtgaaagatcaggaatcggaccaaagagcgagttattctcgagactcagaactcggagctggtcaagacggctaagagtagctgaagagaagtagccgtggagaccaacgccggagagaacaagacgaacgatgcgtccttgtgcacatttgacgccgcgccattgacagtagtcgtaacgctcggagagtgaataccagagcttgttgc

SEQ ID NO: 5180 - DNA, 1454 bp, Arabidopsis thaliana landsberg
  unsure (1)..(1454): unsure at all n locations
ctgcacactgggtgagaagaaaacattcaaactgtcggaaaaagcattaaaggcagatttggattttaaagctagactcaacaagagactaagaaaccgcgttgtggacagcgatgaatttgtcaagtttaataacaaccacgaagcggcagtaggatacaaaggtaaagccccaaagctgatatcaagttcaagcttgagaagctattccccaaagcctttccttgctagacacttctctttcgggtccagaagtaatagtgttaaatccccaaaagagattcattccgcgagctctcttagaaagaaaggcttcttttggaccaaatctagcaaaatttgaaactgtaagctcctctctctctcatgaatctgaactcaaaataacgagtcactctataattgttgaatcatgtttcagaatctggatgctgtgtctcttcttagttcgtaagctagggccgaagtcaacgtaacgttttacttatcaaaggtacacacttgtttgtgtatgtattacagaaaagtttctcactagtctcccattatttttttgtttgtgcattcccaattacacttgtaaatatataattataataatataaggtaaaagtgatctggctgtgcaccagtaggtgtgaattgggttaatcagatcgagggatttatatttatatgttttggtttatttgatgtgggatcgtattatacgatttttatatacttctacaaaccatttctaaacaaatgtttcagttcaaaaccaatctaaacagatttgtattatgatccaacgttaacttccatggttcgtttgtttagtgctttatgaaattagttaccaacacaaacttgcacttaccaatcagaatacgtcaagaatttaaaactcggaacaccgaccttctttagcggttctaagccctgatcaaatccacatgtgtccatggaacatagaaagcaccgtacttaaaagataacgttatctaccgaatctatcaaaaaaggcaaaacgttattactatgtcggattcgtgacgtacacatttcaaagtacacacannnnnnnnnnnnnnnnnnttctatccgtgcgtggcaaacatttcacattaaatacgccacgtatcatatccatgcagattaacatgtctaatatatatgcatgcctacttgaatcaatctcaaaccaagttttcttctaagctgtatttgaaagggtatatatttcacacacaaaacagatcagaagctaaaaggtaataatataatggcggatttgagggacgaaaaaggtaacccaatccatctaaccgacacacagggaaacccaattgtcgacctgactgatgagcacggtaaccccatgtacctaaccggtgttgttagctccactcctcagcataaggagagtactaccagcgacattgcagagcaccctactagcacccgtggag

SEQ ID NO: 5181 - DNA, 5148 bp, Arabidopsis thaliana landsberg
ttgacccaccggttgttttcataagctaaacaaatgtgttcttcttcttcaccacaaccaacctgcatcacatatgttgagactgtaacagagagatacagaagaacaataggacaaaaatttgggatcctgattaagattttaccattgaaactagtcggtagttagtgtttggttctaagcctacgtatagcctgctgatatctatctcccagtccaaagcctttgttgtttcagatatttctttctcagtttcactcttctcccattccaagactaatgttgtaaacccacaaaacacaaacaaagttttattataagcattataagtgaaatgtgtacataagaaccgaatcatggtggtcaaaacttaccaattgtgaaggcaggcgggcatctacttataaagtgatgaacaaagtttgactctccacagcctcctgttttaatgtcgcatgacttttgatattccatgcggatcacttttagaatgtccacaaacttcatactctcaaaagcacactgtatatatttaaacgtaagacaagtttataagaggaggtaccagtttctgaaggaacaataaagagagaaatcaatgaaacataccttaagttgtctgattgaatctgcaggcataacaatggcataagaacttttctctggataatttgtaatccatctgcattttctgcaactcattctttcattttccgccaacgtaaaaagtcgagttaccaagctttctccttctggatttttccagcaacaccaaaacttagggatggctcaactcaccttagcagcatcactcgactgcaaagagtaagaattagaatacctttagattaacaattaagcttatgacagaaacaattaataatataatgcttagaagcatatttcttcacacaaaccatggaaagaaattcttcttgggaagtcagaaagtcactcaagaggcaactgtagactccctcatcttgaatcgcttctgaaacaacagcagtaaataaattttgtagtgcagtaggaacttgttcttgccgctggtcttgaatttgttgactattctgcatcaaatcttctttgaaaatcttaatactcaagagggcctgcgatataacatgtttttgtgagttaatcaaagagaatgaggaagtaaagagatatggaatgaactaatcagaagacgagagtttaggtattgaatctttaccttcagcgtcatgtcaaatgctgaattgtatctggttgtagcttctccagctactgactccaaatgttccgacagtgaatcttctccaggcatgtttcgcatatctttaaaatggtcaatgaaagaaataagaagttatgaacctcacaagaatataattcaaattattgctcaaatcgagaagcttttaactaccagggtcatctttagtagcttccacttgaatttcagttttggatgaaattttcaattgacccgtctcacttgcaagagcatcttctggttccatagaaccttcttcgatcgttcttagtgatgaagatgtactctccggtttaaggttgacagaaggtttactgtacatgtaagaaaacgttttggtcagagaaaacgcgaaaacaatttataacatgcgaaactggccattgaggtacttactgttcaacagtcttatcaaggggagtagacaagctcgttgaattcctctgttacgccatgaagaccattcattcttacaaccgattatccgaaaaagttagagaagcaaatagagaatttagaagttgaaagaccttattgttttttttcttctttgaccgtgacttcttctcctcctcgagtaaaagataagctgctgctatatctgacttggcgttggattccatattcacaatttcattctagataataagatacatactaacatataagaaacaattcaaaggccaaatcagatggtaaacaaaagctctctatatataaccgaagtttcagaccaaccagtaagaaaggtttcagcagtcgaaggatataagtgcggttgtcaaaagcagaaagcctggtgaggttggttagcaaagtaatccttgaattatcaatcagcaaaatcttagaatcgattagtagaacctgcgagtcatatagatatttttagatgggctattctatgttattatgttgtaatgaatattaacatcaaacaaaccttgtgggtgaccactgatttcaggtggtgaatggacttcaacgctatatcatcgccgagacttttacgctgacgtataagattcatgcaatcttctgaatcgaggaaatcaaatgtcggatgcgatgctccttggagaacatctcgtactgcccacaagaaaaaatttgcagtgatggaattttcggagactctctcttcacagctatcgcatagaagagatgcatatttattccactgatcttccagaagattctttctcctttcatcttcactcatacacaagttctcaacgacagtaagagctgcatcataatctaagaccagatatttctttgcatatttttttcccagcagtcctacaggtgaacttaacagctttcagaacagccaaccagatatcaagattgtgttccctgataggtctgggaaaagtcttatctactgaattgtagtcagttaaccaggatatgatatcatctccctgagctggtgccttggggtagacactgggatcaaaaacattgattgttccttcatcattgattggagcattattgcttttaagcagtcttctatccagaagcagaaatgaaaactgagggtcaaagtcgatcttttctttaactcgagtacgacccaagacactgaccactgctctgcaaacaagatctgtaccatcattccttttacattagatgtggtttagaaactcaaggatttgagtgagttcctgacattccaaaaaacagatactatgaggtgtttccactaagcgagaatcgacaagactctgtgcagagacttcaagtttttcaagatgcttaaccggaaaatacatcatccagtctcgaatgctacaagaaagaattttaaggtcccaaagagacacaaggagcaacttgatttccttgagtaacttactgcgctcttcatctatagctaaaggccagtctttggaccatccattctcatatgcaaacgctttcacatcttggagccgattcttaatcatctcaacggcagctgcagcatccactggatcccaacctccaacggatatcttacgaccccagactttacttaccgtctggggcatatcctttgtcgaagacggtttaaattctgcagcatgttcttgtccaagatgattcttacactcctcaggactggaagaagttctttgaacaagttcgacacatccagaatctccattttctgttttccctggcaaaagtgagaaccttgatccaaagcatctcgtccctctttcccatacattgcctcgacgaaacttataagctttgtaatctccattttcaggaagttccttttgaactcatcatccaaacctctccaaaacgacctcaatttcgagtctggatttttcttcgactccttagcttttggttcgcttcttacaataggagaagcaactagactcttacctccagcgattcttgactctgcatcttcgattattctttcgacatccttttgactcttcacctctttcggacccaattcatctaactcagccaaaacagataagtactcttttgctttctcaacagatttcttgtaatacatagacgatccaagatgttgacccatttcaaacagtgaaagagcagtaaacgatgagaacccttcactttccgcaaaacattctacagaacctaacaaaaacgtgaacttgacgtaactgttctctgttcttctcgcttgtgccctaaagatggaaccttgctggaaatgaagtaaacccaggaggtcattgcccttcccttgtttcaaaatcgaatcttcaataatcaccatggcctttatgtgatctcctccagcaaagtaactttcgtccaatcgacaatcttccagagaaggaggcttcatgtttgggaagagtgacgattctcaagcttcttgcgctttcttgttttacttgtgcgagagaaaactgaatggtagacgcgggaaaatcgacggtcatgtatcagtgacgcacactttatcacgtgagagccatgtgacaagagtttttaagaaaaataacaaccaagactcattggggaattgtgtcgaacaccttgtgagcattcttctcttggactgctttgttgtaatttgtccttctcgtaagtagatagtgaacaaatgagattttcgaatattcatgttcaggatcaaagatatgtgatgatcgaaattgcttggtatattttttgagtttcgagcttcgagttttgagagatccgtagaggaaatgggtttattttatatgttctgagttttggctacgggttaagatgaaccgattctcaagtgttaacatttgtaatgaaccggtacaggttaaaaattcaggattgtctctggtgtttttatttcttacactaaagacatttatgtatatatttttttgtatgagaaggcatgaagtgatatcacgaatcgatataatcaggaaaaaatggattgtgcccaccaagtgttcgacaaaagttcacaatactataatacacgatttaggatttctctgtggaataattttcgcgctcaattcttaacagatcacgtgaccctcacgtgaacaaaccaactaactcctaaccctataaatccttctcttccacgcttcctcattttctctctctctgtttcttttattttctcgagaaaattcagatagaaaatcgccattgttgttcttactatcagtcccagcgagatcatggagatggatctatcagaggttaaagaaatggagaaagacgaagaaattgattcgtaagtagtcaaatctcatttttcgagtatctttatgcttttttcgttcgattttctctgagaattttctctccttggtgtttaataagaaatctctcagactcagatacagaggagcctgaagagaagatactgaacgccacttccatttaagctc

SEQ ID NO: 5182 - DNA, 3789 bp, Arabidopsis thaliana landsberg
tatgtttaacctagaagcgtgactcagaataaaattttaatcacccaaacatagcgtttacaaatttttataacgttatagaaaaaatgagggttgtttactatagcataaaagtataaaacgctatttaatctactaatcaaatcaccactcaggaaactgtctctgctccagcatcagaaatagtaatagtgaaggaacaggatgttcacatgaaggaacagggtgaatggttacaggtttctccttctaaagtaagtcgtagcccgagcaaaggagcagaagtagaggaatcaacattggtgtcagcttccaaatatgcagtcttgagtatggatgaagaggaggaaggcgaaatatttgaaaatgtgggaaacaatgtaaagaatagcgctacggaagaggcaaatgatgcagaaaaaaagtttgtcgaggagacagagacaaatgataagccaaatgcaacacatactcactcaagaaagaagaaggatgttacggtgacttcgaatcaggcaacaaagaactcagttccaaaagttgcaggcaagaagtcacaccgtaaagcatactaaatgtcgtgtttttcatggaatgtgcgcggatttaataaaacttctaaacattctgtggtccgtcactggacaaacaataatgagatgcaatttggatgcttattagagacgagagtcaaggaaaagaaggcaacgagtatggtgtctacagttttcaacaattggtcttttatggcaaactatgagttcaatcagcttggtcgcatttgggttctttggagatctaccgtgcgtttaactccaatattcaaaagtgaccagctaatcacatgttctatactaatggagggagaagaagatgaatttttctgttctttcatttatgcaaagaatttagcagaagagaggaaagtattatgggaagacttgaggaatcaccaggattcgccattgtttagaaataaaagatggctgcttatgggtgattttaacgagatattggatggagtagaacattcaaatttcgaaaccatgcctactattccagtaggtatgagagattttcaagaggttatcagagattgttcactaatggatttaggatctcatggtctgttattcacttggaataacaagagagatgagggggtaatctttcagaagcttaacagggttcttatcaatagtgaatggctcaaccactactcacaaggctattgcgtttttgaaccaggcggttgttcagaccatctccgctgcagaattcaaatccaaagagagaaagtggtaaaaaggaaaccgtttaagttcacaaattcaatcgctacgatgctagagtttcaaccccttttgcaatcttattggcaagatacaccaaccctgtttcactctacttctgcaatattccggtttgccaagaagctcaaaaatctgaaacctcatatcagacagttaagtagggagaaacttggtgatttgcacaagagagtaaaagcagcttttgaagatctatgtaagaaacagagtgaaactttgtcttgtccgactgatgcagcatcacaggacgaaacagaagcttatagaaagtggtctcatttgtcagagctggaagagtcatttctaaagcaaaagtcaaagctgcattggcttgacgtgggggataaaaacaacaaaacgtttttcaatgcagctaagttacgggagtcaataaacacaatccgggaaatacaatgtgaggatggaacaattgcatttagtcaagatgaaataaagaaggaagtagagcattttttctcggatttcttaggccatgtacctttggattatgaagaaatgactgctgagactttggaacattgtctacctttcaaatgtattgaggctcaacagataatgcttgaaaaggaagtcactgctgcagaagttaggcaggttctctttgcaatgccagcgaacaaagctcccggtccagacggctatacgactgaattttttaaataggcatggttagtcattggcgatgatttcacgactgcgattcaatctttcttcattaagggtttccttccaaaaggtataaacacaacgatccttgctctgattccaaaaaaagaagatgccaaaataatgaaagattatcgaccgatatcttgttgtaacgttctctacaaggttatatctaagatattggccaataggttgaagcttctactgtcggagcttatctcgccaaatcagtctgcgttcataaaaaacagactcttactagagaatgttttgttggcgtccgagattgttaaagactatcacaaagacgacatctcccctaggtgtgccatgaagattgatatttcaaaagctttcgattcggtacaatggacttttctgctgaacactcttaaggctatgcacttcccgaccaaatacattcactggatccatctctgcatatcaacagctacgttctcagttcaaatcaatggtgagcttgcggggttttttgggagtaagagagggttaagacagggttgttgtttatcaccttacttgtttgtgatctgcatgaatgtgttaacccaaatgatcaataaggcggcaatggagggaaaggttggttatcacccacaatgtcgcaatgttcttctcacgcacttgtgttttgcagatgacttaatggtttttgcataagggacaaagaagtcgatcgaggaaattatctctgtttttgatggttatgcaaaatgctcgggtttgagaattagtattgagaaatctactctctacatggcagggattgaccctactactcaagctgccattcaatcgagttttccatttgcaacaggtaagctgccagtacggtatttgtggttacctttgatgactaaagctatgtcagctcatgattatcttcctctagtagagaaaatcagaaccagaataagctcttggacgtgtagatttctatcttatgcagggagattgcagttgataagagcggtcttgatgagcatcacaaacttttggtcttcaacattcagcttacccggcgcttgtattaaagagattcaacaactttgttctgcttttctctggagtggggctgatttaaatctttctaaagctaagatatcgtgggatgtagtttgtttgccgattagagaaggaggactaggtcttcgacctctcaaagagacaaacaaagtttgtggtctgaagctaatttggcgtttatttgcagcaccaacgtctctgtggagtaagtggattcatgcctatttaattcggaaaaaacgttttggacagtcaagggaaattcatctcaaggttcttggatgtgaaggaaactcttaaagcttagagacttggcaaaggatttctatcaggttgaaataaaaagtggcagagggacatccttttggtatgatacatggtcctctttggggaacttatttgatacttttggagatcgagggtgcattgatttgggtattacaaaagaagccacagtgggtgacgttttggcctctcacagaggtagacggcatagagtggagactttcaatagagtggaagaagtcatcatggaaacaacgttgaggaggaatgttgcataggaagattcgttctatggaaatggaagacagtgttttagcacaacttctactcatatgaaactgtgaagatgctgagagttgaactatcaatctgcagatgggcgaaagagatttgattctaggacgctacaccagagttctgtttcatcacttggctt

SEQ ID NO: 5183 - DNA, 994 bp, Arabidopsis thaliana landsberg
atatacctcatggcagtgagcaaaagttgttcagcatcaacatagttactgttttcgatcaaagagcaagcagtattataagccaattgataagtagtcggaggtctgatcttcaaactctccaatacttgagaagcttttccggctctaatcaacgccgcgactaaattgacctctatcaatttaatcccggacttgttcagtttctgatacacatccacacaagcatctactttccccaaacagttcaaaatctgagcctctaaaagcaaagtctttgactctctctcgagaccttttaaacacaccaaagcctcatctaacttgttttcacggtataaacaatacgcctatcaagagaaacatccattagaccccaaaaaactttcaaatcttagcaaaattactataccttgtgaaaacctagatcgattggaaacgagttaataacggagagagcaccattgatcttaacgtctttgattagataatcatcgaacttatcgtcttttatcagtgccacaactttgcatcggatcgcatcctcatcggtaggtacaatcgacaaaactgtaaacgaaatcacggattcaaattttcaccaaaccaaaatcaacgagtaagaaggaaagtgagaattgtggaaaccttgatcagcgaccttgacggcttcttcatatttagtatccttgatatgtttgtggagggaagtgaagagatgttcgattgctggagtcgaggttttggggttttctttcgatttgggagccatggctgcttcaaggtttctcagggcacgaaacaacagagaagaaaactggcagatttttgactctttaaaaatcaacagattgatgtttatatactacctgacttcaatcaaggtctgtgaagatgttcctaaaataacttatgggctttttatatgggccttttctgctcatgattcaatattctttttacttgaaagtataaaaagagattaaagaactat

SEQ ID NO: 5184 - DNA, 290 bp, Arabidopsis thaliana landsberg
ctgagattagagatccattcaaaggaaataaaacttttatttttcttaccgcaaacggcggtgagacgaaccagcacccgaagacccaaaggaaaaaaatctcataaagaaaggaaggagatcgagatcttcaatggtgagaagtatgcatctaaggcgttgaagaatcgaatagatctacctctggcatggttggaacgaccagaactaaagctgttgatgaaggagtaaaaaacaagcagcaaatcccgtagatgaaaggatttagactttattgatctagatttgag

SEQ ID NO: 5185 - DNA, 1798 bp, Arabidopsis thaliana landsberg
  unsure (1)..(1798): unsure at all n locations
gactcttatcaacgatcgccggctaattggtcaaatcacccatcgnnnnnnnnnnnnnnnnnnnnnnngactccttcttcatcgttttatgctgacaacactcaacatggtatgatttaaatccctttttaaaaacaaaatttggggtttaacggtactgtgatggttacagaactttggatttgaggattgatcaatttattcttaggacgattttgattcgttttggtttgatcttagttttaacgcatgaagattatgtatttgcaggaaatagtggtcttcgaggtgaagattcttcttataaagatatgttatcaccgagtggattttactcttcaagggaatcatcatctgattttgtgtcacttcctcccactgagaatttctcagagaggcaacgtttgaactttgagcctacctacagctcagctaccttagctcctgtgtcttcttatgcagatatgctaatcagaaattctcaggactcattctttactcctatcgcgtcatctggtgtttactcttctagcaatgctgttgatgagaaacgtcctggatattactttcttggctcagatagatctgaaactatgaatgttgtctctgcttctcgtgtggagccttacatgtgtgatacagattgtaatccttcttttccaatgccgaattttataacacaagctctctttgatggaagtcagactgggcttcgtgtaggagatgggagatcattcccgagcaacagtgatgtttgtagtcatgcgcctcagaattttttaggagctcaatccagcttgcagagttcctctgttgaaccagttaacttcgatgtgttactgggatatggtgaagctactggtcatatcaagcctttgcccgagaatccaaatcttccctatccggtagttggctcgcaaggttcgagaagtccgcgatcttcctaccccttaccatctattattaattcctctgtgtcactgattaaagatgaagtagaaggtagtggtgtctcctccctttatcagaggccttatactttggttgctgacagtgagaatggtgtttctgagagctccttaaagaatgcaactgaggatttaaattgtcacgagcctcgatcttggagccacttcatggtaacctctgagggaccttcagctcccacgatgttttctatgggaagtgagtcaggtggaccttcagctcctacgatgaaagcgggtaatgagaatgctcagtcagctggcaactacaaaccccctttcgaaggtagtactactcaacctagtgaagatgttccaaccaaccaagagtcttgtaatctccagaaacaaacatttgatataatggatagagataagaagatcagatcgttgacagatgtggggctcgatttgagtagtagatcaaatgcagatgatgtctcaactggccgatcacctgaaaggcacttctgtgatcaaggagatttcccatctccaacttcttatccaagagtttcttctgttgttaacgccatgcataatttgtcagaagtgcttgtttatgaatgctttaacaatggaagctggctgaagctggagcaacttgagaaccttgataaagtagtagataatctcacaaagtgtttgaagaaaattactgataataagacaacagcaggggaagcaacacttccaacgcaatctatgcatgtcacctgtccaaacgtggttgaccttcatgaggaaagctgcagttttaccccggcattttgtgatttatagcatagctaggagttaaagaaaaaataggt

SEQ ID NO: 5186 - DNA, 4113 bp, Arabidopsis thaliana landsberg
acccgcggctaagtgagcgcttgttcctccaatgagccagaactgctcgtttcgccaccattcctcgagtgagattcctgaccatttgatctcgaggagagcgagtaagcagagcgtaatggagatgattaagaggtagacaaggaatgtgacattgagtgtttggactatgaactggcctgagaatagggagagagctgggaggaagcagtagactatgaggaagaatgatgtgaacggatagattccaacgtttaggtaagcgattctctggaggattttcattctcgggctagcaaagaaggcattgtttcttgagaagaagatctctaccgagccagtagcccatcggagaacctggtgaagcctatccgtcaagttgattggagctgtgccacggaaagcatcccttttggtcacacagtaaaccgatttccagcctcggttatgcattctataacctgtgaccacatcttccgtgacagatccataaatccaaccgatccgagatccccactcggttttatcctcgtaccaacaagagatgacggctatggcttctgccacagttgatgcatcaagaagctcgcgaggaatggtgagagctccgggtggtcgtccgttttgcacagctgggtgatccgcaagaggacgaccttggaactcggcaaccgggattgaatcgataaggaaagtggagtttccgaatttcttcggaaccaaagaaagattcatctcttcatcatcatctgagtcaccacccattctcaaagatcggttttcttctggcacacggcttttcttcttcttgcgagagaagcagcaactgcagaatccgggatggtgttctttagcccgaggtggatcgaatccgtacaacgcgattcttctaaagagacaacccgttccgacataaacaggacccatcaacccatcaagagctctcatgttcacatcaaagaagactgtgttgtgattcgcataacgatctgatgggtcaataccttcaaaccgttgtgggaactgaacgtagcaaagccggtcaccacctcgatccatcatgaaacacattccttctcttaaagcttgagagttgtatatgtaatgatcacaatcaagattgagtatgaatggaccgttggacataattgcagaagctcggaccagggcattcatggctcctgctttcttgttatgatcataacccggtcgcttctcacgcgaaacatagacaagaagcggaagacgaatgtcaacatctgtaagatctaagaacccttcagacactccatgtaatggctcatcacttggcggcttcaacatcacctgcatttatcaaaattttgaaaaacaatgatcttagagttggcatagaaactgaaccaaaccatattgcaagcaaaataagtaaacctaaagtaaccaaaatttgtcaaactaaatcgaaccgaaaatttgttaaaagataattcacaactgaaccaaactccggctccagttcagttatgaatgaaataaaatgcccttaaccaaataagtataaacaactgaacttaacaaattgtacctgaatgataccagcatggtcactacgggaatggtcaggaccagaatttatccaagttccaggccaatgagtaccatcagccatccatgtagctttaggaatcttgactggctctactatctcttcatctctgttttgtctttgcagcttcatggccttaatctcttcccttgcgtgataagcatcagaacggcgcctgatcgagtcaggcaagctgttgatcctaaccttaaactcatcatactcacgcttcacccgtcttcgatccttaacaaaatcagccttcactttgttcttgtaaggatctcttttaagactaaagtatgaatccggattcctcggctcgatattgtgtttacgacagaaaggaacccacatgtttgcaaaactcgctgcttcagccatggcttcgaatgtcaaaagcgctcctccatcatctgatacatagcaagcaagcttttctacagggtagtcagcagcgagaatcgataaaatggtgttggaagtgacaagaggaggttctttctctggatctgctgtagatacaaacatatcgagtcctgggagatcagatttcccagtcgggttgctcggtgtaggtgtttcaaatttttctttaagaacattgagatccgtagctctgttaatcggacacagctttggaagctgatcaagtagccaagataaggcgaaccaaagctcacaaaccacagacattccccatagccatattgcatctgggtttttgtgcttaatcctccacatcaagaaaagcgcaagaacaacaattcggataagtatcaaaagcctgcaagagaaaaccaaatttgtcagtaaagtttgaacaaaatggcgatattttgaaataagaacaaactttttcacctgtaaggactaataacagctgcaggaatctgcagtttccgagtaagtggtctccacggtctgctcatcagatcctgcggccccataccgtggccattcccatccttgtcactcccgaaattcccgtcttttgtccagaaagcattaccgaaaccgtaagtcccactagtctcaaacaaccatctattgtgatcaaaatccccggtttgactcctcatcaaaccagacttagttgacttcatcaatgacaatctcctgtccatcttggacccgcccgctggtggcggaagcataggccgttgctgcttgttgttatcagcaaaatccgccaaatccgtgttcctgtaaggctccttacacccgggacacatcccaccggttttcacagcatccataaagcaatccctacagattttgaaatcacactcacagggaagaagatcttgacctctctcatcactcatcaccttgacatcacaaccaggaaccgcgcaagaagatcctttagcacctgccatctgcggatggctagtctcagtatcgatcactttttccataagatgagcccgagtgacgctgttaaaaccgcccgtgaacaaggaattcgagacatactgctcctcaaccttctgagagatggacggatccataggttggttatcgggagttgggggaatgtgaaccgaatagccagttaaatcaacacttccaagttcgctatcgagatcatctctcgagtagttgacatatcggccagagggagtcctgcgggcaaatgtcacagaatttgacacaggctgctggtgcctctcagcttcagcagcatcagagtttgttgatagattggatctactgttcatgaaatgattattagacgccattgtctaataataacaatatccaccggactttgtagccggcagatccctgaaacaaagcaaaacagtaatattggtcaaatcttctactcattgttacaaatcacacaagatcataaactccaaatcatcaagaggtaccaaacagatcagcaatagatctaagcttaaagaagaagaacaaatctaatcataaataaaccaaaaagacgtcaataaaagtaatgataattgtcaaaatcataaccccaccaaaagaggagaagcttaagagggaaaatataaaccactagctcaatttcaaaatctcaagaaacgaacaggatccttccacattccgagtataagacaatctctcacacaaacgaaacaagagatcaaggatggtacagtacctgagagtctgtaacagagcaaagttaagcttcagatcttcttcaaccgataggtattttagacagagagagagagagaagaaaatgatttcttaatttaacaaatcgattgtgaaggaatcaactgtgatcgtgttgcccaaactaattaaggagaagaaaaagaagagacgaggaatgggacttagtcgtgagcaaatacatcagcactactactgctttactaatacacgttatgatggcaacgataacccccaatttttttattgtggagatctctaggaaattattaaaataataataagaaaatcgaagaagaaagacgaggatgaaagaagaagatgtattagctccctgattgctttttttttaactgaaatagtaagaa

SEQ ID NO: 5187 - DNA, 3611 bp, Arabidopsis thaliana landsberg
agatgtctgtcttagcgatatcttctcttgcaactactctcatcagaccactaaacggaaacgggccaaaccggtcaccggttcgtaaaatcctctgcctgagccagaatagacagagcaaaatcggtaccggaaaatcatggatcgtcccagtaagtctctcgcttttcggttcaggcttcgtcttgggtcctcatctcgatggtctccactcacgtgtcgatctcgttgtttaccaaaacggagcttttcaaatcggtcctcttcatgcaaacatctgggtaagataaataagcctcaacttcaaaatcttttcacaacttcatacaaacattctgtttttgatcaagtgatgtgttgttgtttttcaggtaccgttcttgcttggcttattttactgtacagtaggttttctacaactcctattggatgagacaacctctacaagtcctccacgtggtagcctggacaaaaccgtaatttcactcttgtgagtatgtactatgtaatactctagcttgttgtgtatgacaattttgaggacagtggaaatgagacaaactgaaactctatatggttttggtgaatgaaacagagcattgatgttcttcttagagctaagtgctgaaatgtacaaagctggagtttcagacaacatagaagcttacattctatttgccttagcagaatttatttggttctctttggatagaacttggattggcttcaccattgccactctccttggtgtcgcctgtcctttagctgaaatccccatcatgcagtaagtaaaccgtgcccttcaacaaccatctctttgtttttttaacagaatttaatctaaagattgtcataacctggtttaacagattcttccatctgtggtactatccagaagcaaacatagaaatctttggccaggtaataagtgtttatacagacatcatcaaacaaaaacatacacatgactctgtttctttcttgttttgtttgctggtgaagggactggttacgtggacaacaacttgctactttgtctacacaccgttcttgatcaacctggcaagatggctaaggacagttatggagaggacgactattgaagtagacattagctcaaacaaagagcaataatgtttttacataatatagtggctttcttcatgctttctagcttgtaaaggttacattagatatgtccttaaacttttctttaatcgctgcctgtattcccattccaatcgactccggtccaacatattttacaacgcagtcctcgccttcaaccgataaaacttcaacacttccgccatagttcttgatagctggcctcagtatatctagatgagcattcactgcctgcaagtttgcaacccaaaaccagtcaaaggcaaacacagaagaagatatcaacgcgaatttcttaaaaagaagcctcactcacctccacggttatctgttttacttcttcatcaaaaacttgtcgaatatctttcaatgcatctccaaacttttccttgagtaccctctctattcccattgtcatagttgttgaagaacttggacagctggtacatgctcctaaacatacaacacaattcaacataagctcgattacataacatgagagcactattgctgctgcagatgatctctctgcactctaaaaaggaaaaaggctagagatttggaccaaaactatagtctacaagatattataccaagaacagtaatcagccaaactaaagttgtcatgtctcaagctcgaatctagagctctatagaaaatagaaaacctaagactggtcagtgatagattccaacaactcaaaccccaaaaagtttctctcttgtcgaacgaaatcagcagaacctaactccaatatcctgaatttttgtatatgaaatcaaaacgaaaactaaccttggagcttaagagagactaccccatcttcaacggagacaacgtcgacgtttccaccatcagagatcaagaacggtctaacatcctcaagcaccaaatcaacgttttgaggcgtcaaatcaaaagtctgagctgaatataaacctgaagatacaccagatgctaaaggtgatatcttttctccttgactcgaaccacttatcgcagatcggtgaaaaatcgccgttctagagatatgtctgcgtttattcgcaaacaagacggaactcgggttttgatcagagattacaggaaacccattcctcgtcgaagatgatttaaccagaattctgaagcttccacttatggaagtcgcgagagaagccatcatcgttcgataatttgatccgttaaccaaaacaatcagaagcacgataaagaagaatcaataaattgcggaatagtccttaaaattaatgagttttttaattaaaggatcagatcagaaaatgtaaacagtggacccaacaaatgggccgatcgatataaatggcttttactatgacgacccaatccatttaaacgaacggagacacgtgtcggttaccaattttttcgttctcctttaagtgagtgagtttgacttttcttttatgttggatcaatcaattaaatccatatttgttttataagactttgcttcttccaaacacaacagttgcgacagtgatggccacaccacccaccacagacatatttgattctgtccaattccatacgggactaacacaaatgatttctgctgtacaactttaattttcttttaagacgaaatataataacatatcattcattattacacatacaaaaagtgtaataattgacttaaaagtctatatcattttgtacttttgtaactgatcattagaaattttataactcaagtgtcgattgactaacttttttatcgagtacggtatattaagaattgatttttgttcacttcacatgcaagctcacatggtttctactagagcctaggccctagcgaacgtaaacgaataactttacgttttgatatatagaatatatgtattttgaccaacgaatatgccatagttatatatgagtaaataaacttttagttgacaaagaaaaactaaactataggtcacatttataaccaaccagctattagcctattatatatacaagaccattcatgcttgtattcatgatttacaataagtttggttacattatttaggctagaccgttaaaaacatttatgatgcatgtgccaaccaaaacaatatataaaaatttaataaaaactttcaacttgtccgaattaatatagatgattcgttacattattcgtggaccattgttttatatatgcactagaattgcatgaaaggcaaaattgtctgacaaagattttggatatgatatagaacatatatgtgtacattaccaagaaaaaagattgtagttacatatacgtagacattattaataaacaaatgaaataatcgattggttacttacatacccaaagaaccgaactcactcactcatcaaatcctataacaaattttaatttttcttaactactccattattaccggccaagatcaaatacttgtcttttctagtgagacttgtgcagtcgaaatccaacgccttcccaatatcactctgaaca

SEQ ID NO: 5188 - DNA, 1419 bp, Arabidopsis thaliana landsberg
atattataaagttctgatgcaataaattcaaagcatgcatagactacgtacgacttggaaccggtccacttcaactgatatatttcatttcctaatgataatctccccctaatcctttcttttttcttgtcataaacaggaaatttacttcgtcagaaattcagacaagaaaagttggcaaaccctaccacaagatcaataccctaaaccattgattttccacgatggtcgtttagccgttaagccaacacctttaaacacactcgtattattcatgtgggccccattcgccgccgtcttagccgctgcaagactcgtcttcggcctaaacttaccttactccctagccaatcccttcctcgccttttccggtatccaccttactctcactgtcaacaaccacaacgacctaatatccgccgacagaaaaagaggttgtctctttgtgtgtaaccatagaacgttattggacccactttacatttcatacgctctaagaaagaaaaacatgaaagccgtgacgtatagtctaagcagattatctgagcttctggctccgatcaagaccgttagattgactcgtgatcgagtcaaagatggtcaagccatggagaaattgctgagccagggagatctcgtggtttgtccggaagggactacgtgtagagagccttacttgcttcggtttagtccacttttctctgaggtttgtgacgtcatcgtacctgttgctattgactcacacgtgactttcttctatggcacgacggctagtggtcttaaggcatttgatcccattttcttccttttgaatcctttcccttcctacaccgtcaaattgcttgaccctgtctctggaagtagctcgtccacgtgtcgaggagtccctgacaatggaaaagttaacttcgaggtggctaatcacgtgcagcatgagatcgggaatgcgttggggtttgagtgcaccaacctcacgagaagagataagtacttgatcttggccggtaataacggagttgtcaagaaaaaataattgatttgagtagtttattttcttgattagggcctttttgtgtgacgtacactttatttcttataagattttttttctatgatgtatctatctttttttagttaaatgtaattatctaattgtgtgaccaatacgatatgtatatgtacatgtgttattgatatcatacaacggtctctggacgtatattattaatagtgaacactccaaaatagtttatatccatatatgttcaatttaaatattcggagttaaaaatttcgatgatttcaagatattaattaagagtggaactcatggcgataattgtggagttagagtttgtgtgtcaaccctacgcatctccccacctaactatatctaatgcttcttcaatcttttgatga

SEQ ID NO: 5189 - DNA, 741 bp, Arabidopsis thaliana landsberg
ttcgaatcgggcttgtagactcgtctttcacggtttccgaaggaatagtccgcattgtttatgttctaggttaaggtgcaacgtacagaccgatttccatatcataaaagtcgagaaaggaaggccctctcaactcatactaagaggcgcgttcctagccacagcgggcgctataatggattggcttaatcaaacggtatacttcgccaatattgttgacgaagtgtttcacgagatggtgttgtttaccccgggcgcaagaagaagaaggaggtcaaatggcgagagatcggaagaaccccccgaggagttccaatccaagagagctcgccaagggcgaaacaacccgtcttactacgcctagtaaaacccaaacgtcgagccaacgacgctaaacaagtgcgctaagtgggagacaacccactaggtagctacctttttccttagaattttaattttgcttttgctttaatctttttagtatttgtttcagattcttattaaaaaaaaatatatattaaaaaatagaaaaatagaaaacagaaaaacccaaaaagaagagaaggaataagggtcacctagacccgtcactaggcaccgtgacaactggtccgactactcgcccgagtaaacggcgctgcctagaaaagaaggctcggccccgtcaaaccttgaccggagccccgcctatttgcaccatcacttggccggagtccgcctggcagtgccagccattgactg

SEQ ID NO: 5190 - DNA, 1062 bp, Arabidopsis thaliana landsberg
ttacggtgatgaaacacggacaacttgcttgattgcgaatatgaaatattaacaacataacgtcaaaaatattaacaacatatataaaaagggaaaacaaaaggaaagaacaaatcaaggcctatatcattaaatacgaataagaaacgacgacagatcctgtgtgcatagttattagtcatgacaatgaatatatctcgtcgagttgaatctcaatacctgtaattgatttttgttaggtattttcattcattgttttcatgttatactcaactgattttcttgtccttttctctctaataggaaatttatttcgtgaagaaatcagacaagcgaagctggcaaaccctaccacgaagccagtaccctaaaccattgattttccatgatggccgtctcgcgatcaaaccaaccctaatgaacactttggtcttgttcatgtggggtcctttcgcagccgcagccgcagcagccagactcttcgtctctctttgcatcccttactctttatcaatcccgatccttgccttttccggttgcagactaaccgtcactaacgactacgtttcatctcaaaaacaaaaaccaagtcaacgcaaaggttgtctctttgtatgtaaccataggactttattggaccctctctatgttgcattcgctttgagaaagaaaaacatcaaaactgtaacgtatagtttgagtagggtatctgagattttggctccgatcaagacggtgagactgacccgtgaatgagtaaacctcgatgaattatttattcatgtgtcaacataaggaaattagtattggtccgtaaaaaagtacccacttccatagaaccatacctgcataggagtagtccctacttccacaagactaagtgattgtcatcgttcccgtggctgtgacggtacacgtgaccttcttctacggtacaacggcgagtggtcttaaggcacttgacccgcttttcttcctcttggatccgtatccaacctacaccatcctatttctcgaccctgtctccggtgccacgtgccaagatcctgatggaaagccgaa

SEQ ID NO: 5191 - DNA, 1403 bp, Arabidopsis thaliana landsberg
cattaatcaaaattttgggtcccgatattattatttatagaagtttctggtatatttgacgttagtatgctttgtgtgacataaaaactcagtattatgtgatcctcacaaactaattcttgttcaatctttgccggtcattctgtactcttctttgaagtctgtagtaaactttccgatcatttaccgacttaccgtaagtaggttgttaaatttaatgaaatttgatcttcaaccaaaaaaaaaaagaaaagaaaaaagaatcagtatgatgctttacatgcatgtacgtatcacatatgaagtcgtatgaattgattatgttatgttactcctaattcgtgtgtttatcttttgtgacttcgaaattacgttcatgtacagatttaatgaacccggaccattgttttattggtgtattgttttttgttttttttatcaaacttctcttatattgaaaaaactaggtctccgtacaagaggaaaagagggcagcttttgcaagagcatcagcttgccgattattttctctaggaatgaaattgaaagaacaacaagtgaaagtagaggatagagcaaggatgtcgtgtagaatcccgtgaagtccctttgattggagcttcgaattgagggctttgactagggttaacgagtctgaagcgaaagagatgtgagtaagggccaatccaattgcaactcttatggcgataagagttgccaaagcttcggccattaacggtgagccaacatgagctacagctaaggagcctttgctaaaggtgcgttcattgttatccatgaagatccaacccaaacccgcatgtgcatcagttttccaggaggcatcggtgaggcaaataaaagggtttgtcaggaggagaggtttaaaaggcaatttcctgagagctctccctgaaacaagaagcgactgagcctgctgtcattctttcgctcggatgatggccagaccaagagcatccacaacagggatacttttcttgttgaaaatcaattgatttcgagacgtccatatagtccagaagatccagggagcgagaggaccaaggccaatgccgataggaggtaagcagatcaacttaatagctgtaattaaaccttcagtgactgactgaaaaatactcggattgaaggaatccttaaagggggcttttctccagatctgggaggcaaaagagcactaaaagaaaagatggatttcagtttctcttaggccgcagtgggggcactctaatgaatcaactatctggcgctgtgcaaggttttctcccaccgggagagcattttgagccatcttccagagcaaaagcttggttttaggtgaggacttaaccgaacagatattagctttccagtcaaacggcgtctgattagaagaaactgca

SEQ ID NO: 5192 - DNA, 3747 bp, Arabidopsis thaliana landsberg
tagttaaactttatggatgttgaattgatagaagtaaagtcaactatctatctctttagactatagtagaagactttaaaacttagtctggacgaactttaattaactttaaaacccttctgtaacaaaaggaaaaaagagagctatctttgtacgttaattcctcgtaaacgctctttgtattcattcatttgtattttaaatatagttgaaagatatatactctataataagaatagccagacatgagaaatactgatcagaagtactcaacttactaaacaaccaattaatatcagaaaataaataaaaacgaaacggtaattaaatgagtcaaagaagagagaatctgggggggaggtacagtgagagaggcccggagaaggagggaaggtgacaggacacgtggcaaaaggagaagtgtggtccaaagaaaaaggagaaacagggactcgacacgtaatccaatcaggaaagcattcccatgtgacctcttcactcattcactcttcaaatgacacaactggagcgcgtccacctttggcgcctccccctcctattccgccgcgctcgcgccctattcttggatgattgtttcagcgaaaaaacttcgagaccgaggaataaagttccagctgatggagaatgtaggtacaccgttggacatacgtttcaagaacggtttgcttgaaataccgccactagtctttgatgattttattagcattcttatatccaacatcgttgccttcgagcagtttaatatattatgttccacggagatgacaagctatgttattttcatgtcctgcctcaataacagagaagaggatacggtgttcttatccgagaaagggattgtagggaactatattggaaccagtgaggaagttactttgttcttcaagagcatagcaaaaaccattatattctccttttctacgagttacttgtctgatgtgtttgagggggtgaacaagcacaagagacgtaagatgccatggaaggctctatcatcttctgctgctataattcttcttcttctcaccatagctcaaaccttcttcgcagcctttgcttattttcgtcctcccaaaagttgaattggttgcagttatgacttcttcaaaacaaaatcctggcgtggctctaattgatgttgcactttcacacatggctctgtctccaactagaccatgcatgccgcattcattctatcttattattcttgtctttgttttcgattaagtattaatcatgtatgtctgacctttgagactctcaatttcatttgttttttttttttgtttttttgggtgagagtataatttttagttgtttctttttgttcttaatctatatatttacttctattttttgttaaactatattttcattacttttattttacagttcaacctttaatttaattgtgattccggatgtgttaggtatggctttagaggaaacaattaataataaacttttcttttatcattcaacacgatagatatggatactttcacctattccatcacagcagaaatgtttctgtatgcctttatttatgtgaatttggattatttattttggaggataacttcgaaatttgattcaacttcatacatatagataatttggttcttttagaaggcagaaatgaaaagatattcgacaatgtcgataaagatcctttagaggtactacattttgcaggaaaagagacacaattatggatgtcagctcaactcgagttgcaaattgaaaatcacggcaaccaaaatatcgaaactcagattcaagtgagggatatcgctcgcgatattaataattctggatattgttgctatgtggatggatcatggaaaaaaaaaaaaatacgaaacatgatggcattgtacatcaacaaataggaaaatgccaataatgggagcgacaaacctgagacgaagtctattccccctacatacagaagtgaaagcttttctctgggcaatgaagtgtatgattggtgctgataaccaagatgtagtgtttttcacagattgttcagatctggtgaagatggtgtcttttccaaccgaatggccgactttctcagtgtatttggaaaaatatagaacgacgaagaatttacaagttttttttatctttaatttctcgttgtgtgcaaatgttaaaacgaacaatttaatacgaaaaatttgtatccaaccgtatcacataacatattacatatgtaaacaacgtttttctaaactctaattaattttggatgaaaaaaatgaaaaacgtttagtttagacctacgacacttgttccagactaaacgtcatgggttaatacttaatactcttcaaagcgttccaaatttaatcatcaagggttggatataggtcatatatctcaatctccgttgagtcaaggaaccagccaaacttaatcaaccaaacacataacgccattaggatcaggcttgtccatttcaaaacctgttaaaagaacaaactaaataaggaaaaagtttttctaaaacaaaaagatcaagaaaaaaaaagtgttttggagtttggacacgtcgtcgtttcacacgcgtaaactcgtggatgatggaaaaacaataaaagctcgtgtttcgaaagcaagggtttttggaccagtcgtcacttcaccggatttttgttttggtgctctctccctcgaccactctgattccaaatctatctctctctgggaaaagctgaatctagatcatcaaagtaagtccccatcgttacttttatctcttcttgaagatgctttaatcccatttatttgttcatattcgcaattctttcaaaattcctgaggctaaacaaaaatcggatttaacgatgaaacactgaaattggacttgttcaatagtgtcttctctatgattagagcgaagtttggacaaaagttgaaatttttctatgatttgcgatgtctgattcattcatttcccacatgtttaggtctctcgtgtaaagtttgttcctttcttatgtcttcttatccaaattttgcaggtatcatattaaagtttgatcatttcttctttgagtatatagggttgtactcaaaatggcagcttcagaaacagttctacgtgttccattaggatctttatctcaatcttgttattatctgccttctttctttgttaactcaacaccaaacctctcgtttaaacccgttaatcgaaacagaaagaccgtccggtgtacaaactcgcatgaggtctcaagcgtatcaaaacattcatttcatagttcaaactgtgttttgaaaggtaaaaagtttgtttccacgatatgcaaatgccaaaaacatgatgttgaggagagttttagatcaacggtacttccttctgacggtttgagcagtgaattgaaaagcgacttggatgaaatgcctttacctgttaatggaagtgtttcatctaatggtaatgcacaatcagttggaacaaagtctattgaggatgaagcttgggatctattgaggcagtctgttgttttctattgtggcagtcctattggaactattgctgctaatgatccgaactctactagtgttttgaattatgatcaggtctttattcgtgatttcataccctcggggatcgcctttcttcttaaaggagagtatgatattgttcgcaatttcatcctttacactctccagttacaggtaatagagtctttctttgataagtgcagatgg

SEQ ID NO: 5193 - DNA, 1607 bp, Arabidopsis thaliana landsberg
aagcccttgagttgccagaggtgtctatgagtgccaaggataggaaatcgttgaagtacaatagggttcctggtatagggatgcataattatagttcacgcttttcgaaacatgatagcgagaggttcaccgagtttttggaggatgtgaagtccgggaagaagaagatggcggctggtgcgttgcttcctcatcagattatcagtcagcttgagaatgatagtgaaggtgaagttggtgcagaagtagcagagcttcaatgggcgagaatggttgttgatcttgccaagaaagggaagttgaagaactcattggcgatttgtgatgtctcgggaagcatggctggaacacctatgaatgtttgtgttgcgttagggttattggtttcggaacttaatgaagagccatggaaaggaaaagttatcacctttagcgaaaacccgcatcttcatgttgtcacgggttcaagtctgagagaaaagactcagtttgttagagaaatggattggggaatgaacacagatttccagaaggtgtttgatcggattttagaggttgctgtcgagaataacttaaccgatgaccagatgatcaagcggttgtttgtgttcagcgacatggagtttgatgatgcaagagttaacagcctttcggaaatgagtgactacgagagtaactccgagagtgactacgagagtgtccccgagagttttgagaaatgggagacggactatgaagttgttcagagaaagtataaagagaagggttttcagaatgttcctgaaattgtattttggaacttaagagactcgtcagctacacccgtggtgtctaagcagaaaggtgtagctatggttagcgggttttcgaagaatctactgactctgtttcttgaggaaggtgggattgtgaatcctgaagatgtcatgttgttagccattaaaggtgaggagtatcagaagcttgctgtttatgactgagaagttttattcatttaaatattggattttgtgagtacatgaatgaatcttgtttaagttttttttttttttctaagtacctatgtctaataagatacagctaagaaaatgaaatgatctatagaagtcataagatgaggcatcactcttcgtttcctcctaaacttggaatctttcctttatatcttttggttctaatagaagaaaaaaggcaaaagccaaactaatattctccaatctctctctttccttgttattcctgaggtgtcctctcacatccggtagtttcataacgaatatgttctttgtcattgccaagttgcttaagatgatgcgaacaaatcaacgaacaaggttttgtgaattactctgaatccaaaaacattgatactgtgatggagaaagaacgttttttgtgctctacttacacgcaaaagtatcttgaattcgattagattcaagctttttaagctaacacaaaaaagtgtctaaactagctaatatgttttgaccataaaagagaaaatatagctaacatttttggttattaaatgtaattgaagttagaacaatttggggaagttttaacacatgggcttttgctcaaaggaagaagaatttgttttt

SEQ ID NO: 5194 - DNA, 670 bp, Arabidopsis thaliana landsberg
tcttcttcacatcgtcccagactcaccttccgatgatctgatccaaaggctggccatttcttggtctcattatcctttgactacgttgaagctcctctgcaatctcagaggtgttagaggaactggaaaatcagacaaggaagggttttacacagctgccttgtggctttacaagaaccacccaaaaactctagctttgaatttccctactcttgtccattttgggtatttcaaagatttacctgagattctgcttcggatcttggaaggtcagcaaacggagagagtgaagaatagggtttggaggaaaaggactcagaggaaattcaaagggcatagtgagaaaaagtctaccatatccggtgacatggaagatcggattctcgaaaccgcggaggagattggtggtcctgttgataaagtcaaggctagggctttacggaaacagagagagttcgaaaaggcgaaaaaggcactagataggtataactctgatgctaattacagattactctttgatcaaattgcggatttgtttgcggaattattgaaatcagatttggagtatttgaatactaatcatttgaacaagattagtttagcttcgaaatggtgtccttcggctgattctgcgtatgataagactactttgatatctgacgctattgct

SEQ ID NO: 5195 - DNA, 2507 bp, Arabidopsis thaliana landsberg
ctataatcgaaccttttaagcactttttcaatgtaatgagattgtgttaaggattttcctttgctctcacgcttgattcaaattccgagaatcacatccgcctcccccatgtctttcatggcaaaatttgatgacaagaactcttttgtaagttctacttgtctaaggttagtgccaaagatcaacatgtcatcaacatataaacaaatgatcactccattaccggaatcatcaaatatgctatacaaacacttgtccgactgatttaattgtaatccatttgacaagacagcctcgtcaaacctttgatgccactgtttaggtgcttgctttaacccatacgctgattttaccaacttacacactttatgctcattacctgacataacaaacctttcgggttgtttcatatacacctcttcttccaagacgccgtttaagaatgccgtcttgacatccattaggtggatcataaggtcatgaatggatgccaaaccaattaaaaaccttatagaggagatcctaacaaccggagcatatgtatcgaaataatcaatgccttccttttgtctaaaaccttgagttaccaatcgagccttaaacttatcgactgttccatcgactttcatcttcttcttgaagatccatttgcagcctaaaggcttgcaaccgggtcgaagatccgttaagaaccacttattatttcccatgatggaatccatttcatcatttacggcttctttccaaaaagcaacgtcattagacgtcatagcctcattaaaatttctaggttcatcatcaatatgataacaatatgagtattggaaatcaatctcatctcttgacccttcaactaaataaagttgaaaatcgggaccgaaagatttttcgattctccctcatttactcttacgaagcataggtgactcattaggaggaacgaacgtgttgtctcccttctctgttccacttgaactaggaactaaatcctttggtataggtataaacgaaaaacggttctcatcaaatattgcatctcttgactcaattacgatgtaaaccgctatagaatcattaggttctatgacataaaacctatatgccttggaatgtaaggcataaccaataaagatgcaatcaatacctctttctcccaaagtcttaatctttggttggggtaatctaacgaccgtcctacagcccaaactcgaagatagttcaagtttggtttctttttgtaacaaatttcatatgggatcactttgtcctttgattggtgactttcaatgttactatatagtttgagggtatagctattacatgctaaaattgatattgaaattctaaaacattgcttattttaattgtagataaaacaatatctcatttgaaatagaggcattgcgagttttgtaagaaaatgttttttcctaatttaaaagacactaaaaacatactagtgagactattatcaaaacacactattttcatatgttgcataaaaataaatttattcattaggaaataaagcagttccttttatttaatactgtttttaatacattacaacaaaaaacggcattatcaaatggaaattgatattactgtggtacacaaatatacaagagatacaacgtgtttacacattagatgaaacctgaagaactggtatatagccgttagactttaaaccgttagcgccgtttgatttctctaaagaaattccatcgctagatgttactaatgccttcatatcagcatctgtgattctctggaaaaaaatgacaaatgaaaacaaattaagttcgagatatttttttcaaaataaaagtttaaaattttcttttctaaaaatttaaaattagatgtgttagtttaaccgtattgcatgcatgtgcacgagaagatacaaaatatatagaaattgaaaacctttttattcttggttaaatctctgaatagtgagaagacagcgttcaatttctcatcatcgagttcatatcccaactgaaaatagaaaatatacacataagtaagtatatgaatcatctaatatttatctctaggaagtgtaatctagtaggtaggtacaattgtcacaaggaatacctctttcagccgatctttcacagcgtgacgtccactgcacatttccattgttgttaaaattaatatataagaagacaaataaaacaattgttcgtaggtaaaagtatcactaaatagaatattaacctaagctttccaagaacaaggccggaattttgagattttacaatcccaatatcttctggtgataagatctcataagtactcctatttttcaatattccatcctgaaaaatattggaacaaacatcatataaatcaaattaatctcgtatttatttttattatcacatatataatgtaaatgtttattttagttatagtgtacatctagaatattcgattagtgttggttaaagggatttaaaaacaaaaatctaaaatagtttatataattt

SEQ ID NO: 5196 - DNA, 1608 bp, Arabidopsis thaliana landsberg
agtggcatgttgtcttatttgaattgttgctttcgtgtctttgaatgagttgctttcgtgttgtaatggttgctttcgtgtctttcgtgacttgtctgttctgtctcgtccaaagtttctcttctttagatcaagttcttattgcttataacttgagatattccaacagaaacatggttcaccaaacagagaaggaaattttcatcacatgttgatgattccgtaacaaaatcatgattatgtcacacaatcgtacacatgatttcatagtaaaataaatcatgattcaacgatttggtcgtacagaaaatcaaaattttaaagtaccatgcaggagatagctttggtttattggttgtgacttgtgattcaagcaaaaaaataaataaattggggtatgaatgtaaaattatcacatctaagcaaaattatcgtttctcccaatcataattggaaacaatatcatttctacatataaaaaaaacaaaaaaaaaacttctattaatttagtactacaaaatagcataacccaataaagcaataattgaattcaaataaaaattgaacagtagtaattcgtacctcagtgacataggtatatcaaaggagacaaactctccacaagcttgagagctttttcttctgttttgacgatttggttgaagttgaaatatcgaccgcaagcttgaacatcctcgaatgctctaatatgaatatacgctaaaatcttaacgtctacgtacgctaacacaccattctcatacatttgtgcagctcctgttgccaaaaaataccatttcatcctttatacggaggaaattactgtacaatattgtttaacaccttgaaacttgattacaataattgaagccctaatctaagcgtatataccttatttgttttcatgatacccacatcgtaaaccggggtgaagtccggtttaaacaaaccgaagttttgctctgaaaccgaagatttgaggaatcttctggaaattgtacttctgtcttttactctgtctgattcagtcaaaaagaaaggaatcttaagatctctcaattttaatttacactcactcaatcatacctttctctcgagacctccacagggtttgtttccggaaatgtcgaacggcacggatcaggctcaaccaccaccggagaacccggcggattcgaagtcacggaaacgtgcgacgccaggggatgataattggcttcctcctgattggagaaccgaaattagggttcgaacctctggcactaaagctggtactgttgataaggtgaaaaaatctcagccctttcaattcctttagatatagaatcattgtcgcaaatagaatcgtccgtacaaatggaaatgttatgttgtttgttgatttgaattgaattggaactttttcttagtatttatgaaattgggtcttgaagtttagattatgatgatcttattggtttatagtttaaggtatttggagactttatgactagtctttaagtgtaatgttgctgtatgtatgcatgttgaatgaagaaagctctgtttaggatggtgaaggtgtgaatatgataatgcagtgcttgatgtcatgtattagaaatgtag

SEQ ID NO: 5197 - DNA, 1178 bp, Arabidopsis thaliana landsberg
accttttttttgagacagaagtcaagatcactccaacacttttcattttcatctttctgagttccaatgttatctgtccagttgcagcagttaacgaagatgagaacacaatcttctctatactctctgttcttgcacatgcttccaccacattaatagctcctctcacctccaaatccacttccttctcctcctaatttcacatcatttcataaacaaaatctcaatttccccaaaccacacaaaaaaaaagagagattacagagaagtggtgagtgagaaacactaaaatactcacatcgtacccttcaggattatccaaacaacagaagacagcattacaattgttgagagaaatgaggatactttggtaatctaacacatccacatcataaacctctaatctctcttcgttagcttccatgtctctgattttctcttcaagcacactctcccctattaccaaaaatcctcattagagagaaaaaaaaaacaaccccttgcaacaagattccatctaaattggattgtacccataagtgaacttgaacccattgcctcaaaaattgattggaaccaattaaaggttggaaactttatagcaccattagtgaatttggccagataaacaaatcatttgtctcaaaatccttgaaatcaattgaaaaaagagtttgatagatttttttaccgtttttacggatagctgcgtgaacagagtaacctctagtgagcaatctcttgagaatccagaaaccaacataagtggaagcatcaagaacacaacaacaagaaatggtcttttcttgattcatcagttttgttgattagaaatatctggaaaaagtgtatggagagaaaagaagatatttagttgggtcttactatgtagaggagagacgtgaggagaaggaagtagtaataaataggagaaaggtgggtgaactatttcattgttgcacgctcccaacctactcatcttcttgttttactatatggctttgtgttgttggttaatccattgaccggtgggaaaaaaaaaacagaataataaataattgattgaaaaacgtaattcttttttttttaatgttttggattagttatttttaaattattattattttaatatttctaaagtttatatttaaaataaataagtactttggtttccaaat

SEQ ID NO: 5198 - DNA, 561 bp, Arabidopsis thaliana landsberg
acacacctgtaagtgttttttacatcttgattttgatttttggtcttttttttaaaatatttttggggaaatgtctgtatgttttttattgcgaccagaaccggtttaggggttatagactgtatacaaaccgggttctctcggtacaaggtttgtgctttgttattatttccatttttgtatggaatgatattagtttgctcttaatgactttttcatctcttttgtaacagaagcttcatcgataacatggtttactcctcctaattccttattatctctggtttaactaaatcgtttatttaaaccggttttggtttgtaggtttctttcatgtcagcaacaatatatgtaggtcattcgaccatactcaacaattcaattaaacaatgttctcctagctgatctttctttcttcatgattagcttctaggcttgatttgccctttcctcgagttatatgtgaattatggattgggattatctatcggttagttatcccgtttcatctttctttccactaaaatgtttatatggtttgctaattcgtctctaagctga

SEQ ID NO: 5199 - DNA, 885 bp, Arabidopsis thaliana landsberg
agacatttataaacatgttggacccacagtttattcatattcatatatgatagttttgacatagaatgaacaattatttcatgtaccttttcatcaatcaatctgaaatgtattatttaaattattgttattttgaaattacaagataccatattatttgttgaacttctaaaactttgggggtagtgaatctttgttggaaaagtaaatcaaaaattgggtcttcatgtaatgtatttgacatttgtcataatgtcatgtgtttatcttagactcattttggtcaagattcaatgtaagactgccttaataaaatattaaagaggtcaaaactctaactaaatcctacctagatcatattttagaatagtacttaatttaattttgtaactactttcttaatcacagttgtggcatgctcttgcgaagacacagtccgagaaggcagcttgggcattagccatggatcgtatggtcaacatggtttcggttaacccgggcctcatcgttggaccatcagtggctcaacacaacccaagaccgaccatgtcttacctcaaaggtatatatatatatattattattttttgacaatcaggtacatatatatactacattcatgtaactaataatgtaattgttctggctatgtatgtgattgtaggagctgcacaaatgtatgagaacggtgtgttagcgtacgtagatgttgaatttgtagcggatgttcacattcgagcattcgaggatacttcggcttgtggtagatacttttgcttcaaccaaattgtgaatacggaagaagaagctctcaagcttgtacaaactctatctcctttaatacatatgcaccaaggtaaatattattactattattagggtacg

SEQ ID NO: 5200 - DNA, 2585 bp, Arabidopsis thaliana landsberg
aaaaaaacatatacaactattgtcattaagctcacgacagcataacaaaatatatatagtcgaagattactgtatcaatggcaacaaattatatatgaattatcttaatcttaccgattactagtcaaaacactttgaatgtctccacattacccattttttttctatacttcccaaacctacctctgaatctgataatacagtaactacatgagtaataaaaagtctaaaaaagagaagagaaatgagtttatttccatatttttgtcgctttaaaaggttttgtttaataagggaaagtcggcatgagaaagaggagaaagtgacagctctctgataaaaagagggaatgaaggagaagaatttacgtcagattacgcaattttatgtcttccccaaatctaactgttgtccacgtgtcattttcctcttcactgtagatttaacttatcctcctttctcatccttttcattatctgtattttttgttctttttttttctgttttgcttaaccttttctatatcctttttaaaataataataaaatctctatcaattcaatatttttttttgcagtaatattatttactgagagtcacctttaaagaataaaagatataaaaaaaatccaataataaaaaggtaattgtactttacttttcacattacgtcatccgtggtagtggggtcgattaggacgcatcattttttttttacggctcagtgactcacacacacacgccaaaagcagagtttattaaaaacagagtaaattcgctattccaatcaaaaggtgaaagaaaaaaaaactcaagagtctctcctccattaatggaaggaaccgtttctctttctatgtgctgattgctgatgtagctcccacgagctcaagagtaagcttctaccgcaatttcctctaactgaaaccaaatcggctctttactaattttacaataaagtttcctcttttatctttcctctctggctaattaaactttctcttcctcaataccccattcaagtttcaactcttctacactgtgtcttacagcttcatgctccaggtttaggtctaaaactcataatctggttctctttttttcggtggggtttgtttacttttgctactagataatgacttttagattccttctgtatgtcttgttattgttttcacgtttttttttgaaccaaacaatagcaaaatcgttacatgttttggatgttcatttctgtgatttgggattatttttaccttttccttgcggtgaagtttgtcctgtttcgtaatttgtgaacatatgaataatttagtgtttgtgattacctcctttgtgtaggatactgattagcatttctcaattgaatcaaactgctgaagacatctgtattacaaggaaaccaaaccagtcaggaaacaaaaagtctctgtctttggccatggagaacccatcagcatccagagataataaaggtttctgttttccagatattccagtagaagaaatggatggctgggttaagaatttgatctctgaagaagatatgtttagctcctcttcaacttcagagcttatgaatttcgaatcttttgcttcatggtgcaacagcccttccgctgcagatatcttgttcactcaatacggtttatcgacctctcaatctattatacctttcggaggcttagaaggctcatacgcttgcgagaaaagaccgttagactgtactagtgttccaaggtcattgagccattctcttgatgagaagatgctcaaagcattaagtttgtttatggagttctctggagagggaattctggcacagttttggactcctattaagacaggagatcagtacatgcttagtacttgtgatcaggcgtatctgcttgactcgaggctatctggataccgtgaagcgtcgaggagattcactttctctgctgaagcaaatcaatgctcttatccaggtcttccaggcagagtctttatctctggagttcctgagtggacatcaaacgttatgtattacaagactgctgaatatttaaggatgaagcatgcattagataacgaagtccgtggttcgattgcaattcctgtccttgaagcatcaggttcttcttgttgtgcagttctggaacttgtgacatgtagggaaaaaccaaactttgatgtggagatgaactctgtttgccgtgctctgcaggtaattaactaaccttatctctcttctctttgtgtatgtgtctttgcttcttctttcttttatctctcttcactcatgtttttgtctatgtttttcaggccgtgaacttacaaacatcaactattcctcgtcgccagtacctttcaagtaatcaaaaagaagctttggctgaaataagagatgttctcagagcagtgtgctatgcacataggttgcctttagctctagcttggattccctgtagttactccaaaggagcaaacgatgagttggtaaaggtttatggaaaaaactcaaaggaatgttctattctttaaatagaagagacatcatgttatgtgaatgatatggaaatggaaggctttgtgaatgcatg

SEQ ID NO: 5201 - DNA, 373 bp, Arabidopsis thaliana landsberg
  unsure (1)..(373): unsure at all n locations
gatggacatatttcgttctgaatgtgccaatctacacaagcataaaaaaaggttatcaatgtcttcacttgtgattctgaaactgattgagatgaagaagaagacctgacgaattacgtggcgtatacaccttttgagtctgccccagagnnnnnnnnnnnnnnnnnnnnnnaaacatggnnnnnnnnnnnnnnnnnnnnnnnnnnnnnnnnnnnnnnnnnnnnnnnnnnnnnnnnnnnnnnnnnnnnnnnnnnnnnnnnnnnnnnnnnnnnnnnnnnnnnnnnnnnnnnnnnnnnnnnnnnnnnnnnnnnnnnnnnnnnnnnnnnnnnnnnnnnnnnnnnnnnnnnnnnnnnnnnnnnnnnnnnnnnnnnnn

SEQ ID NO: 5202 - DNA, 2193 bp, Arabidopsis thaliana landsberg
aaatattgacctaaaaagtgtaactatcaaatgaattctctcacaaatttagaaatatatgatacagacataattatgtaatagtatcaatatggtaccaaaataaagagagatttcatgtgagttatttgaaatgtagtctcttaatagtcacattctttttatttttatttttttatataaaatagttacattcttcttaataaaaaaggaaacaaaaatgcaaaaaagagatttatttggaatccacttatggtggtaacgtgggggaggatccaggtctcaagaaataaatttgtcgaaaattcgccctaaattttgtaaagaatcctggtttcaggacgtagaaaaggaagagggtaaattatattaaaaggagtataatgtatacatttgagattctacaattcataattggtttcttaagatactaaatggtgatatcatttattttgaagaaaatgataagcaggtcttatgacaacaactctgaccacataagtagaaaaactattacaggtacaaatactattttaactctctagaactacttacttatgtatttatgttattgactgactcttttttttatattattgttgtgtgtaagtgatatgatattttcacgaaaaaagtaattgtataatgacttgtcttacaaattgagaaatatatgtaaggacattaatacatatttatcaatgtagaaaataaagtaagtaaacccataaccaaaatccagaataggttcaatgtaaggtattaaaaaagataggataagagcggcctacaccattttcatctatttacagatgtcgcctaatttaccatctagattttggggttattggtgtcgtatagcaaatggtttgtcaattgataaatagccaatacttttgaattttgatacataaattaacgcaaacaaagaaacagtccaagttatatgagagcaaaacatttataggtactctactactcttgcactaagagccaagacgaggaagactggttaacgtattcaccaacatatacaaaacccaaaaactaaacctgttggttaaaagattaaaaatggcaaaaggtactactgtagtagtagcccttgtgccatatttacaaaaccaaaccagtaaaaaatgttaaagagtgttacgaaatgagacatcatctcttttctgattgcaacgctttggaaatgcaacgacagagtctcaatatccgaggatatcccactccaacatcatcaattgtagattctatctccttcttcagttgtttcgacacaacaccgtctctttttgtgcctgaaactttacggaactcgcaaggaactacatcactaggatatttcccactgttacaatagagaacacagtttcattattggaaagttataagaacttgattagttactgagctgcttagatacttactggatcaaacatgtcacatcgagaatcacgcttagttttctcaagtttgtgcaatcaagaaagctaatctgcaaatgtagctgctccgctgcaatcaacaagacactagtgttcctatctcagacagaactagtcattaaaggatttctaaattgcacatttattggccactactgttagactagtttgacccaaagagaagtgagaggaggaaaatagatcacctgatggagaatcaaagtttccttggaccaaatttggtatattcatttgagctaaatgaaattcctcagccacatctagcagattgtttaggagcaaactggttttctgtatcctcggagcagaatgagaaaaacttcagaggtctagtcttgcacaaaataaatccagagaaagtgattctgctaaaggaacttacaaacactaaggagaaactagaaagcgaacatgacttgcaacaaaattctcaacaagatagaaaaaatacctaagatgctatgatagtaataagagaaccacaggaacaaaaggagataattaagacataaacacacctgtgtaatttccaacaatgtattggaaccaccaatatacctccgggagtcttcagcgttaaacatagagttaaacgcaattgaaacattcatctctgggaaatgctgtagaacaatgtcttgattagaaacaaaaagaagatgatttattaatggaaggacgacagtttggttacccttaccttaacgaatgtatcact

SEQ ID NO: 5203 - DNA, 1529 bp, Arabidopsis thaliana landsberg
gacgagagagcttttgccgccttatggattatttagatatgcatggtacaacatcatccgatgggacgtcatcattcttggtaagtattgaattccagggaattcagtaattgtagttggcagagaaattcaaaagcagttaaagtttcttaacatatcaacgacactttccaagttttctagcacacaacatctaaatggtttcagtaactaaatcaaatatccttcaattgaattaagcttaagcatgtggatatgattttacattatctatcaagttaatatttgcaaccttagtttctttttcaatgtcatggagatcgtctaaattaatttacagatatcttacatcatgatttaccatacttagtttttttcgtcccttgcttaaagtggataattctttttgtgtgaaatctgtagaggcatggtggctggacgtggggtggaggtaatctcagtagtatgtctgcttcagtatccgtgcttggagatagtggttggttgagtcacattcagagcatcttagctggtgtagcatggattgctgcacgtgttgctatggagtcagcatcagttcttgtgcactgcaggttagctatatatgtgataagacaaagatgcatttgtttcaagcaggcacttttatttacatcaggtaaattaactattctcagtagattttttgttatatcctgacttgtgatgtcactgtgcagtgatggatgggacagaacaactcagctggtttctcttgcatgcttattgcttgatccttactacagaacattttttgggtttcaggtattcctcgtgctatatatagtgtgggtttcttggggcttctcgatcttgttgtgactgaatttacttaattccttatcaacttcaagtttaggattgtaacttgatattgtgggtgggtgttcttgccagctgattcaactgcataagcagcccttataagatttttgtttgatgcaccattgtcttatgtagtctttcctactgttctgacttcacatcaggctcttgtcgaaaaggattggttagcatttggtcacccattttcggatcgggtgggaatgccaaacgtgtctgaatctggtaattttgaattaccaattcagtcttcttctgctcgaagttttccttcatctccagtgcggcaatctccaggatcagcagctgctcaatcctctagctcttcatatgggctgaacaactattctcctatatttttgcaggtgaccagctattacctgcaattatgttattccttttgatttggaaaatctacttacgatagctgagtggagcctaagattatatcatgttcacgtttatggtgtttgcagtggcttgattgcatttcacagctaatgcggatgtatccttctgcttttgagttttctccggtatgtatatactgttaagagctgtcatggtgaaattttgttttaaaagtaatctctaaccatcaatattttgtttcagactttcctggtagatttcatagactggtcttt

SEQ ID NO: 5204 - DNA, 1828 bp, Arabidopsis thaliana landsberg
agacttttgagtggttctatgttcatattttacgagctttccagaataatcctcttcactggtttgccatatctcgttttgcgtgtaaagaccatgttcctatttgagtattgataaataataaaaaaataacaagtcactgttgctgatagtgatgcagagctgctccaggcgtgttctttccgggcaagatgtcgcttacctgtgatcacatggtgtcagccaggtaggaaggcagatattttggacttttggttgcttccattttaattgtggttgtattgcttccaaaatgatatactgattttgatcttaacctcaattgcaggaagtggagctgtgattgcacgctcatcacaacctttagtgggtcttatgatgaatatgaggaggtatataaaactttcaatttcacgaggagacatttttgataacattttgttttagttttggatttcaaattttctagacgcactagattctgactattgatttgttttattttatccaacagtaatcttgatgaaaaactagttgctgcattctgctctcagttacctggtgctaagggagaacgaaggtgagcttaatatggttaactcttacatgtcttgtattttatgtttcgttataaagatttaaaatttatgaatcacgaatgcatctcacaaagggaaattagcacttttgtggggcttgctggacgcgagatcatcttctaaatgcatcaaaatgtctgtttggttactattaaaatacctgctgttagataaccaatatggttgacagttttttttccttttcatttacaagtatgtgttgaactcaactcatgtggtttatagttacaaagatgcacttatctcatcttgtttttgtttttactttgtaggaagctttatattgctgatgcaagacctaggaaaaatgcattagccaatggagcaatgggaggtggctcagaatcatcttccaattattttcaatctgaagttagtgaatggtcttggtggtttgattattaaagtcttgatcttctggaattccatgattttagtgactatgtttctttcttcagattgttttctttggcatagacaacatacatgcaatgagggagagcttttcccgcgttagagattatttagatatgcacggtacaacatcatccgatgggagatcatcgttcttggtaagtactgaatatcaagtaacttttttgacggatttctttgaggggatacaatatgatatataatatttttatgttgcgtatcattaagatatatgtatgtgtgaattctgcagagacacggtggttggacctggggaggaggtaatcttagtagtatgtctgcttcagtatctttacttggagatagtggctggttgatacacatccagagcgtcttagctggtgcagcatggattgctgcacgtgttgctatggagtcggcatcagttcttgtgcactgcaggttagctaccttgactcacatcaccggccaactgcttaaccaatttctgtcctcgtgataagatgaatatacgtctgtttgtagaaaaccttctattatcatcagggtgaaaaagattatttgttatatcatgactcttcgtatgtcattgcgcagtgatggatgggacagaacaactcagcttgtttctcttgcgtgcttattgcttgatccatactacagaacttttgctgggtttcaggtattccctgtgctatttggtgtttctgggttcttacttttgaagtatcatagcataatttaatggtttacaattgtaaaacttttctggagtaccatatcgaaattct

SEQ ID NO: 5205 - DNA, 1420 bp, Arabidopsis thaliana landsberg
  unsure (1)..(1420): unsure at all n locations
gcatcagtaaatcaaatgtaaattttacccaaacgacggaaaatcagaagctcaccttcgtgctcccttatgaccagcaaattgagtgcagaatgaagcaacaagtttctcatcagagttactgtagaaaatgggtgaaatatatcaaaacttcagaatccatcattttaagcactttgagaatccaaataagcaactaaattatcatgcacaagtctggtcataaaattaaaacttctanaaacctcctcatgttcatcatcagaccaactaaaggttgtgatgagcgagcaatcacagctccacttcctgcaattgagataaaaaaaaggaacatgtaaatgtggaactatgccagcaaagttcaaacagaagtaccacaaccactgcatatctacctggatgacaccacgagatcacaggtaagcgacatcttgcccggaaagtagaagtctggagcagctcttcatcactgacaacaaacatttgtaatgttattgtatgtctatacttctcaaaaagttgaaaccaaaaaagaaacagtggttgccaagtagctaaagagaatctttgtgtgcagttttcaattctcaatctttgatagataccaaattatgttttcattcctgtacaaggaatcaacgtcctacctaatggattttggaaccatcaaagcaaacggataactctggcacaagtcataatttgagtttaagttagttatacgccaaagatcattggatagagtgaatgaaccgtcctcaatcatattcattgacgctcgttgtgaactttttccgagaaggcgaaaatattcattaagcaatctttcctttgggtttgtgttaccgaattgggaaggtccgcatgtaaaagcataaagatcccatactctctctggtttgttacacctcaatagcgtatcaactacagtatgtctctgcaaaagtatgccaacagaatcatataggtttcaaggagaaatgcagaaattagcataagatgaaaaaaaatcaaaagtttcacctgcttggtaccaggtcgaaaaccatagacaactattctcatgtcttttcctgcaaaatgcacatgattcatatgaaatggtttaaaactaacatacagaggaactatataaagcggtaaagaaaatcccttcaannnnnnnnnnnnnnnnnnnnnnccaagataattactttcaggtaagaaacaaaggtagtaaaagagaaggaactaaatatcaaagtgaattttgatatacaccgcaagaaactgaaaacccaaatgaatcaaaatcggttttagcatatggtaatacggaaacataccagtgacctgtaaaagtcgtgtcggtgcattctcattgttgtgatatttngttgattgactttcggcgctgcataccaaaattacatataga

SEQ ID NO: 5206 - DNA, 1546 bp, Arabidopsis thaliana landsberg
  unsure (1)..(1546): unsure at all n locations
aatattgtaacggttaggcttcttgcttacaaaaattaaatggtagtagttgttttataatggtaatagtcaatttaaaaaaatccatagacacatcaacacacaaatatattagtttactgttcaaaagagaccggagcaccaaacttgctccctactctacggacacattcgttccatgattgtttgctatatggaatgtctttagatgcaatactattaccatacacatacatggcggaccagccttcaaccaatctgaaatggcaatctttgcccattttcaatatttcacgacaacattcatctataattggcatcatctcatctttcatgtttttgaaaaccacatttaagcatatccagctttgcttcatagcgcaagccgcaataaaatcgggtattttataccggtccttgtcatattctattgcgggtgaatcagcttcttcgaatagagcttcatcgggagcttcaacgtaaatattaaactttgaagatggagataaggccacatcttctagcacctctagcgaatatggatcaatttcttgggagaaaattggacgagccatgtaaaacattactatagacacgagcgtaaccatgagaagagtctttgtcatctttgtttttttggatgtaagaatacttttagttttagatgtaagattgatgacatgaaacaagaaacaagagattttataggacaatcactaaagggtatttaattgattaaacatttattcattaatatttgtatgttactaacttcaacatttaataattatgtttaagatacgtttacattagacactatgctatttttacaagttgtaactttaaactttgtcttgaatcgaacatgactatagattttgggcaaacttaaagataacaacatttccggtttttttcaaattattacaaatcaaactgatatattagacacaacacgattacacgtaatgaaaaaagaaaaagataaaaagataaaagaagggatcgattctgtttggtctggtttagtgagattcaaagttaagctcttcctttcaagacatgccttcttaaaccgggaatgtgaacgtttgtaatgtagtccgtccagttaatgcttccaacatcaaatccaaattctctcttctcgtcctctgacatattctccattaatctctgtgtattgctgttatcaaatctgtaaaagaaaccaaaaaaaaaagatgaaaactttgcgggtaccggttttgtctgctctaagaattagaatgttaatgagttctgtcttaccttccaccatagaaagtgtatggctcataaatagtagcaaggtgtttggcttgttcaacagatttcttgcatataaactttagcttctgcatcatcttactatccactgaactcataccactcatcaacccactccgttcttgagcatctctccacaaatgatccgagaaatcatcaacggaattgaaaagcttcatcaaacgcaccataataggatcacctttagagtccatgcatggngatgttttgtagtggt

SEQ ID NO: 5207 - DNA, 698 bp, Arabidopsis thaliana landsberg
gtctcttctcatagtaatgctcatgtctatagtaatgttttacatggctcgtccaattttctcccaaaaaattaatccatatttagaggtgatgccaaaagatgtgaccatatctccatcttcaaattttgattacgtcgaagctcccgatgaagctccattcgaagaagctgattcaccagcaatggaatatgacatggagcttgctcaccattattcggacaaacagctcaagtttcttgaggcttgctctgaaaagccgagttcaaaatgcggaaatgaggttttcaagaacatgttaaatgagacgatgccaattacagaggaatgttgtcgtgatatattgaagatgggcaaagattgccatataggattggttaaactcatatttgccacatatgagtataaaaatattgcatctaagggcattccaaagagcaaacaaacatggaacgaatgtgtccatagagtggggagcaagattggtgctccggtctcttttgaacaatgaactaatatttccgtgtattgatgtgtctatgcgtttttgtaatttgattattactaatataaagcaactgctactattttatttttgataatcaagaagtcaaagccttacaatattttacgtttgtattcatcatttgaattaatccatccagcataaactaaaaacgcatatgtaaactgaaaac

SEQ ID NO: 5208 - DNA, 3151 bp, Arabidopsis thaliana landsberg
tgaacatgggagcatttttctataaaggttggtgcataatgcgtgagagatgcatcaaacctctacaatctccaataaatcaatgaatgtaaatcattagttgaaactagttagaaatgtatacctccataggatcattgccaatcttttcttcgggttgagcctccgacactgaatgcgatgatgcaggcatctccaaagtaacctgaatgttgatgtaaacatgtagctagttagaataaataaaagaaattttgcctacattttatgaagtaacaagaaaatcatgtccaattacacaagagcctcaacacataaaacttgatgatgattgttacagtataccttcatagaatcaccatcgctgttgacttctggttgagtctctagcaatgaatgagatgctgcattgccctgttgagaattggcttataaatgttgttttggaaaagatctgatagaagaagcatccctctccagtgtcaaataaagcaaggaactagttaaaaatgtatacctccacagggtcatcgggttgaggtagttcgactgagtgagatgttgcagctgactccaaagtaacctgaatgttgaagtacactagtaagtatccacaaaatcatgtccacaataactatgcacaagagtcattatttatattaaggactaaatccaatgtgttaaatcaaattatgtattagcttacctccgtcatatgatcatcgtcaatgttttcttcgggttgcgtctccaacactgaatgagaagcttcaaccgtctccaaggtttcctgaattatgaattacaaacagatatgtcttaagggctgtgacaataatttggtttaataaagttctgacaataatttggtttatatataagcttacctccataatattgtctagctcgagaggagattgttctttttggcttaggtttgcacttgaatcaaactgattgtaaagtacagtagtcaattttgtgagaatctataacctgtaaaataaattgtttgatgtgttgtgtttgtatttttgtacctggatttttccctcatcatctgcttcatggccatttggagaattacagtctggagaattggcctgtaaatatttttttggacaaggactgagtgatgaagcatccctcaccggtgtccaataaatcaaggaactagttgaaaatgtatacctccatagggtcatcgggttgcggctccaccactgattgagatgcttcacccgcctccaaattgacctgaatgttaaagtacactcgtaagtatccacaaaatcctgtccataataactaagcagatgtgcaattattatgtttacggtctgtgatgcaccaaccatttacaatgtgttgcaccaaatgatgtattaacttacctccataatattgtgttcctcgagaggtgattgttttttgttgcttacgtttgcacttgaatcaaactgattgtaaagtagaatagtcaaatgtgtcagatcctataaactgttaaataaagtgtatgatgtgttgtgtttgtatttataaaagtacctggatttttccctcatcatctggttcattgtcatttggatctttggcaccagtgtcataaattggattgtcctctattgcatcatccttttcagaatcctgtgattcatgtggagtatgattgacatccatggggtcatcagtaatcacctgaaacaaaatattttgacgtaatcaattctaccaaagagatattggaaattaaatattacactaaccgtgtttgtcaaaattgttctatcaatggattcatcttgaaacttcttgaattcatcatcttggactatcatagaagggtgggaaagaggaggagaaacatcccatgaatcatccttttgctcagattgatgctagcaagattgataaaaattgattaagtacatatagatgtggtaaaagaataaacaataaaaacataaggtttatcagcatacctcaatatcaaaatcctcattctggtcatcaaacagcgtgtgtgaatgaaatggatttcttgaggaaaataaaagttttagtatgcgttaaaacttgaaaattgtataagtagatgataaggttcaaatattataaacagtttgaaatcttgattacctcagaggtttgagattgagtaggtacctccaatgacttattgcgctttgatctagaagaaaatggaacaaaactgaaagagagttttctggaccgcttgaatctgacagattttcttttcttttcaaggttcattacacgatttgatagctcttccaccttgttttgtaatttaacgagcaacctagacttcccatcatcagatagcttgagttttggattagaacgagttgaataccaacgcttggatttgggagggtcagacttcacccgtagtctcttcttacgatccacaatatgctttttgtgaacaacagatgacttcttctttggaattttaattgatggcaatgtagcatcacctcctggccaatcgctttttttgaattgatgagctttccgtatcaaatcattcatgtaagcaactttcctgtctttcacctcgtcatcccactctgcccaactttggtcaacattaatatcttcacctataagcggatccactggtctctattgaaaaatagaaggttattattagtaaataagactgaatattatattgttatagaaagagaatattatagtttctaacccatattataacttttaggttagaaaaataccttaaggttgctttccaaagcatgaatctgaggaagcgatataacttgttttggatgagttaatcgtttccaaaggaggattgtcttagaggttcagtcatctaacaccaaatctaacagtccaggtatgttacgaaatgctatgagctgcaaggctagggggaaacctttcaaacggaatgttttctgctgaagttgactcaccaaactcttgatagggtcagttgtcagctgtcttttaccagtggacttaccgagatttcgtttgtcaggtctcattcctactacagtcttcagaaaagaccctctaccccaaggaaatgaaaggaatttataaaaatctaaaaacatctctacatatttaaatgtaggcctaccgattgggt

SEQ ID NO: 5209 - DNA, 5627 bp, Arabidopsis thaliana landsberg
aaataataacactattgttacaggaagaatgaccaatgcaaatagatacgtgatgcaataaattttctttttaccagcacttaacaagagacaaggatactgttgttaggcataaacagtcatttgggtgaatatacttacagattcctcatcatgactttccggaatgatttctgataaaaactcttgagcagcctccaccaggttgaatatcataacccgaccttcacgagcattggaatttgcctgcatagaatataattttttgagtaccttgtgtcagcatagagcacttctgaataccatagagtatatcagtataaaaaatattcccatgcctggtcctcgagaagagataaaagcttctcagcatcagctgttgtcaacccttgttctggagtaatctgaagcttggggcacttgtaaggatatcctggtaagcacctaaaaggacaaactagttagaagaagtaataaaaagatgaacatgttaattatttcataatttcggaaagaagatactcacctaactataagcatagcagatatgtcggtgtcttcatatcccatgtcctttgagtacggcctactcgaattacaaggaccttggtgaatcagacgcatttacatgcacaaaaaagaaaaatcacaacagctaaacttgaatgcaaacatgttgatcagaagaaaacctgagcttgattgctatttgcggaggcgaacgcgaatcagaaacaactttgcagtcctcttgaaatattgcagagctgataacatgaaaacaaaaaccgatacttcttagttcttactattagaattcatatagagactcattcttttcctgatttcattgtggtgtaaattaaaactgctcgtctttaacaacatttacaaataattgctattgtttttccctgtaacatctgaacgatcaaatcccataatcccaacatttacacaatttctaatcacagcacaactttaaaggtcatagcaacttctatcatgcccctccaaatcaaaaattaaccacaaatcatcaaaaaccctaaatctcacattgcctaaataactcgtttcacaaaatccacagaaattaaaagttcaaacttacagagcagtgatctcctcagatagaagttcattatcttcatcagcattagatccatggtctttcagctgaccccttcttccgctacctcctcgtttcttctttttcttcgaactgctgcgacccatttcctcagccccaaaacacgccttaatcaatctgctctttcaatcaaacaccttatcctccgatcgaagaatcaccacaatctaccaaaacccaactccttataacaagttcttcgtcaatcgccaccgtttctcacaactcccgccaaacagtttcgatctaagaatttcaaaaaatggcgacggtgactgccagcactaacaaaaccttcgattacttttctctacttgatcccggcgtaaagaattttgaaaaatcgctctcagtgattgttttatataagtctcaatgacgaaaaaatcatcgacggctcttcttcaaagatggcgccatcagagttctatgttgatcctgtccagcacaaacattcaaaacgccgtcgtatttgtatcaaatgataatgggcctatttatacgccaatgagtttaaaggcccattatagataggtcaatctgtgatgttacaaaaatgtgacgtcgaaaaatagctttataacagtgttttgaccgatattgatttcttttaaaacaacaaaaatatgtttttaaaaaccttaatatctactttcaaacaataacgataacgagagaaatgacgtagacatgaaatttgatatcaaaaacaatatagtatgtacattaatattcttagaaattagtgtgaaaaaaaagaaatgaatccctaaaaatcttattttttccaaattaaaatgcaaaatgaaagtatagagaaaaagagaaaatcaaacctgagccataagtgaccaatcagaatcgaccccgcttagtagttcctgattttccacacaccttatctttctcttcttctttaacctctccaacttcactctctatcttcccctgacgtgactcttctctctcttcctctccatcaatggcgaccacaaactctctccaccaccaccaccactcctctccttcttacacacaccaccgcaacaatctccattgccaatctcacttcggaccaacttctctttccctcaaacaacccacttccgccgcaacattctcactaatctgctctgcttcttccacctgctcctccaccaccgccgtatccgccgtttcaaccacaaacgcctccgccacaactgccgaaaccgcgaccatattcgacgttctggagaaccatctcgtcaatcaaaacttcagacaagccgacgaggagacacggagattactcattcagatatccggagaagccgccgtgaaacgtggctacgttttcttctccgaggtgaaaacaatctcccccgaagatcttcaagctatcgacaatctatggattaaacacagtgatggtagattcggatacagcgtgcaacgcaaaatctggttaaaagtgaagaaagatttcacaagattcttcgttaaagttgagtggatgaagcttcttgacacagaggttgttcaatacaattacagagcgtttcctgacgaattcaagtgggagcttaacgatgaaacgcctttaggacacttaccgctcacaaacgccttgagaggaacgcagcttctgaaatgcgttttaagccatcctgcgtttgcgacagctgatgataacagtggagaaacagaagacgagcttaacagaggtgttgcggtggctaaggaacaggcaggagtaggagcagacaaaagagtgtttaaaacaaattacagcttctgatgtctttctccttctttttttttttttttttaatattgattttctgatattgtgaaagtataaacaaatctctgtaatcatatcattaattaaatcggatttctcttcaaatgtcagttcccattgtgattatggatgtatgaacaaagccagatcattagttaatgaataaaaaaaaaatgactctttcttggttgatcaatgtgaaattcataagttctgcagatcttaagaacatgaaactaatgtagttactcttggacagatcaaatctgaaacaacaattcgaactccaccagctggttcttaaggccttctcttgtgttgttgttgctgtcctcttaggtgatttggtgaaagagagattaaggataaatacaaagttgggattttggctctgttcaagaaagctgcacctcatataatgagcaatgtgtgacaaagatctaatgaatacgttgctgcctctgtagccttgtagttaattctcagtgtaggccatacacgttacacgatgtggacagatgctttttctctcattctgtggtattcaatgaataaacgttttagtagttaaactataatatattgaaccgtgcatgtatatgtcaacaatgtgttctttcaccatgagaaaattacatgatcagagcattctaaaactgctacaataaggaggaaaaaagtatggcataagtcttaatactgactagcttctaggcacatgggcagagtcgtcgggtgtgttggtgtgaaccgtcacaggaaagcaatgattgtgtccgggtatacaaacacgcgcctggatactgcagaccaagaaaataaacacacacatacggaatcactcagtttatgaacaagattcaaaaattgagtcaggagaagcaatgtaaataaattatttcactgaggattcaggaacttaaagggcgcataaaagagaaaaaaaaaaagatgaaataccaaatctctcggcgcatcttcgacaacttcagcaggttggtcagccccggcacttgctaaacacgaccctttgcagttcatgtatcttttcatactaagcaaacaaagaagaagagaaagaaccatgtgaacaccaacaaaattgccagtttttaatctattctatatagaaatctctgaaacatgacttgatagttggcttaaaagattgactctggtaaaatagttgcttaagaagagacttacacgtcacactggtttagaagtgagagtttattcatcacacacaattgtccacgtgatttgcaaactgcatcgcatgaatctccttgactgtgaaaccaatccaatagagaagagtctaagagtatggtctccacaagagcatatacaattcaaacctctagagcagtgaagggtgttaccttccgacaataacgtcaataccaagaagtcttgtttcaacttgtgtaagattagcacctgttttcaattatttgatgcatgtgatagggtatttcgacatttaaacgatattcaaaagataaaaactaagctattgaggttaacctgaagcatttgatgtcagagaaaaacaatggtgaaactcgctgtggtaagcattttcgtgaacctggacgttaaggaaacaaaatatacatctcactgtttagagctatccgtattgattatccagtttcattagactttcaagagcattccatcattttcagataaaaccttaacttccacactacattgatccaattcatgacataacctcaagaaacatgccaggaaaagaacaatcaaagcctttttaggtgaaacaataacagtatatcgcttaccacactctcagagttatggcggcatctcccggcacaaaaatcaaatacactcttgtaagtccctgccaaagaggaaaaattggccatcttgcaaatgcaaacacttttatgcggtggtttaagaatcgaagctgctgtaaaacgacaagttacctgatgtagccggctttgcaactttgaccttaaccaccttctcaagaagcgtctgcagaagataagtgctcataagcaaaaaaaaaaagatgaagcgagaacagagaaaaatctggaaaaaaaatcaaagattccattgaatacctgagacggattcaagcagcaagaaacgcaaaattcataagagttgcagcattgtgaaagtatgttgcatccacttcaagcgaaaccacaaaacaaagaagtctgattaagaacacatcagttttaatgaaacctataagtccgtgatcaaaggctatgatcgtcttaaaaattgactcactgacaagagaatctttctcctttccatggacaacaacgagttcgagattccaatgacagagcatcacacacattgcctgcaagttgcaacaacaaaccattcatggatcaccaaatctatgtcgaaagagattcaaaatgttcaaaaaggtgaatctttccaagagtggaaatcgctaaccttcatcatcggagatcaagtatcttccttggacagttgttctgcaactccgctcttccaaaaatccgatatccttcctgcaaattcattcattcgaaatctcaaggaaatgaaactaagcgggacaattcatagaagcaatggttgttacccacaattaatcacctaactgccgaaactctcaacgggaataagaacccatgagatgttgaagagcga

SEQ ID NO: 5210 - DNA, 628 bp, Arabidopsis thaliana landsberg
tcttctcatggtaacgctcgtgtctattgtaatgttttatatttttcgtccaattttctcccaagaaattgatcgatattcacaggaggtgccaaaagatgtggccatatctccatcttcagagtttgatatttacgtcgaagctcccggtgaagctccattcgaagaagctgattcacccgcaatggaatatgatagggagcttgctcaccattactcgcataaacagctcgattttcttgaggcttgctctgaaaagccaagctcaaaatgcggaaatgaagctttcaagaacatgttagatgagacagtgccaattacagataaatgttgtcgtgatatattgaagatcggaaaagattgccatctcggattggttaaactcatattcgccacatatgaatataaaaataaagcatctaaaggcattccaaagagcaaacaaacatggaacgaatgtgtctttagagtagggagcaagattggtgctccggtctcttttgaaaagtaaactaatatttatgtgtgttatgcgtctgcgggtttttgtaatttgactattaccattataaaacaactgctaccatttacttttgggaattaaaaagccaaacccttacaatatttt

SEQ ID NO: 5211 - DNA, 527 bp, Arabidopsis thaliana landsberg
cggcgagcactgtctctatcttatactctgttgtgggtaaatcagccccttccactgaagttggagctatgtctatatctgcagatatatttttctgggagtaaattggacaagccatgtaaaacattaccatgggtgcgagcattaccatgagaaaagactttgccatatttgcttttggttttggatgtaagattagtgacatgaaacgagaaaacaagagatgttatagggcaatgggtaaggatgtgtaattgataaaacatttattcaataatagttttatgttactaacatcataaacttcaacatttaatagttctgcctagaacacgtttccatgaaaatcatagacatgcacttcctactttgaattttattttggaatcttggaatgaagactttaatcaaactagttgacagagcacattgttttaccataagaaatttaaaaagggcgggagcgaaacaaaaaggggtttgttgtttgtaggattagagggggcacataggggatagtgatctat

SEQ ID NO: 5212 - DNA, 618 bp, Arabidopsis thaliana landsberg
  unsure (1)..(618): unsure at all n locations
aactaaacattagcatatataaaaagatgtcttcttattattcaaaacatttattcaataaacataaatatctaatgagctgtatatatatattaaaaagaaacaaaacaaattgactaatgaattagtcttatgacttaggtcataagccgcaaacgaattgcataaatgttaaatagaattagaaaaaataatagaaaattagaaagtactccaacgatatttgggtcctgaaggtcgacggtcatcatatgtaaaccctatcgcactctttgtgaaactccattgacgtagttgatcacattgaggagcaaatgtattttgactgtatacttgtatgtaactatggaacctcatgttaatgccgtgcttaaaaagacaatcccattttgttatattcactccttcatccttgactttaatgattctaatagcgttgaagtctagatataggactcctaaatctacttttggggaatgacaatgatattggagaattttactatgaccgagtcggttcttaagtactatcctattttccttacaagcctcatttactccataaaaaatagcaataattaacatanaaaatatttaacgattcattttgtatctaac

SEQ ID NO: 5213 - DNA, 877 bp, Arabidopsis thaliana landsberg
ttgatgccgtagataaagattgaggattttctttacttcggcgagaatgtgacggagaacatcatgcgaattaccgagcagagggcttttgagaaagccgagaagaaaaagaagaagcaaggcaagagggcgataatgccggatcctcctggctcaactctgggtaccgagtagtcgctttcggatctaagagcccggtttaatcttggcgaggtcactctgcgcgtaccgaggtccgatgagcgtgctgataatccccccgagggcttctacactttgtacgaggggttcttctattgctgttttctatggcttccggtacactttggagtacgtgacgtcgtacaatattgccctttctcagattacaacgcgatccttgagacatctgcttggaatttttggtgcgaagttacgaatttgagatcgacatcacgctcgcttactttaggaacctccttgagatccagcggatttccatgtccgaggtggaccggtattatatctctcccgccaaggataggaaggttattgacgggttccgagcaaagacgagccgtatactaatcactttttcttcgtggcccttgaagatgctgttcatgatgatctccccgggaccgttttgactagatggggaattttgggaagctaatagttattcttccgtttgcatccgaggcagttttatgagcgttctaacagtttatatactttttgttacataacgcactatcaagttcctcgagacgattccagactcttttgtttcgaactttcacgcattatcggctaggaagtgtgactggttgaagcatttctcccgggatcggatcgagcgagcgcttcgtctagtccacggtgttccttgcccttc

SEQ ID NO: 5214 - DNA, 2226 bp, Arabidopsis thaliana landsberg
  unsure (1)..(2226): unsure at all n locations
agcgcttgactggattcatcgttttgagcagagaaactcatcatgactccgttccgatcctaaatctcaatccattgatcaaactcaggttattttctctctatttgtcacaatcgttacaaatccctatattattcaatttccccagaattctgttagatttctggattgatgagaatctatatcctacgttagctattcaattttgaaatgcacgacactgattgttcttgagatttgatgcagtacattgatatagagtaataagcttcaggtttttacttttgaaatagagtagttggattttgtagggttcttagatgaacttatggttatggtttagagatatattggtgtagtagctttgagttgaagtttaggattctttgtttttccaggtgagtgatcgtattttcgggaagaaatatcgtatggnnnnnnnnnnnnnnnnnnnnnnnnnnnnnnnnnnnnnntttgaacctgcgattgagtatcttagttcacgtaaatggtagagatggataagttctttgctgaaatatgtgcctcgtgaattcgattgttgtcgtgttcttgatgaaaaccttatctgaatacagctctgttcttgtttttgctactttcttgagaaagaaaattgttgtgttgtactgaaaatatgaagaaaagcttcttattgtttggcttaatgattgagatgctgtgaggtaccacttgttatattatgctagatttgatttgttattggtaggtgatcaacatttgatcatactgtaaacagtcagaatactctgttatatgctctattatggtatcaccgtatcagcttaaacacccggctgaatgagttggactggttcacatcagcgtggcaaacacaagttctacggtgatccccgccgcaccattctgcttctagaatcacatgacgtcgatgctatcttgcttttctgtgcttgtgcgaaagctccataaaacctttgctgctttggagagaggcgagcagcgagattcaacacaagggtctaaagtagcaaccggcttttctagttgtgcgtagaagtcaaatgcttggaaattttaggtatatctactttcttctctgaaacttgttgtttccatggtttcttaggaatgttaatgcaagatttgcagaggttatgcttattgttcaagtttgtgtctcggttcgttaacttgaatggtagttaatattgtttttccagcctagttcttgttcttgttttagttctctttcttccctgaaactattctggtttgttcttctggttttgctgatgccaaaagtggctactgaatttgaagaaatggatataacatttgccgaatttcacgtcctctgtttacgtttagttgctcagctgatcacttctcctctcttacttccctggaactagtcatgttttttcacgttggctatttaagcaacagtttgagaaaaaaacatcagaacttttgttcacggtttttttggaacaaactaaaacaaacctaaccaaatggaaaccgaaccaaagtaaaaccaaaccaaaagcgaaataacttcggttagagttcagccagagatttattaaaactgaaccaaaccgaatctaaacaaaaaccaaaatggccagcctactagcactcatggttggaaggacttggtgtcccaaacaaacattaactaatagagtgggagctgagcacaacacagtactaactagagacgaaacgagtctaaatagtattaagaattgggctggggcatcctacggttggaggagtcagggagggcaacaggaggtgcatgtcggtcttctgggaggcgtatggcgtcggctgaatggcgcgggacaagttcgagattctcgcagttacagatttcaaccataaagccgtcagggtcattgaagaagagctggtcgatagctgcatctttctcatcacccaccgtcctcttgatgtactttaccttcacctccttgagcctcttctccaaagcttccatatcttcacactggaaagagatgtggttatccattgggtccaaatggtccgtgtcagaaggtaacttatcttggtccttggcctgcaccaagtggatcccaacgccgtagttgaaaagccacgcaccgtcgaagtcgaaagaagctggacgctctatctccacgaaccctaatacctttgtgtagaactcgagagactttttgacgtctttacaaa

SEQ ID NO: 5215 - DNA, 442 bp, Arabidopsis thaliana landsberg
gtaaaccaatcaaagtggctataacagagaccattaattacccattccaaatgccactgtagcacattttatattgatttcatccttgctccattgtttctgtacaaaggcacgtttaccaggatccatactgccatggtagaaggccgctttatggccaaacacctgaaattggaacataacaaatgtggtacgctcacaatatgtaaaaacctccatttaaacagatacgagaaaggccaacaaacgaccaacctgcaatgcttccgtgactttttcgcagtccattcttgaaagacaataaatgatgccacattcatcaaaatggttttcccggataaacttgtcaatatcttccaaacacttatttgtctttggaacaatagaatacctgcaaattttttggtaagcaacattctgaaagcagcatttcgttaagcta

SEQ ID NO: 5216 - DNA, 1852 bp, Arabidopsis thaliana landsberg
cgtacctttccaccagccgcttcacttccgtaagaacctgctctcgcgccgagaatttggagaaattgcaggatgtatctttgtccgtgtatagatccagaaacccggattcggcttttacggccgggtcggggcatcggaatccgtttccggataccggtttgaggaaatccttgagatcagctatccactcgagccgcgtgacagtccctctccaggcgatggcaatgtcgcggcgtcctaaacggcagcgcgtggcttcgttgtcgtcggatacagccacgtaacccatccaattggcgttcttgctccacaccttggaccatctcgatttggagaagaaattagggaggttgatgttcgacgtcgcgtagagataacgcgccacctcatagccagaatcgattatcccgagcgaatcgaacaagtgacggcgcgtgaatctgcagctcccgcagtaccttgaaaatggatcgaaatcgaaggcgtcgtaacaggcctgggccatttctccgtaccggatcagctcagatctcagaaccgggtccatcggatccattaacccggcccaatcatcttccccttggatcttccgccacgtgtctctcaacctcttggattcttttgcttctccatcccgtcggcgaatgtcctctgccgtcgtcagcccatagctttcttgctcgagccttgtagatattgaagcctcctcgtcggttctggacatagccctcgccggcgatgatcttgccgggaaagtgatcagagtagagcgtgaaaagtgtggtctgaaggaaagagagtactgagtcctttggttggtcgtatgaggacgaaggttgtgggagggaatggtcgccattgttgaaagctcgatgagtttcaaagtcgtaaccaaatttattgcactcttttataatatataaaagggacctatataaaataaacaataatacaataatgctcatgatgcatgcgtataaatcattttcaaatgtgttgaacttaacgtacaattgattgtttaaatccatccccgtattttggtacaaattctaaacgttttatttctaacagccaaaaaatcatgaaaatggtggaacatttgagaatatttggcagtcacacacattacggattaaaaagaattgttctcattatatcattttcttatgttcttctttacacatatctctctctttcaatctggagttattgggcaaagaaaagaacaactgagaaagggaatatagttaaactagtggcaaggatgcttagcttacattgagttcatgttctcgagtagagatatgcgtgataaaattatcaacgccttgaccagcaatacctggaccacaaccaatacgacggcacacagagcaaaagccaggaggcaggtccaggcgtttcactgcagctatcctcctcatcaagtggccctggatcagctaaaagaaagtttttccagagggtggaggaggcttctcgaggagactcaagtggaaacgggaaaatggagttgtatctattttcacgtcggcggctaatattagaatagaagcgtggaggaatgtacactggtggacgggatatgaccgtcatagtagatggacgtggattcaatataccatggccaaggaaacacgaaaccatgcttttacgacctgttttagaaactatatacttagagagactctctttatccaataaagggaataaaaagggaataaggatgagaaatgcttactgtagaactcgtgatgaagagagattccagtggaagaaaccgcttcaaggatgtcacgagggcctttgctagtgagccaacagcagtgatggtgcaggacattgt

SEQ ID NO: 5217 - DNA, 4542 bp, Arabidopsis thaliana landsberg
agcttctttgattggatagatgaagtaaactctcattacataccatatttcttattttatttgtttttccaatttctattttaatattaaaaaaactcttagtgtttattttaataataaattccaaaattaggtgggtacataccaaatattctttacttatgctaagtaatatattgtttttgaccaacaaaattatagatcagttttaatattctaatgtcattgagaaaaccacttctttaacaccattggacctcttacacattaaaatctcccccaaactttatagacttatagtactccacaaatttttaaaattgaaaattgtgatagagaaaagagagaagaaatgagtacaaaatggtgctcagaggtttttaagttggtgggggctgaagaagagtagtaactttgagcctttttgaccgtattggtgttgcgtccaaaaacaattacttacacataataataataataacaaagagccaacagatcttcgtctgtttctatttattcctttttcttgtctgattcgcagaaaaataaagagagttctttttcaagtaaaattcgaagagcagttcaacgaatccttcttctccttgagacatttttacccaagttggtctctttcttccttcttaaacaatagtagagttattattggtctacgactctgttgtatatgtgtatgtatcaccttgccttttctccaaagccctaattgatttttctttcttctttttttgtgtgtgctttaaaggtttcatttttaaaatcttcttggactccatttcttttccttttcctttatctttttgcctctctttgtggagtttttgaaatcatccctcatttcattcctattttcgttgtctctttgagtttgagtcagctttgtgttgtgtctaaattctaaacaagtttcagatctttaccttcctttgacttgtctcctgtcttaaaactagggtttaattttctttctctgttcaagtctcagatttgaccagcttggtccagaatttcgcttctcctcgatcataaagtaagtaaatttcaccaacccttttctctaagtctcctgttttagtcaaatctgatcttcgatgtgtttctagttggaatcaattttcttgtttgttttctgattttttctgtttcaatttttcatgtatgtgtgtgtgttgcagtcaaagttgattcaaagaggtttgattgagtcagagatctctcttttagaaacatgttgagcaaatgaaggtttgtttgatgagatgggttgtgtattgggtcgacccggatcatcaggatcagtttctgggtctagagacgaagttagtactaggattgagtctaatcgacatcaagttaacaatgtgtctgtgaccaaaaccgaaacaacagagagcactagtgctgttgttgttgcttctgcttctaatggtgaggaagttaggaatcatgaagatgttgtggatcagaagaaagagaatggctttgttgtgactgaggccaaggagaggaaatcgaaaggcgaaagaaaaaggtctaagcctcctgacccgagacggagcaacccgccaaagaatttgctcggtgagcaagttgctgctggatggccctcgtggttgtctgaagtttgtggggaagcgttaagcggatggcttccaagaaaagcggattcctttgagaagattgataaggtgagatcaaaatctgtttttgtttgttctttgcaatgattttgggtaattgaagtttgttggttatgtgtgtgtgtgtgtgtagattggatcaggaacgtatagtaatgtgtacaaggcgaaagattcgctgacaggaaacattgtggctttaaagaaagtgcggtgtgatgttaatgaacgggagagtttaaaatttatggctagagagattctgattttgaggagattggatcatcctaatgtcattaaattggaaggtttggttacttcgaggatgtcgagtagtttatacttggttttccgttatatggatcatgatttagctggtctcgccgctagcccggagataaaattcactgagcaacaggttaggccttggtgaaatagattcacaaatacaaaatccgaggcagatcctaaccttgttaataatgtctatgttttcaggttaaatgctatatgaagcaactactttcagggctcgagcattgccataaccgaggagttctacaccgtgatattaaaggatcaaaccttcttatagatgacggtggagttcttagaataggtgatttcgggcttgcaacgttttttgatgcgagtaagaggcaagagatgacgaatcgggttgttactttatggtacagatcaccagagcttcttcatggtgttgttgagtatagtgtcggagttgatttgtggagtgctggttgcattttagctgagttattagctggtagagcgataatgccaggtcgtaacgaggttagttctcaagtaatgatctttttctttccgatttgagttatttcatatgaaatgtgaactggcttaatgttcacgagcaggtcgagcagttgcataggatatataagttatgtggatcgccttcagaagaatattggaagaagattagacttccttctactcataagcatgctcatcacaagcctttaccacagtataagagaagaataagagaggtttacaaagatttctctcctgaggcgctttctctactcgatacgcttctagcgctcgatccagctgaacgccagacagctacagatgtgttgatgagtgatgtaagttttttgcaatggaaattttgaaactttgaatagaacaaactagttaggggtatcaagttagattacagaaatgagagtgacgctaagaatgaaaaatgcttggaacttgtgaatctttaggcgtgtgacttgatagtggttaaaacttccatggccgattttgttgttgttgttgtgcagttcttcacgacggagccattggcatgtcaaccttctgatctcccgaaatatcctccaagtaaagagattgatgccaagagacgagacgaagagtatcggaggtaaagcgtttctgttctagtatggataggtttggtacaatctcagttttagtcagaatatgttttggtttggtatatggttgcttgagagatgtattcatttctgcagacaaagagaagcgcgcaaggcccaaggagagagcggaagaagaatgagaccccgagaacgagccccaagagcaatgccggctcctgaagccaacgccgagaaccagtctaacattgatgtaagaatttaaaacaaaaaaagaagtgaatctttgattggttaatgtcttgagtactttgaacttgttctcttaaaacagaggatgcgtatcatcacacacgcgaatgcaaagagcaagagcgagaagtttcctccaccgcatcaagacgggtcactcggttttcaggtgggatcttcaaggcgactggatccatcagagataccgtatagcacaaactcattcacatcatcatactccaaagagccatttcaaacttggtcaggccctttggctcccattggagcacctgactcaaccacaaggagaagaaacgatattaacaaagagagaagaatggcttctaaggtcaaaggcaaaagaatcgttgtttgagataataattattattcatctccaaatttcaaaagtttcctttttgatagattgagaaaaaaacaaaattccaaattttatctttttggtgggttatatgttctttatttggttgttatgtgtattgtacaagagaattgacaaaacacagaaatgagaggaattaatttacattctatgtaaattattcatttgatccttatatttattgttctagaagcctacgtcattattgtaagagttgacgtaatataaatgtttttgaaattgaaaatatgtatattggtataaatgccaataaaaatcgtagctttcgtatatagagagacctaaaacttattaatttagagacataaaccccaaaacccaaagccaaatcagagattctgcaagacgagttgcagaagaaagtgtgggaatctctacttttggtaattattcgtcgcaagtaatggaagatagcaactccacggcaagtaatgtggctcgagcgattctcgccgtcgtcgatttcagctccacgtccgacactcgcaaatcggcggtccaattcctggattctgtaatttgttctgtctcaatttgctcgcttttagttttctgtaatcgatttgcgtacttatgttgcatgttgcatataatgatgatgtagctggtgtgatcaagcttaaaggaggatttgttgtactttggggtttaattaaaaaattgagctttttattcgtttcgatgattttatctcttggaacatatacgcaaacgtttttttttgtctgatttgattgattgattgagctcgagttggttctaattggaaatttcgtacgtttttggtcagaaagataaaactgtgggg

SEQ ID NO: 5218 - DNA, 738 bp, Arabidopsis thaliana landsberg
atatcacatgtcatgtggtcgtatcacactgttctgaccagtttatgtgaagactattaagttataataatccactatcacgaaaaataatccactatcacgaacgtagttattcattctatcacgaccatatcactaatctaaaccaaatttctagtgataagaacagaatgatatatttaaagctaatagcaacaaaagaagtagtgtatatatataataaatatatagttacaaatacatgaaagtctacgcaaatttgaaaagaattaaaacattttctcttagaggaagccacaaagaatagagggtaaacacttacattgttatacatgaagtagtaaacactttctcttctcaggccactactgctctctttcctttactgcttttggtgttatctttcttctttcttgaaacgcctgtgattggatgacccagaggacctgaccacgtctggacttgtgttggtggttcgtctttggaaaaattgaaagaagaggatgtgaaggatgggaccatatctcgtgggataaatgtcgggtctatatgctgtgaggcacccaatggtacacccattgctccaccatcttggtgtggtggcggaaacttctcgctcttgctctttgcatttgcgtgtgtgattaatctccttctctgctttttaagagtcaaaagatagaaatgattatgtaaaaaaaggatcagtctttgtgtgtgtgtgtgtgtgtgtgtatg

SEQ ID NO: 5219 - DNA, 1831 bp, Arabidopsis thaliana landsberg
cagcgagatccacatgaggatttgtttggaaggaggttatcatgtgcttgatgagtctacacattagggtagtggcctaataccaactgcaaagcaactgtggaagcctaacatcggtgtgcttgagctaggggtcttaaatgcgaccggtttaatgcccatgaaagctaaagaaggtggtaggggaaccacggacgcgtattgtgtggcaaagtatgggcagaaatggatcagaactcggacaattattgacagctttaccccaagatggaacgagcaatatacttgggaggtttttgatccgtgtactgtagtcacagttggtgtgttcgataactgccatctacacggtggtgacaaaaacaacggaggaggaaaagattcaagacttggaaaggtgaggataaggctctctactctcaaggctgatcgagtcatcacacgttcatatcctcttttggtgctacatcctagtggagtcaagaaaatgggagagattcacttagcggtgaggtttacttgctcttcattgctcaacatgatgtatatgtattctatgcctctcttacctaagatgcactacctccatcccctcacggttagccagctcgataacttaaggcatcaagcaactcagattgtgtcgacaaggctaacacgagcagagccgcctttgaggaaagaagttgttgagtatatgcttgatgtgggatctcacatgtggagtatgcgtagaagcaaggcgaatttcttcaggataatgggagtcttgagtgggataatcgctgtagggaaatggtttgaacagatctgcgtatggaaaaatccgataacaacggttttaatccacattctcttcattatccttgttatctaccccgagctcatcttgcccaccattttcctctacctcttcttgattggagtttggtactatcgctggaggccgagacatcctccacacatggacacacgtctctcacacgctgactcagcacaccctgatgagctcgacgaggagtttgacactttccctacttcccgaccatcagacatcgtcaggatgagatatgaccgactcagaagcattgctggtaggattcaaacagttgttggtgatcttgcaactcaaggagagagatttcagtcgttgctaagctggcgtgacccgcgtgccactgctctcttcgtcttgttctgtctgatagctgcagtgattttatatataactcccttccaggttgtggcttttgccattggcttgtatgtgcttagacacccgaggctcaggtacaagctcccatcagttccacttaacttcttcaggaggcttccagcaagaactgattgcatgctctgagttacttaagatttctccatttcaagaaagactcctctgttctagtttgttatcgttttgaagtccttacctcttctttgtgatgttggatgatcatgtttttttctgtttgacattatttatgtttatgtccttttgaaaactttctttggaaagtggtaactagtaagataagtttgtgtttttggattctcttctgtttagcctctctctctctctctctctctctttaagtcgaggagatgccaagaggaagaagataaatgcggaaagtatattttataatgtaaccaaaatttcagtaaaccgtaccaaacctacttaacttcggtttagtgtacgtagtggctaaatttctcgaaccaaaccgaaaaaccaattgttcaagcctattgaaaatcattcagacaatgtttgcaggggaatctaataaagttgggattttttttttggttttaaaaagaaagttgg

SEQ ID NO: 5220 - DNA, 5765 bp, Arabidopsis thaliana landsberg
ccaggaggagcttgtgaatccattaaatgtcagattttgccagcaaaaaagaagccattgccccctaaacagaatatagaagaatggtggagataaaagttgtcctccggataaataggtcctcacagagaatcaaaggtgtaatgacttgtgattctgaaattaaccaaaactttacctgaaatagctttagtccatacgattcctgtatgaatctgttcacagccctctcctccatttgctcagcctccggttataaaattaaagagttttggcctcttcaaagtcagctttgtctagaggagttctccttttctttctttctttttttgctccacagctcttcccattgtaagttttgttttccaaactaatcctttcaatccaaaaaccatgggagcctgtgcgagcaaacctaaggaatctgacatcgtcgaaggctctgtctcgaccgaaaatgctgttgttgagtccaagaatgccgcgaccgagacagatgccacattaactcaggtgagtccaatatattctttctaaataatttagtagatgatcttaaagattcttgaattgaataacatgaaatttaccaattaaacagaatttactacaaattcttgattgaacaaactcatattaagttaaaactattgttgctgattgttgattaaaggagaagaaggaagagtccattgaagagacaaagaaggaaggtgagacaaaagaggactcctctgaggcaaccaaggctgagccaactccagaagctgtgaaggcagaagaaaaaacatcttctgagactgagccaccagcacaagagaccacacctgctgctaaaaccgatgaggcccctctcgtgatcctttgattttcatttcatcaaatctcaaaatcatgagtatgtgcaagtgcaagtgtttctcacattgttattcgtatgttcatctctgttctattgtcaatatgtacaatacccatgtacattctgttgtgcccgcctctagtaaattatgattaacgaaaaattacaattcttttttatatagcttatgatgtgtaaatatcaacactaaaactgggacattcagttggcaccaagtagatcgatatctagactagaggttcctcctctatgtcccacggttgcagaggataaaatgaagaatgagtacatggcctacaaaatcttggttctttttgcatgtcgattccaactaccacgcatttatagcaaggatattaaatttccggtacggttttagttggatttcggagaaggcaatgtacacttttaccgaacaccccaagttttattggtcgtaaacaaatactacaggccaccatggatacatctagtgcgcatctatatcgaggctcaattaaaattttaacggaccccaatcagacgtgtctacgcaaggctcaatcgaccagtaatacaactataaataagcaatcaaagcagcaaatgggaaaaccagcgttatgttttggtatgagaatcatgtcagcaacaaccaaacggtgtatatattaataactatcgagagaacacaaccagagttaggtaggccttgttagattttcacaccaaaccctggcactatatatagacccatctagtctccaaagcataatagagatacaaagaaacaagaaaacgaaaggaaaaaatacagaaatgggtggtttgaagtttcatgtacttatgtatccatggttcgcaacaggccatatgaccccgttcctttttcttgccaacaaattggctgagaaaggtcatacggtcacttttttgattcccaagaaagctctgaaacagttggaaaatctcaatctgtttccacacaacattgtctttcgctctgtcaccgtccctcatgtggatggtctccccgttggcacaaggacagcctttgagatccctgtgacatcaactgatctcttgatgtctgctatggactcacacgtgatcaagttgaagctgtggtccgagccgttgaaccggacctgatcttctttgactttgctcattggattccagaagtagctagggacttcggccttaagactgtaaagtacgtcgtggtgtctgcatcgactatagctagtatgcttgtcccaggtggtgagttaggtgttcctccaccgggatatccatcatcaaaggtgctgcttcgtaaacaagatgcttacactatgaagaaactggagcctacaaatacaatcgatgtcggaccaaacctcttggaacgagtcactacaagtcttatgaactctgatgtcattgcgataaggacagccagagaaatcgaaggaaacttttgcgactatatagaaaaacattgcaggaaaaaggttctcttgacaggtccggtgttccctgagccagacaagactagagagctagaggaacgatgggttaagtggctaagtgggtatgaaccagactcagtggtgttttgtgcactgggctcacaagtcattttagagaaagatcaattccaagaactctgcttaggaatggagctaacaggttcaccgtttcttgtagcggttaagccccctagaggctcatcaacgattcaagaagcacttcctgaaggattcgaagagcgggttaaaggaagaggccttgtttggggagaatgggttcaacaaccattgctattgtctcatccatcagtcgggtgctttgtgagccattgtgggtttggatcaatgtgggagtctttgctgagtgattgtcagatagtcttggtaccacagttgggtgatcaagtcctgaacacaagattgctgagtgacgaactcaaggtttcggttgaagtggcaagagaggaaacaggatggttctcgaaagagagcttgtgcgatgctatcaatagtgtgatgaaaagggacagtgagatcgggaacctggtgaggaagaatcacaccaagtggagggagacagtagctagtcctggactaatgactggttatgtcgatgctttcgtagagtcattgcaggatcttgtctctgggaccacccatgactgaaagataggaacactatgacgtttctaagtagaagggggtgattaataaggttgatataaaccaaactatcttgaagtgcttatgtttccaagtgtgttttttcttgtttgtatggttcatttattgtttgatgtttctaagttgcagtgagtgatcatttaatgttttcttttttaataaacaaactatgtagaagtacctctgttttctagttggcttttagactgatgtgtttcttggttgtcacaagattgctttatgagttagcttctaacacaagaaagattcttgaggaaaaagtttataaatccattagggaatagagggaagatagtgacaaaaagatacaaagaaacaaactgaaatagaaaagaaagaaaaacgatgcaaatgagtttatcagagtgccaaaattgcaatcagaatcttcaatagtaccactttagtcaaacatctcttgttacagagagaatcatacaagttgtgagtgcaaagcttgtggatgagttacacaacgtcatcagatgagtcaatgaaacagtgagactttgtgtgagtttgtccaatagctacggagaagtaattctctcccttgaattcaacgatggtctatgataccttcttgggggagtcactacctgaagaaggaggcgacttagttttcttgatcaactcgggctcgaaaaagttgtaaacgtcttcgtcctgagacatatatatcacaactatgccaattagatatatagaggttcctctatgcaccaaaaatatttctcttgctaattgtgtcccactgttgcagaggttaaaatgaagaatgtactagtaaatatttaccttttgcattcggttccagctacttaactcactgattgcagtaatatccaaattttggtgcaactccttcatccctccaaatggttgcataaaagccactatgaattcattacgtagtgctttcctatgtaaagaatgctccatttggttagcttggtatctcatgaggttcttagatggcagcataaataattgctgtagcgtcgacactaaaacatatatattctcataactagccaatatacttttgaggctatgggaaatcgcttacccatggataaggctatatgtgggaaataggagaaattgttggttctagtccaacaattaaaacctgagacacactacttggaaataaagaggcctgtgagattaggcatctcactacacattactctagtagatcttttgggaaatggaaactggttggatatcagagatgaagtttgtgacaaaagaacttggtacgccacaaatcattctcggtacggccacttgttcaatcgattagtacttgttttacgagtcaatttctgcttcttacaaattactgtgttaatgggctacttagcaattgagactaaaggctttgtaaacattattttcatgtggtataatagaacggaatcttattaaatattggtaggtgaccaattgctgtaactcgcagcataaatgaacaatgccttaatttatttattttttgttaaattcaagttagatttcgttttatttttaaaggaaagaaaaggatgaaactttacaaaaaggtgatttcggtctatcgtcttttttatgatgacgggtagatatttgtgaagagagagtagtaaaagatgacagttgtttttactttttagttggattttgtcaaagataaatgaatgccgaccatctaaatcaatggtaacggaccaatcgacgtgtccacgcaaggacaaccaagaattttgatttaacgctggactgggtcataacaaaaatacatgtcaccatcgtattaaagtgaaaggtgacgagtaataaatcttttttttttggggaaaggacgagtaacaatcaagaacgtaaaagcaatgaaaaaaaagaagtaatcaagtagtaaaatgaccttaatcttaatggtcctccaagttacacatgcacttaccaaagtacttaaacaaatagtaaataacttttgagacagcaccgacgaagtgacattggccgactaatatactcacgtgttagatattttcataccaaccgcggcatcatatagattttagaccttttagtctccaaagcataatagagatacaaagaaacaagaaaacgaaaggaaaaaatacagaaatgggtggtttgaagtttcatgtacttatgtatccatggttcgcaacaggccatatgaccccgttcctttttcttgccaacaaattggctgagaaaggtcatacggtcacttttttgattcccaagaaagctctgaaacagttggaaaatctcaatctgtttccacacaacattgtctttcgctctgtcaccgtccctcatgtggatggtctccccgttggcacagagacagtctctgagatccccgtgacatcagctgatctcttgatgtctgctatggatctcacacgtgatcaagttgaaggtgtggtccgagccgtggaaccggacctgatcttctttgacttcgctcattggattccagaggtagctagagactttggccttaagactgtaaagtacgtcgtggtatctgcatcgactatagctagtatgcttgttccaggtggtgagttaggtgttcctccgccgggatatccttcatcgaaggtgctgcttcgtaaacaagatgcttacaccatgaagaatctggagtctacaaatacaat

SEQ ID NO: 5221 - DNA, 1346 bp, Arabidopsis thaliana landsberg
aacagcggaaaaactatctggcacagcagaggctcccataatcttggatttcaagcttgatttgtggcttggtttaagaacattcacctgattagccacaacagaatcaataaccaagttttaaaccaaatcaggaaaaaatgtatttagctgtacttcattgttgtaatgtccgttgtatccaccaaaagcaaccactatgtcttctccattgtatgagctcacaactaaactcaatccctgtcatcaaacgaaaagttgcagaggaaatcacaagactgatttattcaatgtcttggaaaattcaagtttcatgtgtcaggcaatatgagttggagacttttatgcaaaaaataagttggggatgtgttttaaatacctcactagcgagaggtacatgttcttggactgaagtgacaactgaccatgcaagagttgacatatttaatacaacagtcttagatgcccctgcggtaaagtaccagcaagtatcacaattaatcacactgtacaaacaaaaaaaccaagcaactatcaagtttttcccccaggaaaagttccagtgatgtaacataaagagcaacacatgcaggaatcaaaatgcagggaagagaaagaggcttttgaaggagaaacataccgcttttgttatctccaccaccaacaatataccaattttccccaatcgtcacaccagcgtgtccagcacgtggagttggtgcgtcaccttgttgtgtatgtcttgaccattccatctataacatggaaacatatatgtcaagaagcagacaaagagcgttgctgaaacaatagaagcttgacatacagtttgcagatcaaggacgtgcagatcatcaaaacaagttgcatgtgatcctccaccaaagattagaaggtaacgctcagcgtgcactgcagcagcatgatcagaccttggagtcggaggagaacccctgcaagttgacagcacattaaccttgaacttctgatctttcattaaaaactgagatatgaaaatagattattggcagctttatataatttcattcattttctcatttacattctagtctttaaaggacctgacttgttcaaaaacgagaataaaatgcaaaaaatgtcataagatcttacacggcatcaatttcctcccaggtcatggtatctaaatcaagtatatgcaaatcgttcagaagcgatctctttgcatcctggccaccaaatatcaccaagctttttcccacaagggtcactgactgacctccacgcgaaatctgctagcaagagagaaagagagagtgataaaaatattctcagcttataacaggttcgatttccaatatcag

SEQ ID NO: 5222 - DNA, 2891 bp, Arabidopsis thaliana landsberg
  unsure (1)..(2891): unsure at all n locations
ttattgttttagctcaagcaatcttaaggtatatagagaaggtctttgtgtgttcattatatcacttggtgttaaacataaggacaagccattactaccttctcataactgcttatttgtgagtagctaaattgtttattagttgagttttctttgttttggaaaaggaaatacctgaagaagtgtgggactgtggatctggagtcagagtacttgacattagtgaaaacttcattaaagaagtacctgccaaaatcagctcctttggttctatgcaggtgagaactgctaagtttcatgtatattttaaatctttctgtttagtgtagaattaaggattatgatatgactataatatgagcatttgtagaaattgttccttcaaggaaatggtctgtccgatgaatccattcaatgggaagggatagcatctctgaagcgcctgatgcttctgtccattagccataacaagtgagtttttcgctttcactcttggaactgtctttcttagtatatatcagacatgccttcaatgtttttcgacaagctaaaccaaaggaaaaattgatttgaagctgaagttacacgtaaatcgtaatcacttggactctagaacacaacatttatacttgtgaacgccgaatgatttttgacggggaaattgtttggttgggcttttgtttgtgttgcagtctaactgttctgccatcagcaatgggttcactgacgtctcttagacagcttgatgtcaccaacaacaagttgacaagtctaccgaatgagttaggacttctgacgcagcttgagattttgaaagccaacaacaacaggcaaataagctttactcatatcttttaattgatcgaaaacacaaaagtttcagtcgtagcattgtgattcattgattacattgctcatggtctctccatcgttttgtattctgcagaataactagtcttcctgagagtatcggaaactgttcattcctcatggaggttgatctttcagctaatattatatcagaacttcccgagacattcaccaaactgcgtaatctaaaggtaaaaaacaatcttttgactactctttgttccatggccatgggtttacaaatactgacttagtgtttcggtattcagacgctggagctgaataacacgggattgaagacgctgccatcggctttatttaagatgtgtttgcagctctcaactttaggactccacaacacagagataaccgttgaatttctccgccaggtttgtttgttcagagtttcatgttttgagtctatagttctttcttcgttatctgaactgaaacaaggatatttgtattatgacagttcgagggatatgatgattttgatgaaagaagacgtaccaagcatcaaaagcagcttgattttcgtgttgtgggatctggccaattcgacgaaggcgctgataaatcttggtgatcaagccaagtcgagtctcgaatcgtcagtactcttaatatatttgtggcactttcagtgaaaaaatctttctccttcatgcctatatattgtttgcttactccaatttgaattgtagtgtaccaaataaattgaaccactctcaaattgaatccaaaatttatgcaatgaaaccgaataaacgaaaactacgatacctattgttaaaaaagctcatcaattctatagccgagtcagtcagtataaccggtaaaaaggaagtagaggcaaacagcttttgagtctagaatcttgggttggggttaagaaggtggtgctcgagacttgaccctagattatatctttagttctttgcttcaatttgttctctgtaaatagattcacagagtggatattatttaaggtagattatatctttcggattcttatcgcgaaacaccacctgcaagaagacatggaaaaaaccgaaaaactcgaagatttgtttgatagaacatgtttagaaggtaacgggtgtgtaaaccacacattcagcaattgtacatagaaagaaagactaaaatagaacgagagagataaaatgggtctctatccccctcaagtaaaaatcagtcatctcacccacaagcatccaaaagataataacgtagggcagatgcagagacaaaacacacaaatttgctctcaagagtttcatctttcttcattctctcgaaacttttcacctgaagtagatagagacgagaggaatatcgacgtcattgtcatcttcatcctcacaagccaccactacatcaagatggttgcgataaggcggtaactcgactttcgcaacatcccgagcgagatccacaaccttcttgtccatcctctccttgtgccttgtgaacatactgttgaacagaagacagcttccacaagagatgctgtatgcgctaagccctttgtcctccagccactgcaacacctcacgaagagttgggtttcccttgagaacccatctgtcccaaactgtccaagccatgtcacggtgcttcaccacctttggtggaagtggttcagccatggagaatagtggaagtgccaggttggcaaatgtgtttctgtaagcttccactttatgtcctccatcaaggaccttgtacagctcgaggcagaccagcccagtagccatgnnnnnnnnnnnnnnnnnnnnnnnnnnnnnnnnnnnnnnnatgaactttgctttcagcttgtccacttcagggatgctgtaatttctcgccctcatgttggctagtcctgctatcacatccatgtgatagtttgtatcatcatcctacaaacacatcaaattcaaaatgacaacactcagttaaaaattgtaaacaagacaagtcaatatcagtgaagacgataacattggagggtaatataccttttcgaactgaat

SEQ ID NO: 5223 - DNA, 1693 bp, Arabidopsis thaliana landsberg
  unsure (1)..(1693): unsure at all n locations
aaaataaagtgggggaagaaatagaaattctaatgaaaataaggaacattatctaatacgcatctctcctttttcctaatgttttatgttgtgggaagttacagctgtttcctctttttttgatacatttatattgtttaaagtttcgtattgggatctgatgttgtgactctttttgtttatcagtttttctactttgattcagtggagtcactcccctctgaacctgtggactcgagtgactttgcaccaagaaacagccggtatgatgcccaaatatctgtatttggggccaagttccagaagaaacttgaagatgctaaagttttcacagtagggtctggtgctcttggctgtgagttcttgaaaaatttggctctgatgggggtttcttgtggaagccaagggaagctgacagtgacagatgatgatatcattgagaagagtaacctcagtcgtcaatttctgttccgtgactggaacattggacaggctaaatccacagttgctgcttcggctgctgctgttataaatcctcgcttcaacattgaggccctgcaaaaccgtgttggcgcggagactgagaatgtatttgacgatgccttctgggagaacttaactgttgtcgtcaatgcactggataatgttaatgcgaggctctatgttgattcgaggtgcttgtatttccagaagcctctccttgagtctggaactcttggtacaaagtgcaacacacagtcggttatcccacatctaactgaaaattacggtgcctcaagggacccaccagagaaacaggcccccatgtgtacagtgcattccttcccgcataacattgatcactgtttaacttgggctcgctctgagtttgagggtctgctggagaagactcccgctgaagtgaatgcatatctttctagcccagttgagtacactaactcaatgatgagtgctggtgatgctcaggcgagggacacattggagaggattgttgagtgccttgaaaaggagaagtgtgagaccttccaagactgcttaacctgggcacgactgaggtaatatcactctcttaatagttagttagatagtctagtcgtaatatggaatgaaatatagtccggtgtcttactcatgtcctgctacagtctcctattttatgcttttgtcatgtgcttcatcccaggattgcttaattattcgttgaaaacatcattacgaaactaaaaaataaaataaaaaactaggaacagtgttagaaggtaacttcatttcacaacaggtagctacaaccaatatgtagaagtgggaataaatcgtttccttcctctgtggagtctgtgatttttgcaataatttatgtgtttgttatgttatgtgactaggtttgaggattactttgtgaaccgtgtcaagcaattgatatacacatttcctgaagatgctgcgactagtaccggagctccattctggtctgctccaaaaagattccctcgtccactccagtactcgtcgtccgacccaagtctccttaactttatcacagcgactgctattttacgagcagagacattngggatcccgatacctgagtggactaagaacccaaaggaagcagcagaagctgttgacagagtgatagtcccagactctgagccaaggcaagatgcaaagattgtgactgatgagaaagcta

SEQ ID NO: 5224 - DNA, 1241 bp, Arabidopsis thaliana landsberg
ttatcacatgaaaaaactaaaatggggaaaaaacgataacctttaaaaattcccccctcaaaataaagaaaaaaataaaaagctaaaaaggcagtaatacacacgccatttataaataaggcaagtgaatataaaatagtgcctcatcatcatcagtaccatctcctcgttttgataaaaatctctgaatctctccaagctctcttctcatcaaccatggatccttacaaggtaaacccttctttcttttctctctaaccttttcgtcttttgtaatttctccgtataaactggattgaaacgttgttattagcttatggaattgcacccaaagttttgacctttttttctactcgaatctgcaaatatacaattaagtctttccattgctctaagatcatgtgccttttgacttgtgattctttcgaatcattgtggtttttctctgatgttaattttaatttcctttgcaattgatgatgatgatgcagtatcgtccagctagttcttacaactctcccttcttcaccaccaactctggtgctcctgtatggaacaacaactcctccatgaccgttggacccagaggtacctcttcttctcccatgaataagtctgttctcctcaatgttattgttgcatttctgattgtttttttgggcaggtcctatccttcttgaggattaccatctcgttgagaagcttgccaatttcgacagggaacggattcaagcgtgtggttcatgccagaggagccagtgctaaaggtttctttgaggtcactcatgatatctctaacctcacttgtgctgactttctccgagctcccggtgttcagactcctgtcattgtccggttctccaccgtatccatgagcgtggaagtcccgagaccttgagagaccctcgtggttttgcagtcaagttctacaccagagaggtcagttagtagtttgtaacatttaagaatgctagcaattacttatatactaagcaaatgatcattctttgtatgcaggggaactttgatcttgttggaaacaactttcctgttttcttcatccgcgatgggatgaagttccctgacatggtccacgctcttaagccgtacccaaaatctcacattcaagagaactggagaattcttgacttctttttccaccaccctgaaagtttgaacatgttcacttttctcttcgaagatattcggatcccacaagatatcaggcccatggatggttc

SEQ ID NO: 5225 - DNA, 1873 bp, Arabidopsis thaliana landsberg
tatacaggtgccagagttttgtctgaaagctgcaggttttatatttatagagaacacatttaatctgatggtggggcaagggggtacgtatctattgcttttacatatatacgtaactatggctgactcttgactaactctggatacaagtggttgaaccaaaccatatttgcccagaatagggacattctagttcctaccacaacaatttccgcaaattcgtgttacatttcataaaccattagagagtctcaccaaagagattaacttacgtgatacaaacaaacaaacaaatacaactccacaagaagctcagaagaaattatggagctgatttgtaagtgagctcttgaggtttgaatacaaaccataaagagaatactgcttaagattatcaacttcataccacgagttgagaaccgccaagtgcttatcagtgccggaaaacgccagctgaatcccaagactacagcccactgaacctccccggcctttacagctcggtgttcttatcgcacaaacttgctttttaagacacacaaaattctgattccctttacacgacgcacacacgtctctcttccaatacagattctgaagcctacctttctgaaactccatcaccttaaaagtcataacaacaccataagtaagatctcttgacgaatctatacataacatgtactgtataagatatgatatacaaaaagctttaccaaagtaaaactggttacgataaacgtgctgttagcaataaaagccggaatcaacctcgctgcgtatttccgacccgcgagtgccaacattatacatccacaaattaagggtccatgaatggtcaaaccatacttcaccaaatctgaattcactaccaattcaagtaatacttattataccaatttgcataataatttcacataaaaccaaatctggtacttttactattattagtaaagactatgaagcaatctaattagtggtaatctagtgagggcaacactaaatcttcaaaaaaaccaaagtcaaccaaatctatactctgaacagagattaataaaatgtgatttaactaaactaattcgatttatcaaataaacaaaaaattgatagaatatactttatcttttcgttagaggttccaagccacactctcaaaatgtgaacagaactaaatcatttgaatctctcattcacttctctacataaaccccactacaataatcacaaattcacaagctactttcttcttcatctcgacaacaaaaatccgaatacatgaaactaacaacaaagatctgagagagtggtaatatggtcctattataaattaggccgacttaatactttaccttccatgtggcttaacacgactaggagctttatcgccttcatcgcttgaatgtttggtctctattcccttagaatactcatctttctccattaacgtctttcccctcgcattggcagccgttccaagcgcaggagaagacatggttaggcgacaacagggagaaatttagtcgcgagaaaactaatcgccactctcccccttatctttgcatgcttatgcttcttctcgagcacttcttccagctcacggatcttttctaaaagcataacatgatccttgtagacagactcgtactgtgccacaaactcgtttgtgtatatgagcttgttaaataaattcaaggtcttgttgttattctctaaatagagattaatcatagactttagttcttcgttcttagacacatgttcttcgtagtcactaatgtatcttgaccatagcttggtcaaccagaatcatgcagttaccattgatattatactggagctaatatggaatagaaaatcaagattaatacttaaa

SEQ ID NO: 5226 - DNA, 3116 bp, Arabidopsis thaliana landsberg
  unsure (1)..(3116): unsure at all n locations
cattagtggctctggaagttctgaaattagtttaaatcgtttcacttgtggtgatattggtgggtttccgttgtatgggtttggtgttcggagggattgtaccggaaatcatggagctttggcggggaatttgccttctgtaatcatgagtctcacaggacttagggttttgtctctgccttttaattcgtttagtggagagattcctgtaggaatctggggaatggagaagcttgaagttcttgatctggaagggaatttgatgacggggtcattgccggatcagtttactgggttacggaatttgcgggttatgaatttggggtttaacagagtttcaggtgaaatccctaattcgctgcagaatctgacaaagttggagattttgaatttgggtggtaataagttgaatggaactgttcctggttttgttgggagattcagagtgttgcatttgccgttaaactggcttcaaggctctttgcctaaagatattggggatagctgtggaaagcttgagcatttagatttgtctggtaatttcttgactgggaggattccagagagtttggggaaatgtgctggtttaaggtcgttgttgttgtatatgaatacgttggaggagactatccctttagaatttgggagtcttcagaagcttgaggttttggatgtttctaggaacactcttagtggtccattacctgttgaacttggaaattgctcttcgttgtctgttctcgttctatcaaatctgtacaatgtgtatgaagacattaatagtgtaagaggggaagctgatcttcctccaggcgctgatttaacctcgatgaccgaggatttcaatttctatcaaggaggaatcccggaggaaatcactaggcttccgaaactaaagatactttgggtgcccagagctacgttagaaggtagatttccaggagattggggttcatgtcaaaacttggagatggttaatttgggtcagaacttctttaaaggcgaaattcctgtcggtcttagtaaatgcaagaaccttcgtcttcttgatttgagctcgaataggcttactggggagcttctcaaagagatttcggtcccatgcatgagtgtttttgatgttggtggaaacagcttatcgggtgtaatccctgattttctcaacaataccacaagccattgtcctcctgttgtttactttgacaggttttctattgaatcttacagcgacccgtcgtctgtttatctctccttctttaccgagaaggctcaagttggaacttccctgatagatcttggaagtgatggaggtccggccgtgtttcataattttgcagacaacaacttcactggtactctcaagtctataccacttgcacaggagcggttgggaaagcgagtctcttacatattttctgctggagggaatcggttgtacgggcaatttccgggaaatctgtttgataactgcgacgaactcaaagctgtttatgtcaatgtaagcttcaacaagctctcaggtcggattcctcagggactaaacaacatgtgcacttctcttaagattcttgatgcctcggtgaatcagatcttcgggccaatcccaacaagtctcggggatctagcttcacttgttgctcttaatctgagctggaatcagttgcaaggtcagataccgggtagcctcgggaagaagatggcagctttgacatatctttcgattgcgaataacaacctcacggggcaaattcctcagagctttggtcagttacattccttggatgttcttgatctctcttcaaatcatctatctggcggtattcctcatgatttcgtaaacttgaagaatctcactgtcctgcttctcaacaataacaacctctctggcccaatcccgtcgggttttgcgacatttgctgttttcaatgtttcctccaacaatctgtctggtccagttccttcaaccaatggactgacgaaatgcagcactgttagtggaaacccctatcttcgaccttgccatgtgttttctctgacaacaccgtcttcggattcccgagactccacgggtgattctatcacgcaggattacgcatcttcgcctgttgaaaacgctccatctcagtcgccaggaaagggtggattcaactcgctagagatcgcctcaatcgcatcagcttcagcgattgtctcggtactaattgctcttgtaattctcttcttctacacaaggaaatggcatccgaaatcgaagatcatggccactacaaaacgagaagtcactatgttcatggatatcggagttccaataacctttgacaacgtggttagagccacaggaaacttcaacgcaagcaatctgattggaaatggtgnnnnnnnnnnnnnnnnnnnnnnnnnnnnnnnncaagatgtggttgtcgcaatcaaacgcctctcgatcggacggtttcagggagtccaacagttccacgcagaaatcaaaactcttggtagacttcgacacccgaacctcgtgactctcatcggttaccacgctagcgaaactgagatgttcttggtgtacaactatctcccaggaggcaacctcgagaaattcatccaagaaagatccacaagagattggagagttcttcataagatcgctctggacatagctcgagcactcgcttacctccacgaccaatgcgtcccacgggtgcttcaccgagatgttaaaccgagtaacatcctcctagatgatgactgcaatgcgtatttatcagatttcgggttagcgagattgcttgggacatcggaaacgcacgcaacaactggtgtggggggtacgtttgggtatgtagctcccgagtacgcaatgacatgcagggtatcagccaaagcagatgtatgcagttacggagtggtgcttctagatctgctttcggacaagaaagcacttgatccgtcatatgtgtcgtatggtgatggtttcgacatagtgcaatgggcttgtatgttgttgagccaaggaagggcaaagtagtttttcacaccgggattgtggcacgcaaataagcatgatgatctagtagaggttctgcatttatcggttgtttgaacggtggattatctgc

SEQ ID NO: 5227 - DNA, 1635 bp, Arabidopsis thaliana landsberg
tggaatcacgttcctcatcctttccctctaccaacattgcgccatattcttcatgttttacatctgacagattgttaacatcttccccttcaccatgtagagctcggatcaaatcatcaacactcctgtcagtttcctttgtcatttgtacatctgaagacgatcttctatgatcctcagattccttagacgtattaaaaccggacgacgcttgcaagggtgaactggatggagctaaagatgttccatcacccaatcctttggtaaggcacacatatttgaaaacgagctgtttataactatttaacaagccttcaacatctcctatcctcaaatcaccagcactggcaaatatgtaaggatattcttgaaagactttgcttggctcggtatccttcagaagcgtcgcacccttattttccaaatctgaaatggattcagctttcttcattggtgtttcactgtttatattcagtaattcgttggtcccagaaagactatcagacgattttgattggaaaagagtgttttccctcttgggattcagactttgagttttctgaagagaggactcatcacgagggggtggggcagagccatgaccagtttgataagtctggctgtccaaaccagaaattcgtgcccgtgcagattccatgttcttttcaaactcagcttcatccagtgaaatagattttgcatcaatatttgagatgaaagactctgcagagagtatgtttgtgaagaagtacgcagcttcaccaacaaatttagattcacgcctatacctttgtatatacaacaagtttgagtgaagttgtggagggttagcctgcaaaaagaaagaacagaattagcactagtagatgttcttgcacattcgaaacataatcatgtacaacaaaaatacgacttcagataccagtatgcataagttgttcaatcgttcccaatacctttattgttacatatatcaaaacaggaagaaattcgtctgctccaggtgcattctcgtttgaagcaattgaagcatttagcagtaagttattaatcactttgcaacagttaaggatacacacaagcttatcacgaggagctttgtacatgtttatcttctggagctctttttgagctagctgccaaaaggagagaaaggatcacaagtaagaacactaacaaaaagaggaaacactaccgggagctagcttttgactagatcggcttaccagccatgacgattcattttgaaaagttggttgtatatccaaattctcgggagaaatgaattgttgaaccaatgacatcttctgaaatagcttctcatcagctataacctcctcagtgtttgaagcaaacacccgagtaaatagctttgtcataacatacttctccaggccctgtggatacaaacgagcaatgattatggtacaaagatgaaaacaattcacagacagaaaaagaagaatactgatactcacatctccagcactatccaattcctcctcagaacaaccagaccaaagtggatgagccctgaaagcagcctccatcttagaaaagaactcctgaaccatagcacaatctttttccgggtctggtgcattgttcgagaatgaaacaatgaaactgcaacat

SEQ ID NO: 5228 - DNA, 1323 bp, Arabidopsis thaliana landsberg
  unsure (1)..(1323): unsure at all n locations
acaatgaaattgcaccatcaaccaaaaaacatctttaaccacgcattatccacaatacttctatgctcaataaacgaaccattccagtatgaaatcaataatttctaattgttataccctattaccaagatccaattgtcttccccagtagcagcaattgaagaagcataaataaatgattagaaatctcaaatnnnnnnnnnnnnnnnnnnnnnnnnatcatcatcaactgaaaatggacttaaaaacgtaaaccgctaagaagcacatccacttaagctaagaggaagatcgtacatagaaacacacacatatatccggatctgcatcaaaagagggagaaatgggaccttttaatggatttgacgaaatcgccggcggagggtttgcgcatccgctccaggaaatcatgcagccccaagaagacgtccgtattctccatcgccgatcacccgattatctccgacgattgaccagtgagaagagtaaagttaatgagttccgtgtcgctgactaccaataaacaaacaaaaccacggtcgtttatttattaagttccggttattggtcctggtgttgttaagttagtgaatctaattcggtcctaacccggttttgggtttcgttcatcaatttcacccaacccatcaaccaacgagcgaggacacctgactccgtcaaatgaaacacacgatacgaaaaacctcgacgtcatgtccagtaatttcatcaacttgctttgcttttgcaaatgattgatttttgcaatgatccaagctttacgaaataagataacaatgaaccgtttcaactgtcgagcaaaagtcttacaagtagtgatagttgagagttttgacccacaaaccacaatcaaagcccccagaatcaattacgaggaaacgaaaaaccaaacggtccaaaccctaaacctaaatcgcttctcaagtcattaaacatttaccacacgcgagtttaagtttgttcaaaagagcccacagaaacatcaaaggaaatacaccgttaagatagtgcaataatttgacagaagcgctcaacaatactttttcatccagacacttccccgctgaaagcacaaaaatctcagacaagctcttttagataagatcagctacattcattggcatctcatcaatctgggtactgtagtactgctcaatgtctctgagaatcttgatgtcgtcgcttttaacaaagttgattgcaacaccctagaaagataaccgcaaaattggttaaaagatatccatctagtatctccaggctaagaaattaagctcagaagcagagattagaaaaagtttc

SEQ ID NO: 5229 - DNA, 2854 bp, Arabidopsis thaliana landsberg
tataagtaataattaaggaataagaggatatcctttattaaaaaatgtaggttacttgtagaattaaaaactggaatcttataatatgattagtataataagattacgctatatctggattctggagatatcatagataagctctgtctatgaaaacgagacccttggggaagccacgtgtcaaatctatctctgtcaccagcgaagcatacgtggcgagcagctcctagaatatccaaattcacaacagtattttttttctttcgttctgattcaacagttgtcacaaacagccaaggtgttatgtgattggttataaatactctgctatgtgagagagtataatatactacattcacaaacaaactaaaacttaaaaatgggaaggggtgagtttttggccatgaagactgaggagaacgcggctaacctgatcaattccgatatgaatgagttcgtcgccgctgcaaagaagctcgtgaaagacgtagggatgctcggcggggtaggttttggcacgtcagtcctccaatgggccgcttcaatcttcgctatgtgagccaaaagacaaaaccatataacctctctggtttttgtttgaatcatatattgatatgatggttcttattgttttgctttgacagttatctgttgatattggatcgtaccaactggaaaaccaaaatgttgaccacccttttagtaccatacatctttttcacacttccttcggttatcttccagttctttaggtaatcaagaaaaactcttctttaacatgatgtgatggagttcttttgataatgtaatccatattcgatataatttcacagcggagactttgggaaatggattgctctcatcgcgatcatagtcaggcttttcttccctaaagaatttccaggtcagaaccagcagttttcatgactaaacattagtttgaaactttgatcttgaaaatcttctttcttttttgcatataaatgtagagtggctagagattccggtagcattgattcttattgtggtggtgtcgccgagccttatagcttggacactaagagaaagctgggttggagcagtcatatgtctagtaatagcatgttaccttttccatgaacacattaaagcttctggtggattcaaaaactcttttactcaaaagaatggaatctccaataccattgggatcgttgccctcctcgtttacccggtttggaccatcttctttcacatcttttaagtcaatccgacccattggtttgtagacacattcaacattttgtgtcttcaattcgttttcaaggtttgaattttataaggagcatttgtgtttgagaaagtcttgaatataaaaaagaagtttcaatcgtgcactgctgacttgtaagattgttttttttttcttgtaaatgtgtgacttgtaagatatataaataaatttgcatattggttgatttgttgaatcaatcttgaatattgtagactttttaattgatcatgactaatagttgttttttgaaaattgtttttcatttcattaacaccaaacaataaagcaacacaaatttctatcacctcctagcattgaactacgtgccgttgttcgtatccaaaagtgtatattcttgtaatcattcaccgtcaaagctcaagtagttagtagcaccacaccagatttccaaagcacaaagctcatgactagccttacctacacactcgatgaaatcgaaggccctttcgaagttgattacgcagcagtgacagtacacaacttcctggtggggagcgtgtaccgttcttgttcacgatcaagcagctcgtggcatcgcagaggatactttggtcccaagtcgatcccttcagcattcacccaaggccacgttggaaataaatctgatcgtaaaacacaacatctgcagattattatcaataaaaattcagaaatcaataaaattcactctgaaaacgcagaaaattcataagtgtttattattcttttcaatatatgaaaggaggagctcccctactattttttatatttttagccaatgagagagctccactgcataccccacttttaccaatcgtgctatttcacagccactctcactcatgtcgcgttgagcgcgtgtctacgatttctaaaggggttaatccacaaaaatcatgcatttttggatccacgcacctcattctcaaaaacccatcgcgtgtcgtattttttttggttttcttctctaaaccaaagtaaaccgaaccgagatcaatttgaatttcaaaaccaatgtaaacccatcgctgtgaaaacaaaaagctcggccactgtaacaacaaaaatggagacgacacaacttggaagagaatctattactatctgaaactgaatcttaaagacagagtcatactgttttaaacctatttttatcaccatgagaacttttttgctaaaaaaaaacgtctgaaactgaaatactgacaacaaacgaaataaaaaaagttttgaggtcgcttggctaggatatatcacaagagacttgctagttgctactgtcatcgaataacgatcgacccaaagatgttgagacgaaaaagatattaattcctttttttttttaacaatagatgatacatataggcttgcttataacaaagagaaaataaaagttgcacaacaaaatgggaagaagcattaagagagttcctgagatccttcactcaaggaccttcacaccagaaacataaacttcgctttgaatgacactgccaccaattcaaaacccaagcataaccataagaccaactcttgggttcttttctttttcattcacaactattttcttcacaacacttt

SEQ ID NO: 5230 - DNA, 413 bp, Arabidopsis thaliana landsberg
acgcaatcttagactgagccactagattgtgaatagattttatgttcctgccaaaatcattattacacagggtaggggataaaaatcatatgaagcacacttgctatgagagatctatgaagcaacagtgaagccaacgagatttaacagcactcaagtgaaacacttagacttcactttactatcgattagaaagaagagacactcaaaggtacaacctgggatataagctacatgatagctgatgaacgagctctgtcacataactaccagaagttgtgttctagagaaagcctcaggtagttgcgtattaacactagcgctagaggacagaaatgacaaataccgaaatagatcagagagaactgtagtttcactctttaatgtcgtgataatcagtcttacactgttag

SEQ ID NO: 5231 - DNA, 1909 bp, Arabidopsis thaliana landsberg
ttttttttatgcaaaaatatatgttagtcggatttcttttagctaattcatgcattttttgattgaggattaggacacccccttgccaaaaatcaagatgagcatgttcagctatctgtagatctagcctctgatgtcacagctctttctaaattgagaatgagtctccgggatctaatggctggatctcctgtttgtaatggtccttcctttgctgttggtcttgaatccgcatatcggaatatgtggaaaaagtactgcaaaggtgaagtgccgtccttaaggcgaatggaaatgctgcaaaaagaggtccatgatgatcccttaatctcaaaagacttgggaccatcaagagtcagcgctactggagaagccactccgtctctcaaggccaatggttctgctcctgtaccttcctctttaccaacccaatccccgcagctctcaaagagaatggactccactagctagataaccagcaaatcgagctgctgcgaaatgccggcagagagtcttgacccatctggaaaaggtgtgaaagaaagagtcgatgagcttttcctgctatttacttccaagacaataggaactagactttagattactgcttgtgtagtaaaaagaatagtaaaaccagctctttcttttgttgtatctctttctactcttagtttagctttacatgattcttgggaagtcgttaggtggtagtggatttggagtttttcttctcatttgagagatcaagttgttgtgtatcgattagggttttaaggctttttaggatgttttcatgtgttggattttgactcatatgatagtaaatatagttatagaaagcttttcggtgcctttacctatttcataatataattatctaaaactcctgcttaagcttaatcccataggtgagacccaatgaaagacttttgacttgtatgattatgttgccaactccatatctctctttaattaattaatatggagagagtaaaaaggcaagcaactaactactcttcaattcaacacttcttctgctccattgcttccaccagaaccctaaagaccttataaaacccaatcccaaatccctttgctcattcaccaccaaagcatccaactttctttgcttcctctttcaaagcaacacaaaatattaaatctcaagaaacaaagtaaagaaaaatgaagaacgaatctaccttcattgatgtccctgcagaatccagctcagccatgaaaggcaaagctcctctaatcggtgtagcaagagaccacactactagtggctcaggtggatacaacagaggactcgccatctttgacttcctcctccgtttagctgccattgttgcagctttagctgctgccgccacgatgggaacaagcgacgagactcttcccttcttcacacagttcttacagttcgaagctagctacgacgatctaccaactttccagtacgactcatagatgcttgattgatcaaacagatgcttgtgtttttcttgagaaacacgtcacctaattaggtcatattttttcttcaggttctttgtgattgccatggcccttgtaggaggatatctcgttctgtctcttccaatctccgtcgtcacaatccttcgccctctcgccaccgccccaagactcctcttgctcgttcttgacactgtatacactcaaaactcttcaaattatattgctttaaaataagtctttagtatcaagtaaaatactaagaattgtgttgggaacagggggtcctggcgttgaacacggaggatgcatcatcggcggcagcaatatcatatctagcacacagtggtaaccagaacacgaactggcaccccaaatgccaacagtttggagacttcatgtcaaaaatccagcggagcatgttgactct

SEQ ID NO: 5232 - DNA, 4881 bp, Arabidopsis thaliana landsberg
acatcattgtcccctttttccagaattcacgtttaggtacccctatgtctctctcattgtcaaaaaatactctaaaagtacgtattattcaaaaaatgttggatctttttgaactatttagagatccatcgcggaaaaagttgacacaaagtgcgtgaattggtcacatgtgtatctacatacagtggctaagagagtgtaaatagtatctactactttcatggcttttggttcagatgctcaagtgagacttgttctgctttttcttggaaacatcttaaaacacatgattagctgcgttccacatatttacttttcaggtgggtctttcgttgacgttgaggcaaactttttcttttttcgttggacacgttttgagttgagttcttaagcagaaataatggagatatcagatgagtaaaaaaaagctagtactggtcagagaatgattctttctgtcttcttctatatgtttttgctgcatatttgtcgattagattgttttgttgcagttcaagactccaaaacattgttcaaaggttcaacattgatcaatgacagccatggagagactcttgtttcagctggtcagagatttgagcttggcttcttcactcctaatggaagctccgacgaaagaaggtacttagggatttggttttacaatttacatccactgactgttgtctgggttgcaaatcgtgaatctccggttcttgaccgttcctgcattttcaccatctctaaagatgggaatcttgaagttattgattcaaagggaagagtgtattgggacaccggtgttaaaccttcctcagtatctgcggagagaatggtaaagctgatggataatggtaatcttgtgttgattagtgatggaaatgaagcaaatgtggtttggcagagttttcagaatcctactgatacatttctcccagggatgaggatggatgagaatatgactttatcatcatggagaagcttcaacgatccatcacatggaaatttcacctttcagatggatcaagaagaagacaaacagttcatcatttggaaaagatcaatgagatactggaaatccggaatttcgggtaaattcataggatccgacgagatgccttatgcgatttcttactttctttccaatttcacagagactgttactgttcacaatgcctctgtgcctcctctcttcacatctttgtataccaatacaaggttcaccatgagctcctctggtcaagctcagtacttcaggttagatggagaaagattctgggcacagatttgggctgaacctagagatgaatgtagtgtatacaatgcttgtggaaattttggtagctgcaacagcaagaatgaggaaatgtgtaagtgtttgccaggttttaggcctaatttcctggagaaatgggtcaagggagatttttctggtggatgttccagggagtcaaggatctgtggtaaagacggtgttgtggtgggagacatgttcttgaatctgagtgtggttgaagtaggaagtccagattcacagtttgatgcacataatgaaaaagaatgcagagcagagtgcttgaataattgccaatgccaagcttactcatatgaagaagttgatatacttcaaagcaataccaagtgctggatttggttggaggatctcaataatctcaaggaaggctatttaggtagccgcaacgttttcattcgcgtagcagttccagatataggtaaacaatctcttaccgactttaaaacatatgaaatgcttttaaaatgcattaagatatataactgttgatggttaaattgctgttatcttgcagagtcgaccagtagagattgtgtgacctgcggtacgaatattattccttatcctttgagcacggctcctggatgtggcgacagtaactaccttagtttcaactgcaatatgtcgactggtcaagtcattttcaaaggatctaacagctcatacaatattacaagtatcaatccggatactcgcagattcttgatcaaaataaaagatgtggtagtaaactgcacaactgtaaatcagatcagcagactttcagagttaaagctatcttcgccttttcatctcacggggaagtgcaacgcagacacggttactggtggaactgaagtggagattcgttgggatcctcctcttgagccaacttgctctttatctgcagactgtaaagactggcctaattcatcttgcagtaaatctggagaagggaagaagcagtgcttctgcaatcatgattttaagtggaatggattcaatctaaactgcactcaaggtaaagctctgagtcaaaactcatttcaaactcttaatgctaagatttaccagtttttctaatgaaggttctcatgtagaacgaggtcgaggaagatacggggaagctaaaaccccggtggttttgatcattgtggtgacgtttacaagtgcagctattctggtcgttctgtcaagcactgcttcctatgtatttttgcaaagaagaaaagtaaacaaggaactaggaagtttaccaagaggagttcatttatgtgacagtgagagacatatcaaagaattgattgaatcgggaaggtttaaacaagatgatagtcagggcatagatgttccatcttttgagctcgagaccatcctatatgcaacatccaacttctcaaatgcaaacaagctaggccaaggagggtttggaccggtttataaggtttgattgtgatctttggatctgattttgattttagactctttgtttatattgaatggagaattaaatattttgtggcttgtgtgacgcagggaatgtttcctggagatcaagagattgctgtgaagaggctatctcgctgctcgggtcaaggactggaggaattcaagaatgaagttgttttgattgccaagctccaacaccggaatcttgttcgacttcttggctattgtgttgctggagaagagaaactgttattgtatgaatacatgccacacaaaagcttagacttcttcatcttcggtaagtagagctccttgtctcttctctaattagtctttcttctgttctgctcttaatgcaatgatctggttcttgcaaagaccggaagctttgccagcgattagattggaagatgcgttgtaatatcattctaggaatcgctcgtggacttctctatctgcatcaagactctagactgagaatcatccacagagatctaaaaacaagcaacattctgttagatgaagagatgaatcccaagatctctgactttggcttggctagaatatttggaggcagtgaaacatcagccaatactaatagagttgttggaacctagtaagttttgaacacttctatttgccttagcatcccattccttagcatttatggtaaaattaaacattttggtgtcctttcattgcagtggatacatgtctccagagtatgctttagaaggtcttttctcattcaaatcagatgtctttagtttcggcgtggttgtgattgaaactatcagcgggaagcgtaacaccgggtttcatgaacctgagaaatctttaagccttctaggccatgtgaggtttctaagactttaaacttgtttatgcagattacttgtctaaaaacttgaccgagaaacatatatatcaatgtgcaggcgtgggatctctggaaagcggaaagggggattgagttattggatcaggctttacaagaatcatgcgaaaccgagggattcttgaagtgcttgaacgtaggacttctctgtgtacaagaagatcctaatgatcgtcctacaatgtcaaatgttgttttcatgctcggaagcagcgaagctgctactcttcctactccaaaacaaccggcttttgttcttagacgttgcccttcatcaagcaaagcttcctcatccaccaagccagaaacttgctctgaaaatgagcttaccataactcttgaagatggaagataataatagttttcaacattcatttgagccatcagctaacttttctgtatttattctcaataagcataagatttcaaccgaaaaaaaaaactgtaatagctcatcaacctaagtcctgaaacagagaaactttcaatgaaatgagattttggctttggaagaagccatggagaatcccgttagctgtgaccttatcatttgtctgcggagagtctctacagaggaaactagaccgaagcgtcatcttgattaaagcctttccatgtctcagcaaaaagattgcgaggctcatttcgttctcgcactctacgaatccgtgaatctccacaaattccaagtggttcaagaaagattctaattcataggcttgagattcccagtactgaatctctgagtttgacatatcccacaaatccttattccattgctacaaaacataagcaaaatcaaagacaattcagttaaactgagaaagagaaacaaagaaaaaggtttatttatttgactacttacccttctttcacttgtttgatcatcaatgattttgacggtaagtatgtttagcattggacagctcttgaacagacatgacagtgtttgaacattgtgtctattcaaacgtgtttgcagttccaagaatctcatgttgtgaaacggtagaagatgattctttaatagtcccttcttactcgacaaaatctgtcacaacattagtaataaaactatgaagcaaagagcaaattgcagaagaagaagaaggtgtaagtatgtgcaagtgtgttcacatatatacctctacggattggtttccaagttgtagtttataggaatgacagagacctgacagagagtgaataagcttgtatctgagaatgagatctgatgatg

SEQ ID NO: 5233 - DNA, 4024 bp, Arabidopsis thaliana landsberg
atgtaaagagctcaaccatttggtcaagctagtatatcgagatatgatgtccttagcagttagaacaatattcacgcctccatggtccatctatattgaatacaattaatgcaaatgttgagtccaaaagactaaaatgccgattatgttcttgacaatgaaccttttaactctcaacagtactcgtgacaagagtggaaaattgaaaatcagtagcactgcgcgaatgcaaatctcctctgtcacaaataatgacgcatactcttccttaaaggaaaaccttaagcatagcacccaaacgatatgtgcaatgcgatcactagcctaggccacttgtcttattgatcacgagttgatcccgtccaggtaagtccctagcactacaaagaattacgaaatatactgaataacgttttattttttatcgctataaaatacgataatgatatgttttatatgaataaatcaatatggataaaaaaacaagtggatggaatttggaaccctaatcgaataataatgtgtggaaatataatttgttgggacacctctagtgccattggccatgtctctctcagaatttctccgaatgcattacatcaccatcagttataatttatctccctttcaacaaccaaaggtaattcatctagttggttaatcttattacatctgattatttcttatgtgacgtatctatagtttttaataatagtagataaacataggcagccttcaacgaagaaaacaatggtatgcttaagagagtttgaatacgatcggactaatctacaaaactaattaaataattgaagctaattggtagaattgtttatccttttggttcaacctccctatcttgttcaacaggagactcttctgttagttgtctcctctcacacgtaaccctctccatgattctaaggatttcttcttcagacaaactttcccaataacgaagaatctgaactagtaaaccttgagaaggtcttgattattcttaaataatactccagttaaaaaaggatcggatatattattgaaattgaaatttacctaattctggtcaacaaactcattagctacctcaactatactccaacgaacccgttccatattatctatgtcacactcatagcttaattagctcacgaatatcatcaatccattaattacgtacttgcttttatgtccgatatacagtatgatgtgatgtagtagacatatcaatccaataattttcatttatttgaaattatattttgtggtattttatcctttaatcaacatatatagtcaccaaaaaaagctatcattaattaatctctaactaattagcattcaatatcgcctcacaaaattttattactatattttacactctcaaatacaaaaaaaaaaactctatttagaaagtgatagtccaagtaaatttctattcctaaaaaaaaaaaaaaaaaaaatctttgtaagctctcatttttttaaaaagatcatgttttttctgtttgtttaattcctctagttgcttgatttactttttgtttgccttcttttttggtgtgtgtaaaagaagccgaatctattacaatatttggtcagtaaatctttgccatccaattagcacgaacttctaaacattggtcatatgtatgaaatatccacgtagtcacatacatgatacggtgatcataaatcgaattgaatcgtgtagttaattgtcgtattatataacaagtaaggaactattacaaatgtattcttaaaccggtaaaaattcagttcacccgacgaaccaacttccaagtagtagtccaaatcatagattcttttgaggttttaaatgtaccctcacgtcagaatctacttaactctttcccctttttctgtctctctttcaccttttcttctccatcgatcttacctccacggaacttcttatttaaatcaaaaaaattcagaatcttttaatctcacgcaggcaaatgtctcgtaatttaatctatagaaggaacagagctctctgttttgttttaatcttgttctgcttcccttaccggtttggcgctagaaacacgccggaggcggaacaatccacagcaaaagcaactcaaataatacacgtcagcaattccacgtggcatgatttctctcgtcttgtagatgtccaaataggtagccacgtcagcggcgtatcagagctcaaaagatacctccaccgattcggttacgtcaatgatggctccgaaatattttcgcgacgtgttcgtatggtcctctggaatcggcaatctctgtgtatcaagaaaatctcgggttacgcaataaccggaagactcgacacgagtacagttactctcatgtcgttaccgcgatgtggcgttagcgatacgcacatgaccatcaacaacgatgtcctccacacaacggcgcattatacgtatttcaacggtaaaccgaaatggaaccgtgacacgctaacctacgctatctccaaaactcacaaactcgattacttgacgtcagaagacgtcaaaaccgttttccggcgagctttttcacagtggtcaagcgtgattccggtgagtttcgaggaagtcgacgatttcacgacggctgatttaaagatcggattctacgctggtgatcacggtgacgggcttccgtttgacggtgtacttggaactttagcacacgcttttgcgccggagaacgggaggcttcacctcgacgcggcggagacgtggatcgtcgacgatgacttgaaaggatcttcagaggtggccgttgacttggagtctgtggcgactcacgagatcggtcacttgttgggattaggacatagctcgcaggagtcggcggttatgtatccgagtctccgaccgaggaccaagaaagttgaccttacggttgatgacgtggcaggtgtacttaagctatatggtccgaatcctaaactacggttggattcactaacgcagtcggaagattctattaaaaacggcaccgtatcacatagattcttgtcggggaattttatcggttatgttctgttggttgttggtttgattcttttcctataggtttataggcataaaaaatactgtttttattcatttatttttaattaaatgtacatatatttttcaactatgtaaatgtaaatatatagttgaacaaaaaaagatgtacatatatagttaggcttataattaggtttatggtcttgatgatagcttcctctaagggattattattctttgattcattactttttgagtttgtgtatatcattatctcaaaaatttgaaagatattgatgtttatggaactatacatgattggtcccacccctaaaggcactaatgactaattcataggtgatagattactttatatatgtgctccaagtaaatactgtttttttcccaatccaaactagattgaggaaaaaatgtagataaaatatctgatctactttcttaagatcctaccttcatttctttttcatagtaatcttttctccatatttacaagctatatacattagtttcttgttcagacaaaaaagaaagaatataattccattagaaaaaaaaattcattaaacagaatcttattttagttaagaaaacagaaaactgttttaagtttttttggctaaatatgtacacattatacaaaccttttttgaaagaaaataacatcttggtgttttgtatcatcattttttctttaacatcattatacaaagttacaacaacttgaaaaaaataattatataagcccattaaatcttgtatcataagcccagcccaaagttataaacttttcaaaatgcaaggagctaaaaaacaagttggttttgttggtttcaaataaaaccaaaccgtttttttaagattacgaatcgaatggtttatttttgctaaatcggttaggttctctctccagacctattagtaaacctcttgacaaagattaggcggtcgtctctctgaaattttctgaaacctcttaaacc

SEQ ID NO: 5234 - DNA, 2470 bp, Arabidopsis thaliana landsberg
gattttcatgcccgagattgggaacagtttctaaatggcaccaagattttccacaaaaagttgtatcttggtgatagctatagtttcaacgataattgtccagtcttccaacaatattgttatatatttttttctaatgcatataacctcgtgacgaaatatttaagtagtttaatagaattttatatatcaaaaagtatatatagtgttgcaaaccaagttgtggtagaatagtagtttccatttgaaatatgaagtcttcatgtgcgtatagtttagggattaaaattcttcaactatttaaatttattcggtccgaaagtaccctggttaacaacaaaaaaaaacatgttgcaacgacagaagtttatgtttttatttcataaaaactattggccaaacatttgatgtcaaaagaaaagaaaaaaaaaactgtattaccaaacaacatatacttaatcaactctaaggggaatgtagtacttaccactaccaccttaacgtaaatggtgcgaagatattcatggaaaatgatagtctatactctatacatgattaaaagagattggtatagtgttgtgttaactgttatatttacatggagatatcatttcatggaaacttgattaatgatccctctaaagaaaaacaaaattttgttcgaagtctttgtatacttattgatttatgataggattggcattttatttaagcagtagtgccaaaacggctacaaaaataaacgatacgacatagatataaaatgaatacaaaggggccaatgccatgaagatagatgcttaattaaaaaggtacgagtaaaagtggatttgggagcttaaaaacccttccaggagtatcctcaaccaaatcagcccattggtctccaatattcccaacgatgttgtaccctttcttcacaaggctattcctaacctttgacttgtacaccacatgcgtcaacttcgatccatttggcctgcgtttccatatatagtccgcgatattcaatcacatatgacattatttgctatatgtaactaagctacttgattaattcttacttgagtatgagatgcttccattttgttacaccaacagccttgagattctcgacagtgacttctgacaattttttccatctgtcagagattatgatgggttcaatcccgagttccaagaggttttcgtatagatgcaaggtctccgggagtcctggagttgattctccggactctaaccacgaccagtacgcccccggggcagtgttctcggtcctaaaaaaaaaaaatacattaaaatgaaatcacaaagtacatatggaccaaaaaaaacagttaggtgggttaattaaactatttagagttgtcaaatgaaacgtgtctttccatatatgacagctcaacattttcaaaaaaactatatgacgataatattgttaatgcaatgtagataggtacaatattaatatgtatatacccatatccatatttggcgtagtagggaatactagagaggagagtgtcgtctaggtcaaagatccaaacattgatggtatcgttctttagggcaagtcctttggcgtagaaatatgcctctttgtttacagttttggagtcgtattggtactgtttggaagtgatcaagtagtcttcaacataggctttgcaatttgcgggcaccgtgtcgaagtttatgatgttagaggtctcaacaccaaggtgccagcttctgcagtttgcgtttttgatggaaagtttctctttctctaagagttcggcttcgttcccaaagatggtgttcgattcgaggagttcgatgagccctggaacggattccgagacttgtagcggtcaagagctagataagtgaaagtgtgaggattttcatgtttttcatggtatggtttattgtttagtttgtgatgtttatatgtgtgtctcaaagggtggtttttataatgaggcggggttttgagaaattatttttaatcctgatttgtattgatgtgattatgtgtgctagtctgttttcgattggtgcaacaaatgctactggtcccataatgtttataatcgacgatatttttcacttacaccactcgtttttagtgcacgttgagattgtgtgcttaactagaatttggcgttttgttgttctattatctttggcttttctgcttgtaaatattgaattagagtttcattttggagaatactgtaaagttgttctacattactagaaaaatgtattgaatatgttgatgtgagtataattagagtttacggaaataatatatagagtaaatgtttcaattttttttcattaaataattgattgagtaattgggattaccaattaaatgcgataggagtttttgacacctgcttcctcaattagcgagatgagataggtgtactgttgtgggctataaaaaatcatacatttccacattaaatgtgtttgtcat

SEQ ID NO: 5235 - DNA, 3828 bp, Arabidopsis thaliana landsberg
aaccgaagtagaaacatcttcatctgaaaataatggaaaatgcaaactttagaaaacatgacaaagaggaagaaagaggtaaaaagaagactcacacagagaatatggatatctcaccttgattttcctcataagaatgtctttcagctttgttattttcatcgtcacatactaaggaatctctagattcatcgtcaaccaaatttctgcttgatactgaagctagcggattgtgatccacatcaggaggagacccagttggataagtttttgtttcgcggtggatgtcatccaaaagagtctcatccaaatgttgagactcactaaattggtcggaagaaatcttagattcagcagatggtttcaagacagaggatgatagataagaaacgtcttgcttctcaattgaagggcattcatccttcagaggggctttactgctgctctcttgagcctctgatgaacgaggcaaagcgacattcttctgcaggttaggtctacccattttcacaatttcagccatagttctttgcccagggttagcgctagcccaagctgattgatacgcaggagaaggcaacaaagacaaagtaactgcatcactgggggtcgttggtgctttcttgactttagagcttggaagatcactgcaatgcaaaggagatactaagataacacaaaatattggacattgttacgaaaattagataccaaaagaccacatgaaggtaagaacctgtttgatggtggttggcgtctaagcaaaccaggtaggcgtccaagcaaaccagatgatgcagaagatccagccaaatgattacgtgctccgttttctcttctattcacaggtacaccttgaatttctcctgtctctgaagcaaaatccagaaacaagtttagacatttttcaagataaccaaaaccacaacgaacataagaaaatagagaaaactatctcttgcacaatttgcatcttattaccattagatttatacttgtttctgccacctcgagaggtattgtaactgtcattaccgcttctagctccacgattcgggacattacgcgtccaggagtctgcatggtctttagtctgaacaaacagacaaataaatgaaaatcagataaaaagattttaatcatctaaagctatatggcattagtaactaaactagtagctgttttatgttatattcgacaaacctctttctttttctctcgtttactcttcacctcatgaaaagtatctgaaaagttttaacgaaacaacattataagaaactgtaacataaaaaaagagaaaaaaaactgatttatatatttatttccagaaacagataacaaaaaagattcaacaaaatccaaaataacattactatttcaagaaacttaaggaaaccaaataaagttctgacacattctcttatacaagaagttctaacagattcaacatgattgcaaaaatttcttcacaaggttaaattaaaactccttgaagttttgattttttttttgctattcaagttccattaaacaaattcgaagctaaaacccagaaactaaaaaagagagaaaaagctattgaagctggaagaacgaaccttgagagagaagacgattaacagattcatcaggattcatatcgcactcaacaagcatcgcataaatctctaactcagaacactccacaatctccttcaaatcctgaataaccttcctcgaagacgccggaacacctccattcgcgttactaacgctgccgccaccaccacccattattcctctctctctccggattaccggaaaacaacacaaatcagatttcaattcaaaaacttcttagattcacgattctttgacgagcaattctaaaacccaaaataaagattcttgatgtttgtatctctttcgttctattgacttcgagtatatcggaagaaaaagaagaaaaaaaccttttttttatttattttatttcttttggatttgggactaaataatgagttcgggaaaaaggaaagagattcaaatttttggaaagttatgtaaagaaaatggtatatgtgttaattaccattatttggtagcttaattactttttttattaactttatatatttttagcagattttcaattaagacatgaataggttttggataatgataagcttaattttacatattttttttaaaacagttgttgtctgagattctattaaaaaaaaggcttaaaaaataattggagattttttttgaaattttagattcgagaaaagtaaaggtcacgcgctactaaaacaacgcgcggagagaaagaatctgggagtttttaaatgattgattaatggataaggacgttggtccgagcctacgtgtaatatgggcctaagcccattatacctaacttcaaattttaaaagaattaaaaggagaagcacgtgtcaagttacaagggtgagtagctgagctggataaaattctatacgtgtcatcttattacaggttaagaacccgcccaccaaaagtttttgatcggaataaaaaaaacgtaataagcttctctcattcgtggaattgtctttcagaaagaaaaaaaccagagaggaggaagaaaaaaaaaactcttgcttcttcaggtaggtcttcttcttcttcttccttagctcaatctaattcttgttgtttttctgcaattttgattgttaattatctgtgtttaacgtttcttagcaattttattttggttttatcggttgacttgtgtttgagtttgtgaaaatgatcaaaaattcctgttacagatccgtatgtttatcttactatattctgtaatttcatcaacaagctgacttttttttgcagtatctgctgctggtttgatcttgagaccatttcttttgcagcttgttgttgtatttctagagactatgccaatgccatttttgaaaatgaagagcaagataagcaaggactcgttaagagagaaaagagttcttggtgtttgtaagaaacctcataaggatgttaaaaattcatgctttgatcccaaaatatcggagagaatggaacttttggtcactgctactcagaattgcaacaacaacgaggaacagaatataggtaaggcttgtttcttgaattctacaaataggtcggtcatctttttgttttaaatttgttctgatgatgcttttgattactataggtttggattcttctactagggatgttgtaacaaatgaaccccaagacctgctagttgaagacagttccaaaaatgcgtcgaatatggatacaatattttcacctgttcttgatgatgaactgtattctgaaactgaccgaggtatattctcttactctttcatttttttatttaagctgtctttttgattgagaatcgagtaatctaagaatggttttccttagtatttgtggaagggaacaatgtgcaatgggaaatgcctaggtggggagctgatgactgcagcaacaatcagttttgcaacgattctgattactttctatctaatgtgctgattgcaagcttgccattctatgagagtggaaatgttgattttttcactgagataagtcccttgcctcattgtatctttccagagccaagtgtgttactagatgcagctgagcagtacatgttattaccttacttagaagatagatcagccagcagtgatgatgttaagtctgatgaggataacaggattaatcggtcaagatcaaaaaacttggaagcagcagagaatcacactgaagctgaacaaactgaagattttgatccacagattttcttaagaaatcaaccag

SEQ ID NO: 5236 - DNA, 842 bp, Arabidopsis thaliana landsberg
  unsure (1)..(842): unsure at all n locations
tccgaatctgaatcaagatatagtggaaacatttggaatttatttcttattccttgttaccgagatctcttggcaatgacaggacgaacatcgttggcatcagccaatgtctctaagaagggaagtaatgtaatcagannnnnnnnnnnnnnnnnatcataccaacttttaatagggatcccattgtttatttgcaatctgtacacctgaaacaagaacaatgagggtccatgtaatactcaactaaactacaaattctgcactgtaactatcgttctttgaaattcgatttgcttgtggtgtctatcactgagactaaggtaaaagcaaaaattaatgaaacaaaggtagtgaagtgaatcctttagaaaatacctgtggacagttgtcaactatagccacttttgctagatcaagacccaaaacggttaaatccttggtataaataccatctgaaagaatgcatgaatcccggtaaaaacgttgcgatacaaacttcccatctggatccaatatatctagaagctgagacgcatagatgctgtgactagccgtgaagatgacaacatgaaaaagttcaaccaccctctctaagaacctataaaggtatggtctttgtttcacgtaaacagtgttctcttgcatattgaaagtgactctgaaggaaaagtctgtatctctacagacttccagagtcgaatggaccagagtttctgcaatgtcatttaaagatgattagtaagtgtggttgtaccatggaggcaaaacttaaccaagtggttcatatcataccatccaaatcaagaccaagggttaccgccttccttttcggagagtcccta

SEQ ID NO: 5237 - DNA, 3782 bp, Arabidopsis thaliana landsberg
cgtcggaggaggaaccgttaaggttcggtcaattggttcggagaacggtagagatatgtcaaaacagacttgaaggttgtctgatcacctctctgtacgtccttctcttgtcaacccctgttttctttggcttcttatttgtagcaacgaactatttccacatcatttctctgaccggatcaggcgaaaactcatactactattctataaacattgaagaagatgccgaaggctattacagaagcagcagtgtcaacagtccggtaaagatgttgtttgatgcggttttagctatgtttcacggtgctatctttctcggtttactggcgatgttcagcaagtggagtgcgggatggaacatgggtttggttgtttcggtgttagaagaggaagaaaatggtcaaagcatatatggaaccgatgccttgacactgtcttctaactatggaaaaggacatgagaagcgtggtctccaagtgatgctggtgttcttggtcttcgctattgcgatgaggatgccatgtttttgtttcaaatgcacggagagttccaatggaaacagagtgttgtacacgagtttctatgtgggtttgatctgtgttgggaatatgatcaaatgggtggcttgtgtagtgttttatgaagattgtagaactagcgttttggagaagaaaggtgatgtggagattggatcaaaaggtaagacttttgttgcatagataaattgtcttagatcaaaccaaagctctcgaatcttaaacaatttctacatgaccaatagctctggcctcttcaagctttccttatagttgctccgtttaagccattaaggtcatatcccaatgtattgttgtgtgagactatcagtgttcatggcttggccaagtatttattgaaagttatattattgagttgtgtttgatcatgtacacttatacaatgtaaagcttaattttatcttatctctaacataaaaaaaaaacgaaataaaaaattctaaatatatgttttcataagaatgatattggacacacgtcttagattaactgacttcacttcatagttaggctttcactgttatctctaatacttcgatcaagttttttgctaatttccatataatttaattacaacaaagtgtaaatagttctaaattgacaatctaagacttgaagcttatctagtaaaaccccactactaatcaaacattacatacagtgacttatagaccaagtcaagaagtcaacgtcaatgaaggacgaccattaaattactcaaagacttattaccaattacatgttccaccactacacatacagatctgtgacctctcttcttctattgtgagaaagagatcaacaaatggagacaaagagcgaggagaagctaagtgtcatcgaactactaaaacgagctcttaagctactctttggtaacatcaatctcgctctcttcctctttctttgctctctcccactgttttgtttcttgatcttcttcgagctctccctccaaaccactgtctcactcgcttccacatacatctccaaactagtcaattctgaggaggacttgtcggagaatgatcttcttccttggctgattcagacaactctgctctacttctttccctatactattcttgacctccttaccaccaccacgatcgttgcagcatcatcgattgcttacacatctgaggaagagccgctagggttgctttatttggtagggagatctttcaagctatgtcagaacaaagtaggaggttgtctgatcacatctctctatgtccttctcttgtcgacctctgttttcctcggtttgttctctggttcgaccatctacttatattttgcttctctcacactcgaacaacaaatattctttaatcaagcagtggtgcaagaccaaagattccttgaacaagcagtggttctgttggatgtggtggtagttctgattcatggtactgtcttcatagttctggctgcaaagttcagcaagtggagcgcgggatggaacattagtatggttgtttcggtcttagaagaggaagaagatagtaaaggcatctatggaagtagtgctctgtctctttcagcttggtacttaagaggacaagagaagcgtgacttctggatgatgctagtgttcttggtcggcgctcttgtgacaaggatgccatgtttatactacaaatgcagtgaaagtctgagtgggaatggagtgttgtacactggtctctatgtaagtttgatttgtgttgggaatggcatgaaatgggtttcttgtgttgtttggtaccatgattgtaacacaagggtcttgaggaaaaagggtgacgtggagattgggtcaaaagcttttgctacatagagaaattgtttgtgagttgtgaccaaatctttaacaatttctctatcaccaatagcttttgctctctacttgaaataacaaattgaagtttaatagttctcaaatcagaagacacttctagtaaaaccctactagtcaaacattaccatacagtggcttgtagaataagtcaacaagtcaatgaaggatgctaaccatatattaatatatgttctactttacatacagatctgtgattaccctttttcttctacttcaattgtgagaaagagatcaacaaatggagacgaatagcgaagagaagctaagtgtcatcgaactactaaaacgagctcttaagctactctttggtaacatcaatctcttgctcttcctatgcctctgctctctcccactgttttttttcttgatcttctttgagctctccctccaaaccaccgtctatctcacttcccaattcctctggaaactactcattctgggagaagacttgccggaaaatgatctgattctcatatcagagaaaaagaatgatctgatttcatggctgatccagacatttctgctctacttcttcccctacaccattcttgaccttcttaccaccaccacgatcgttgcagcatcttcgattgtttacacatccaaggaagagccgttagggctgctttatttggtagagagatctatcaaaatatgtcagaacagagtaggaggttgtctgatcacatctctctatgtcctcctttggtcaacctcagtttttcttttctttttcttgttcttttttcttcagtttctctctggttcaaccaactacgtatccattccttatctctcacgcgaatacaaagggttccactaccaaccaacgggtctattcaacgtggtagtgcctctgactcttctgatgcaatgtactctatttatagttctgactgcaaagtatagtaagtggagctccggatggaacatgggtttggttgtttcggtcttggaagaagacgaagatggtcaaggcatctacggaggagatgctctgtctctttcaggttggtatagaaaaggacatgagaagcgtgacctctggttgatgttaatgttcttggtcttcggtcttgcgacaaggatgccatgtttatactccaaatgcagtgcgagtggaaatggagtgatgtacactggcttctatgtaggcttgatttgtgttggcaatttacttaaatgggtgacttgtcttgcctgttaccatgattgtaaaactatggttttgagaaaaaagcgtgatgtagaacaagctaaaactcctgctgcttaagagactttggctgagatcaattcaaagtgtgaatctttataataaatggtataaaagcagaaaggttattagacttctcagcttc

SEQ ID NO: 5238 - DNA, 878 bp, Arabidopsis thaliana landsberg
ttcccttgtgaggtatgattgatcggcgatctcttggcagctcatctgcatcttactctccccacaacttagttttatcaggaatctgcatcctcaactcgaccaacatcagctagaatttgcttgttacattgtgtgacttttagattgccctgctctttactcaccactcctaccccaagtctgcaaccaagcttctattgagaaagacgaatctgtttcttcaccccgtcctcttcctagctctcggctgctatatcaccacttggtttctctactcacttttgtttttcggtcaactttgttacacatctgttggtggatcacacacttacattaaattaaacccatttgtggatgcttcttttttatattgcttgtgaaaaacgtgttagcttagtcttttgtgttcatgatttggtttcccacttatgcttttcttttcccaattaatctcgacttttaatctgttcttcttcggccgccacatgttttcattttaatacttttctaaatttggttttgaggcaatttggttcagatttgttggtataccaattcttacgtcaacgtcaatgaagaaacgactccatatttacgaataaaaaactgtagtagatctgtactctccctttttctttgtagagaagaagagaactgtgaaagaagatgaagattgaggaggatctaggtttcatcaacatactcaaacgagcaacaaagcttctatgtggtaacatcaatcttgttctcttcctcttcctttgctctctccccctcttttgtttcttgatcttcttcgagctttcactccaaaccactgtctcactcgcttctcaatacctcgttcgacaactcactaattgggattactacta

SEQ ID NO: 5239 - DNA, 309 bp, Arabidopsis thaliana landsberg
  unsure (1)..(309): unsure at all n locations
ggagcgagggtgagggcggagacannnnnnnnnnnnnnnnnnnnnnnnnnnnnnnnnnnnnnnnnnnnnnnnnnnnnnnnnnnnnnnnnnnnnnnnnnnnnnnnnnnnnnnnnnnnnnnnnnnnnnnnnnnnnnnnnatagaaaacccacatgtgcctctatctggatgcagagaattcaattaacaaaaatctgaaacaaccacgagctgagggtatcgataaacgccgacgcgagatcgctcgacnnnnnnnnnnnnnnnnnnnngcgtgagagtaacgcgccggtaagaggaaggtcgctctatag

SEQ ID NO: 5240 - DNA, 657 bp, Arabidopsis thaliana landsberg
gaatagcttaaaaatactaagaaagtgaagcctcaaaaacaccatgtctgtgcaatattgagagcttacgagctccgacaagatggaaaaaaatagcaattaatgagccatgaaacgaactagatactacttcatatgtaacatatgctaacacttatctttctgttcaaatgtgtaattcaacaaacagacaacaaaattgtttcaagtattcatttgaaaacacaaaataatattttacaattactgtttataattcatatctatactattatccaattcactaaaaaacagaaaacaaattctgtaattactaatactactattttaaaaaatatagatactaaattttatctaacacatatgttaaaataagaaatcccgcacgtatgtgcggatcaagatctaatactatatgtaaagaagaattaatctaagggtctaaacctagctaactaaaaatgaccataagtcaaaattttacggatttgtctaaaaacactcacaaaatttcttgctcttatataaggcaattggttattaaataatacataaaagcaactaatttaatatttgtggataaagtttaatatccataatattatatgaaccacaagtatatacatacaacaaatgttacttcacacaactaatttg

SEQ ID NO: 5241 - DNA, 2029 bp, Arabidopsis thaliana landsberg
ttagattaagaagagaaaagggcacatctacaatgatacataggcaataaaactggaacttcaaaaatttatatatggtcgggaccacaaaaaaaaacagagaaatcacaaaaaataatcaggggtcttccgagtagtatcaggttcaacttgtcgaggagctggatcgaactggaggaagttttgctccatgttctctcctatctctagaatggcagccatgtttccacaccggtagcaatagtttggtgcactaaacacagtcaccacattcttatcctgttaccatacaaaggagagatcaacgattcaatctgagagagagactaatcatgccgtaagaatgttcatacctgacaccagttaaaaccttccatgacaagttgatgcgctcttgatatgagacttagtccattgttgtgattaaattgagctgcgatatcctgtccaaatgtataaccagcacctcgtggagatattccccatccacatcgatcatcaggatcagaccataataaatcacacataggtccttcgtgtggaacctacagatcacacatcatacatagttcaaagagctgaacaataagatgtcataaaaaattccaaacgtttgtgctctttgtaattgtatcttaagtagagacaagacactgagacccaggaaggactcataactcttccaactaagtccacactaaggcctttagcagagaacaagaaggttacctcctgtatccgatccaagcttcggatattatcaagagtatccagagaaggtgaaagccctccatgcaaacagaaaacctacaaaatttgatgaagtcaaaaagctgtacttagaaaaagatgtatcaaacaccaactgagaaagaacagctctaacctgactctctatgagggcggtaagaggaagataatcgaaaaggtctgtaaaatacttccagacgttagcatttccgtacttcctcaagcattcgtcataaaaaccatagctgaaacagagaagcaaaacatgcatcaaaacaggatagtactttgctgatcagccagaaaccaatgaagaaaagtacgattcgctcaaatataagcttatttcaaaacaaaagcttacacttgagtaatctgccgactctcgtgattccctcgtaagattgtaagtctatccctgtatcgcacttttagtgccaccaatagagaaactgtctctactgaatagtagccacgatctgcaaagaacaaagcaagacaatgagaaaccaacaacactccttttaaactaaatctagctgtcaccatcttatggtacaccaacgaatggttaaagttccaaggatctaaagactagaattcaagggaagtgcaataatgaaagtgagcatcaacaagtctctatattgggaagtttcagtacctaccattccaaaaaaaaacagaacccacaagtaactcactctagataaataaaaaggtggatacttttccaagaattcaccattttggaatgatccaaaaacacagatctaaaatgagaaaaaaaagtaaaaaccccaaaaataaaatcgaaagaagaagaaagacagacctacatagtctcccatgaagaggtagttagtatcaggagcgttgccaccgatacgaaagagctcaataaggtcataaaactggccgtgaatatcgccgcaaacggtaacaggacacttcaccggctgaacattatattcctcgacaaggatcgctctcgcttgatcgcaaagcgtcctcacatccgcctccgataacggtttacactccatcagctgctcgatctgacggtccagatctccgttcgacggcatcttgaaaagccaccaccgatcctatatacgaaaattacggcggataaagaagatgaatcgccggagaatctatcggccagagctaagatatccgaatcggagagatcaaatcctcctagcttctctggtcttcgatagttcgatgtctttctctctcacctggctgagaaaaaatggatatttggtttttt

SEQ ID NO: 5242 - DNA, 1549 bp, Arabidopsis thaliana landsberg
aggcggtgcctttctctctctctctcttaattaccaaggtacctgaattattatataagatcatcattacacaaacccgattaccttatcttctctctcgctcttggcttttgttccttgcatgcaaagcaaccctttttctctctagctagaactcgaattccttctaggtttttttggggttctattttgtcaagagatttgatcataatggcgaaacctggttttaatcgaaacaaaaagatggtgaaacatgatgatcttattgtttcactgatgagtcgtatttcagaggatacgttgctagaaattgtcggacagagggtagagaacatgtatgccaaccacacagaatctcaaacgaggagtcctggaaaacaccaaactgttgatcacttgatcctaatatctctggggatgcagggctaagaaagaagagaaagccttgtcaccgatcatcttcttctcccacgaagacaacaacatgtacgcgtgcgctggaacaacaaagatcaatcacttccgtggaaccagtactacaaaaccctaatccaggtttagaaccgtctccttcttcttatgttactcgtcggcagggtccaaagaaaaacgtcccattaatgtggaaaagaaaagtcacaagaaacgcaaaatcattagtcctttaggggaggaacccattcaaacaactccacaggagtggctcttgaacgtcatgaggagagaagagaacggttacaatccgaagttgatctcaacgaggcaactgtataagaccgatctcaaaaaaactgaagcacgtctctcagttccttttaagcaggtgaaaactccggactttttgacagaggacgagacaagaatcatacatgagatgccatgaagattcgtgacaatggtgtgcctgtgaatttcgtggatcctgagctgaataagcatgtgcttgaattgaggaagtggaaaataaaaggaaactggatttatgtctttgttaaaggttggaaaaacgtgcttgatgcttgtaagacgttgtttaaggaagacgacgtctatcctctcgggacttcccgatctggaacaggcaaactctgttttgctctcacccctaaaaactctggccgtggaaactctcttcctggcggtgatggcgcttctacttccggtgaatctggtcaggtaccattacccattcctccggcaagatattctagcaactccggccaaggctgttcaggagagagcagctctagttcttcctaatcataactctgcttatttcttaagccacaagtaaaaaggatttagttttcaggcaattcaggcttggttttctttcttttttgttcagttgatgaaacagtggggttttgtccaaatagtggggtttctctttttgttcagttgatgatatgatgttttgaatttagattttttaaagcttaactttctagttgaataatttgaaagttcttttagttatcctttgagagtttgtttttttatctctctctgaaatatgcctgaagctgcctaagtttacttatgcaga

SEQ ID NO: 5243 - DNA, 429 bp, Arabidopsis thaliana landsberg
cttcccttgttctttagcaagtgttgcaagttttgttacaccttcagcatctcccagagaagaataaagaagtaacaaaccactcaaatccatcgcatacttcatgcattcctcagccatttgcagctgtcatgatgacataaaaacggaaagagttagttggaaatccccacatcaaagacaaatccaggagacgagaaacagagattttgctgttgctcccacatttctaaataaatgtcagaatcataatgtaaatcataaaccatttagtggaaaggtttttttgtgtctcttatcattacaaaacattaggacgaaatacaaagacaaatatatacctttccggaggacatagctaactctcctaattgtttccacttagattcgctctgtacttccacagcgatttcctacaggcataaataa

SEQ ID NO: 5244 - DNA, 625 bp, Arabidopsis thaliana landsberg
  unsure (1)..(625): unsure at all n locations
ttcagtctgcatgtctatggtcttactgcttacaggtactctatctactacggacccgatgaaactgccgtgagtcttggtaccttaaacgctgccgttttagatacttttcacgaacgtaagtctcgaagtcacacggctttctcagtggatttcattgccgagggtaaccctaacggcgtcgttttcaaagaattatatgtcaaattaaaggcgaaacgtaagatttacggaaatgtctttggttatgctggacatattgatataaggtgtcaaaatctaacccgaagctatgagaacgttgagaagattcatttccactcttcttacacagatatggaggctttgactggaagtcgttgttattaagccttttcatcatattttttcaccatataattatgtgaattatattatttttatttctggtttttaacaaactgatttcatttaaaagtttccaattgtgtacatagtctccaaagagaagtgtattaattatttcgagaagttaattaccgattntaaccaaattaaaaaaaaaacttctgttaacattattctatttgatagagtctctacangatgaggacctaaaaccaataactgttatccaattggaata

SEQ ID NO: 5245 - DNA, 2389 bp, Arabidopsis thaliana landsberg
ttccgtgaggaggctaacgacaaacgggaagaacaatgctttcccttggccatctcctgatggtaagcggatagtgtttcgttcggggcggactggtcacaaaaacctctacataatggatgctgagaaaggagaaagcggtggtctatggaggttaaccgaaggtgcgtggaccgacacaatgtgtaactggtcaccggatggggaatggattgcgtttgcatcagatcgagaaagccctggctcgggtagttttgagctcttcttgatccaccccaacggaacagggttaaggaagctcatccaaagcgggacgggtgggagaacaaaccacccgatcttcagcccggacagtaaatcattagtcttcacttctgattatgctggaatctcggcggaaccgatctcgaacccgcatcattaccagccatacggtgatatcttcacggtgaaattagatggctctaatgtgaggaggctaacgcataactcttatgaagatgggacaccggcatgggcccctcggttcatccaccccaacaatgtggagctgcaaaggaggaatgattctaggtgctcgttcgaagactgtcactggctcaacaagtaccctacactaaaaggccgaaaaatatcttgttaatatgtatctacagttttgtatcccagcttgtaactctacttatagatttgtatgagactgccactgtatatgcataagactttgtattatagagatcgttaatgtgatatgtatatcatattgtcaaaacagtcgtgataagatatcaaaccctcttctaaatgatagtcttgctattgcggtttggaatcctcatgaattatccaatgtcaattcaatctcagcgtgattgaagacaggtttttaaattccaaaatctcttctttaatcacgtttataaatcagttttgatacattattactatgttttgcgtacgtgtcagaagattactatccatgtaatgtctgaagaattaggtgcgagtcaaaagtcataacagtcgataagatatcaaaccctcttcgtgacttggaaggtttgaggcgggggcgggaaaatccagaaaacgtcggataatgtttataaaggagtctctccgtcaccggagaaaaattagaagaaaaaagaggcgaagaagagagaggaatggcgccagttcttcagagctcacagccatgggttgagaaatagtacgatttcttctcactgattttttatttcgttgacggaatttatgtggggtttaataaactcattgtttccgatttggatctagccggccgaagcaggttaaggacgtggctcaccaggaagaggtggttcgtgtcctcaccaacactctccagactgctgacgtaatttcactataacctctttgtttatcgcgaaacaaatccctaattattaaaatctgattttgtacaagtgtgaaaaaccctagatgtcgaatttggttctcaattctgggttttaattttttgtttgtctctctgttgtagtgcccgcacatgctcttctatggaccaccaggcactggaaaaaccactactgctcttgccatcgctcaccagctctttgggtaacgtattcatttgataatttgtgatagctgaaattcggatgactttttgattgattcatttgtgtgtacttagtttgtatgagaccttgtgatctctaatatgatacattcagatttgtgattcaaataactcggtttttttttttttttatgtagaagctgatataatatgcacactcagactctgtggttgcataatgatataccaacttctcccattaggtagctagacagtataccaagatgtgaattcataggaatagtaatcattatgatttttctatgtaagtggttagtttttgaagctgaattgtcttgttcttctttccattgcctccatgggtgtcgtcccatatgagtcggtttcagcttcttttgagagtaataatcacagatttattttcatgagcctggccttgttttgttatttcattttgctatattatgtggatttttacaatgggcatgtgaactaactatagagtgtttacagacctgaactatacaagtctagggtgttggagcttaatgcaagtgatgacagaggtattaatgttgttcggactaagatcaaggattttgctgctgttgctgttgggtctaatcatcgtcaaaggtgtcgtactttttattaagttttttttttttttggggtcatttttcttggttctgcatttcatctaagaccttcgatttgatacttcaatgggtatccttggccaatcgttaagatcatcatcctagatgaggctggtttgataacagaagatgctcaagtacgttg

SEQ ID NO: 5246 - DNA, 293 bp, Arabidopsis thaliana landsberg
aatccagacaccacccagtctgttatgtgatgtttcacgcgggttcgatcaatcgcatgttgttttgtgatcatttccaataacacaatcccaaaactgtagatatcgctcttctcagccaaccgacttgttctgtagtatctgttaaggtaagaaaatagtaaaagattcactcatatgcattcttaaacgcgaaaaatatccgtccacacaaacctcagcatttttgaaaaaaaaaatcatctctttgtttcgtgttatatagttcactaacaggattagtaaatctagac

SEQ ID NO: 5247 - DNA, 491 bp, Arabidopsis thaliana landsberg
  unsure (1)..(491): unsure at all n locations
tatttgtagaaaaccattaccggtttaccacgcaacaaacgtaagattggtcatattttcagctaaataaattgaaaaacgttattttctgtatgcacgaccctacacttgtcttaaatttaagaaggttttgtttaggattaatacaatctccactttattgagtttaccaaaaatgaaggccactgagaacacaagaggagatgacaacatcaagatgtgctagaggtaaagccagcgcctcgagcaggacaattcagatggctaacaccaacaccaattacttcctgagctttatgtacagaaatgaatcagtatttgaggatcgtgtattcgcttctcgttaatccgactttaagttattggtttccaagctatatggttcaaaattatggaaggttacagttttcagtttgagtcaactcttaacaatttaggagagaatttgaaggccctgtnnnnnnnnnnnnnnnnnnnnnnnnnnnnnnnnn

SEQ ID NO: 5248 - DNA, 5096 bp, Arabidopsis thaliana landsberg
gatggaactagcgagaaagaaacacgaaacagcgttgaaggtcgccaatttttaaagtttggttcacaatctctgacgaagagtgaaccaaaaagcgcgctctttttctctctcaccaaactcatcgatcgtttcttaaataatgcaatctgttcctgtcactaaatccagataccctttcaaatccaaaagctctctcttttttttttccccctctcattctgggttcaagggttgttgagtgaggttactacgtacgagtgtttcatatttcagtctcttgagctctaatctcaaatgaggaatcttgggttactcgaaattactctgctttgctctctctttgtctatttccgtatagattctgtctctagtttaaactcagatggtttggctttactctcgcttctcaagcactttgataaagtcccacttgaagtagcttcgacgtggaaggagaacacatctgaaaccactccatgtaataataactggtttggagtcatttgttatctttttggtactgtcgtcaagacccttaatttgtctgcttctgggctttcaggccaattaggttctgaaattggggagcttaagagcttggtcacattggatctcaaccttaacagtatctctggtttattgccttccactttacgaaactgtacttcacttgaggatttggatttgtctaacaatgatttttctggagaagttcctgatatttttggtagcttgcagaatttgacgtttctgtatcttgatcgcaataatcttagtggtctcattcctgcaagtgttggtgggttgatagagctcgtagatctgaggatgtcatataataacttgtctggtaccattccaaagtcgcttgggaactgcagtaagctggaatatctggctttgaacaacaacaagttaaatggttctttgccagcaagtctctatctactcgagaatcttgctgagctgtttgtcagtaacaacagccttggagggaggcttcattttggttctagcaactgcaagaagttggtttctttagatctctcgttcaatggtttccaaggcggtgttccacctgaaattggcaactgcagtagccttcagtctttagtcatggtgaaatgcaacttcacaggtacaatcccatcatccttgggtatgttgaaaaaggtttcggttatcgacctttccgataatcatctctcggggaatatccctcaagagcttgggaactgcagcagcttggaaaccttgaagctgaacgacaaccagctccaaggcgagataccacctgcattgagtaagctaaagaagctacaaagcctggagcttttttttaataagctgtccggtgagattcctattggcatatggaagattcagagtctgacacagatgctcgtttataacaacactctcaccggagaactaccagttgaagttactcagctgaagcaccttaagaagcttacactgtttaacaacagcttttatggagatataccaatgagtttaggcctgaatcgaagcttggaggaggtggaccttcttggtaaccgttttacaggggagataccaccccatctctgccatggacagaagttgagattgttcatcttgggttctaatcagcttcatggtaagataccagcgtctattcgtcagtgtaagacccttgagcgagtcagacttgaagataacaaactttcaggtgttcttccggaattccctgagagtcttagtctttcctatgtgaacctcggaagcaacagctttgaaggatccatccctcgtagcttgggaagctgtaagaatctcatgaccattgacctttctcgaaacaatctctcgggtgtgatacctccagaactgggaaatctgcaaagccttggacagttgaatctttcacataatcatctggaaggtcctctgccatcccagctatcaggctgtgcgagacttctgtattttgatgttggatccaactcattgaatggttctgttccatcaagcttcagaagctggaaaagcttgtccactttggttctcagtgacaataattttctaggagctattccacagttcttggcagagcttgaccgactctcagatctgcggatagctcgaaatgcttttggaggtgagattccttcctcggttggcttgttgaaaagtctacgctatggcttagacctcagtgggaacagatttactggtgaggttccaactacactgggggctcttatcaatctcgaatggctcaacatatccaacaacaagttgacagggtctttatcggttcttcaaagtcttaagtcattgaatcaagttgacgtctcgtataatcagttcacgggtccaataccagtaaatctgttatcaaattcttcaaagttttctggaaatccagacctctgcattcaaccttcttactcagtgagtgccataatccgcaaagagtttaaatcttgcaaaggtcaagtcaaacttagcacctggaagatcgcccttatagcagctgggtcctcactatccgtagtggctttgctttttgctctctttttggttttatgccggtgcaaaagaggaaccaagacagaagatgccaatatcctcgcagaggaaggtctttccttgttgctgaacaaagttctagcagccactgacaatctagatgacaagtacatcattggaagaggagctcatggagttgtttacagagcttctttaggatcaggcgaagaatacgcagtgaagaaactcatctttgcggaacacatacgctcaaaccaaaatatgaagcgggagatcgaaacaatcgggctagtcaggcacagaaatctcattcggttagaaaggttttggatgaggaaagaagatggcttaatgctgtatcagtacatgcccaatggaagcctacacgacgttttgcacagaggtaatcaaggagaagcagttcttgactggtctgcacggttcaacatagcccttgggatttcacatggactggcgtatctacaccatgattgtcatccaccaataattcaccgcgacatcaaaccagagaacatactcatggactcggatatggagccacacataggagatttcggattggctcggattctagatgactcaactgtttcaacggccactattactggcacaactgggtacattgcaccaggtacatatatttctcaacataacacgttcgtattttgttcaccgttaccttattcatgctctgatgaccgtattgctatcaaacagaaaatgcgtacaagaccatgaggagcaaggaatcagatgtttacagttatggagttgttttgctcgagctggtaacaggaaagagagcactggacagatctttcccggaagatgtcaacattgtgagctgggtcagatctgtattaagcagctacgaggatgaagacgatactgctggtccaatcgttgatccaaaacttgtggatgagcttctggatacgaagctcagggaacaagcaatccaagtcacagacttggctcttagatgtacggacaacaggccggagaacagaccatccatgagagatgtggtgaaagatttgactgatttgaaaagttttgtaagaagcacttctggttcagttcactagtttcatatgttgcaggtttatatagtttactgttctttgtaaccactaatataattgtaccattgaagacggtgaagatttgagaaacatatatatccaaagagacttaattttattgcataagttggaagtgttgagggaaataaattacaagtattaagagaggcttcacaaatttgccaatctcagtatattttagccagtgctaccagaaagctcgccagagaaggcactaccatacgatgtggaaccggttggtgtctgtgatgatgttgcgatccctcgagcttttcgcatctgccttagtctgaaaacatccgtgggcaaaggctggctttgtacagttgctgtatcatcttcttctggccctattaacagagagagagagtaagacaagtaactatcatttaacggttgttctaagggatagtagaagttatatgcatctgcagctactaagtaccaaacatttgagtgatgacatagatgattcactttcatgaggcataaaatatttatacttgaacaataaactataagcaaatataacttactgtctgaatcttttctctttgtagctcttctgtctcttggtaatctttgagacacaccgcgggttggacccgagggatcgttttgacttggaggattgcctttagcagcaaaactctgctttacaatttgacctgttggaaagtcactctgcaaacatatcgacagaacaacatccacattgggtgttggacctgcgaattgagaggataatgataaactagttggttagtggacatttattcaggtgctcagttcagatacaacttggagttggttttaaagagacataccgtccacaataggcaagttagctaaaaatgctaccaatgcaggtggagtagtctttggtatttcgtcaaatgtgctggctgatccatgagttgcagttgcagtcacaatacttgggaaggtgttcgaagccgaagctgccactggttttgcagaactagcaaactctacagtcaaatcatgagtggttcagaattagttcacaattccattcatcgtgcagccaaatattgcggcaaagtgcaaatcagatacctgatttctttgtcgggtcttgaacaaccatctgagatgtatctggataaacaacttttgacgaagaagctacactacctatcagcccagaaggcggtttatttacttcagtcatcaccaaagtttaacataatcaatcacaccagaaaattaaaaagtacagacctatagccgcaggaccatgaggtagatttgttttccctgctttcttattcagattcttcacaagcaactatagtgaacacattgatcggttagaataaatacttactagaggaaatcattagtagctatttgggctaattgcgatatgttgcatgggaaatacctcttgtctggcttaatgat

SEQ ID NO: 5249 - DNA, 2787 bp, Arabidopsis thaliana landsberg
ggtcgactctcccccatagttataattagtcccactaatgttaaaaagtttggtaaaaagaaaattatttcctaacttttttttacatattagctacaataaaataaataccatttttggaaatattttatgaattcaaaataaatttcataaaatatcataatcaatagccaatagccagttggtaatttactatttccgacatgatttaatttaatacagcatatattttttgacaaaaagccagccaatatcctgaaatttaattataattatgccaaaattatttataattaattatccactaatgtaaaagttgggtcaaccatttggacttaattaagactaaacctgccacagtaacagagagagacgatattttctcagtccctttcccttttcaacgagcaacaacactcttcacttaatcgctccggcggtggcgaacggcaacgtgacggtgacgttgtcggaaaattagagtttgtttatctttgcttattgttgttggagaagaaggtatggtgaggaaacacggttggcaacttcccgctcacactcttcaggtaaaatcgaatgtaacctttctctatagccaaagcttcaatttttcatgaatctgctcaatctaaagtcaccaatggctgtgatttcaattgggttctgtgtatttttcttctcaggtgattgcaattacggtgttttgcttgttggtggtcgctttctatgctttcttcgctccttttgttggaggtcgtatttgggaatacgttttgatcggtgtttactctcccgtggtatgtttaatgcttctcaagctagtagtgtttatgatcagaatcaattttgcaaattcataacgagttttggattccacagctgtgtagtttatggcattgatcttatctgataggttcctttatgtatcgtgtgtgtttttgcaggctattcttgtgtttgttttgtatgttcggtgtactgcaatcaatcctgcggatccgagaatcatgtcgatatttgatacaggcgtgaatggagatggcatggttcgtggcttatcaaggaattatgatgaaactggtagtcagttgcaggcttctccttcggttgtcagtaggagttctaccgtggctggaaactctagtgtgaaaggttctgtagaagatgctcaaagagtggaatctgtaagtagaagatcttgctataatcctctggcagttttctgttatgtgtttgttgtgcaagactgccggaaaaaggaagggccggcggaagaacaaggaaacagcgaagaggctctgttttgcacattgtgcaattgtgaggtactaagcttcagaattctacatcaagtctccatggttatatttgtcatgtgtatggtctttaatatgaaaagtaaatgatgtatgagcagttaataataactaaaatttcttggtctttatcttctagaatctgctttaagaagtctttagggaaagcaatttggttcagattttagatgtgtactcaattatgtatgtttcacaggtacgcaagttcagcaagcattgtcgaagttgtgataaatgtgttgattgttttgatcaccattgcaaggtaagctttctgatgtttcaaatgtttgactggattttcatgggtttagttgatgacatagttctaatcattgctacagtggcttaacaattgtgtcggtcgtaaaaactatgtgacttttgtctctctgatgagtgccagtcttctctgggtatgtatttcacctcgtatgtgctatttcttgtacttattttctcactgaaccactaacaggttatgctttctccctcctcagctcattattgaagcagcagttggaattgcagttatagtgcgtgtatttgttaataagcagaccatggaaactgaaattgtcaatagacttggaaatagtttctctcgtgcacctttggcggcagttgttgtaagtattcttggtgttatgccattagtttgagtttagctcctgtcatcaaggttcctaatgccatacctacaaattgcgtagggtctttgcactgctgttgccattttggcatgttttccactgggtgaacttctctttttccacatgcttctcattaaaaaggtcagtgggaaagaaactagttctgatattagttactctactcataacacggataattttcttactgtaagatatcatggtaagacttttaaaagatagaagtgacaatgctcatcatagtagtgaggttgaacttcggattatttttgtttaactacctattatctatcaattgtgaacttttcttaacactggcagggaattacaacatatgagtatgttgtggcaatgagagccatgagcgaggcgccagatggagcatctgttgacgaggaaattcagaatgtgctctattctcccactgggtctgctacaaccggctttagtggtggaagctctctcggtttaccatacaggggggtctggtgcactccacctagagtgtttgataatcaggtatttttaccttttccgaagcatccaaccattcttgtatcgcatgcctaactcttgtgaaacactgaaactcactagtgttttggttgcaacagataggttatatacctcatatacatcatttgaaagtctagttatccataggatcaatctctaaatataaacttgaaagacaagggtttccacgaaatgcggttaatttttggcatacatgtattgcttaatctgagattatgctcaggtatcaacatgccattttt

SEQ ID NO: 5250 - DNA, 2052 bp, Arabidopsis thaliana landsberg
taaaaaaaagttaataaagtagtcaagttggataattcccaaaaactgggaaaaaagaactcaagcgtcaaatgttgtaggtgcatcatcatcagtctacaagtagtaaaaaacccattcgatttgataagaagacccaacggaaagagtcttcccgtctacaaagtaaacccaatcaatcttaataatctttaagaggttttttcttattataattatctatctctctatctatctatctgcggatctctcatgaagaaacactgaggagattctctcgctctgatctcctggtatcgtcgtctctctccgtagagatatactagtttgtcccatatccgattgattgctctattcaagttattcctcttctaggttttcgatttggccctccgatttagaggatgtgatggcccctgatggcgttgaagactccgactatgagagtgatcccgacgagttgaaccgctccttggctacacggaggagagaagccagcgatgatgatgaggatgatgaagaagcggacgaccatgataagctgcgagcagcaatccagattcattccgatgaacacagtggtgttgttgttgtcgactctgatgataatgaaggattgcacatagaagatagttatggtgatgatgacgacgaagaggaagatggtgattatggacaatttgatgaccatgtcgaatacattgcggataataatgacaagacaattgtcgccggcaatgggaccgatgactctgccgccactgatcttgtggatggagaggaacaaaagaagaaggaaccttttgcagtgcctactgctggagctttctatatgcatgatgacagatttcaggaattggatgccgcctctaataggtaaactctttttgattctatgaggaggtagtgttttgtccaaactatgcaaatgtatctatctactattgaggtagagtacattgataggtgaaattagcaaacgactttccgtcattcaatctcatgatgtacttcagagttcagatagattggaacaactgctttggttttatgttttaactttgattgtgaatctttatgtatgaatctacccgagatgccatcacactgctatttttccatttaacattctgtttagttacatggtaatgccaaccgatataggttttcgttttttatttctgtaggcgaatgcgtggtggtaggaggctctggcaatccagagatgaaagaaagtggggacatgacaaattcgaggaaatgaatacacagaaacagcaatatgatgtacttttctctgatcatctctctttctctttctctccttttcataaatatatttgtattcatcgacttgtttcctcttgctgtgtttatacatttgccacctcttttttctttttcctttttttttttccttttgaaagctgattaattaaacttgtgaacatagaggaggacttcgagaggccgaggcagaggtcgtggtcagggtaggggtcaggaccgtggacagtctcgggggaacaattctaaagaatttactggcaatggacaccaaaatcagtttccgaaggctgtcacgagagggaggggggccagaagatatgaggttgcattgagaaatgggaatcaagcaccttctgtgcaaaccaaacagtgagtccttaattttgtttcctctctagtcaacacatgaaggctctaggtctctaattgttgtgtctttttacggaatctttaggtcccaaaattcgtctgtggaagtgtcacacgttgatttagggcgtccaccaacagaaacagctaccttagagactgaagccatccaagccaaaaagaatgtatttgcttcaagtttaaattcagcttctcctccattttatccttcaagatccaacaataacttggcacaaaaggatgtacaagctggcatgggtaggctgcacattaatgaaaaccctaatccgactggaaagaagtttgggaatacaaaatccagctccttgtggggacgcactgctcagactacaagtcatggtagaggtgtcc

SEQ ID NO: 5251 - DNA, 2999 bp, Arabidopsis thaliana landsberg
gggcaagatctgccggtgcttacagacgcactcctcaccgcgaaggtcataacggccggtcatcccacatggagcgatcccctcgacgtgactcaccccggcccacttcccgaactggactcagcagcgagccaattgctgacctgattcggaagaagagagacaaaccatcccgcagtagctcctcccccaaaagagacaagacgagggcccgaactgaccgctctcctcgaccgtcgccgccacccgatctatgggtcctcctcctccagtcaccgtatctccttcgtccggatcaggaggtgaaaaggcagagcggagtgctaaccctcggcgggatgaaactgaggtccgagatgccggaactaaagttgttttggttcctcagaccaagtcgctcacgggttagaaatttccctcccattttttgttatcacatttttaccatttcgccttattgactcagcattgttcgaccggtccgaccttttttaacagcgatggaaacggagggaaacgtctttcgatgtttcaaaacccgaaaagacaccatcctgccagccttcgatagatggcgttctgcaattcgcgagcgattcctactccacgcccataactcatctcgggttagttcctttttcccacaatagatcttttaatctttgctcctttactctatcgctaaccccttctcgttattatctgatccaggcgaactgcaaactcaatgacatgattgagtactacgaaaggctactgcttgacagagaaaaagatgttatggcgtggaaggataagtcttcatctcttgagtctgatctccgctcttcaaatgataccaggctgaaattggaggatcaattggacaacctctcaaccgaaatcatgaagtccaacggcgagctgcaggagcagtaccaaaggtacgacaagatccaagaagaactctcaacttctcgggacagactttcggaatccgaatccagtgcctacgagttgtccaaccagctatccgagttgcagcttaagtacaaagcggtggcaaactatcgggacgctgagttggcgaggtcggcatcaaaggccaggaaagaggtgaaaggtcgcgggatgaaattgatccaaggggcaattgtcttcatccaaaccgaaaaggctagaacggagctggaatcagacatcaaggagtaggagagtaatctcctccttttggaccaaactcatgaagatgatttttccgaagaacgagagagggacgagttgaaagccgtcctggaagagaagcgaaatcgtttagcttcccttccttcctcgtcgttcaacccccagcagttcgaggagttcttcactgaatcgcctcctttgagtgaatccggtttagactgggctggtaaatcccaactcttctccctttttctttaaaaaatcgatccacagtgaactactcttatattaatccgagataattgcctcaggtgtcagcggttccgtggaacccaaagtgcctattgccccggcatcagttccgcggcgataatcacgttgcctgaaattcctccatccacgaactcggagatagtggttatcgaggatgatgatggttcagactccgtgattcctggcgagcagcccgctactgacgagccgagtgagattgagacaactgccgcagatcctgagttagttcaaaccgaacccgagatacccgagaacccgtagtggctgtgtccacttaatggggattgtctcttaaactcgaaattcattatcgttgtttttctttttgaattactttatctgcctaagtaggctttaaacaaatactttgcctgaggaggcttttaaaccttttctttaagattatgatcccgagagggctttccttgtgctaattttcagtatgaatttgcaaagtccatctctttaaatagtgtttttgtttaaccatgtggtcaagttacgggatttgttggttgatcagacctatccctaaaaatgcggacttgaatccgcgaactctccaactccccaactcgagtttagtcagttcgattatttttgcgggttctgagcctttactatttactctgcatttaatggcccacttatcttaaatgtgacagttgccttttcgtccttggaaatctagaaaagtgtcacgctcctaaggccataattgcattttcctcgattcccaaaaatggataaactcattcggacacgcacaattattaactttgtggtttcgagtaaaactctaaatcactataaataagggcataaactttcttaactctcgaaaaacatgatcgcagaaatttacttgaacaacacctatagaatggaacgcgaaggagcatccaccgtctgtcccctcgaccccgggagtcccttgtttttgtctgtcgatggcttcgagcccgccggcgtcctctttccacacgcttgtttccactttccttcgaaggaaaagaaagaggcgtacgactttatggacaaggtaaagtctctcttgttttctttttcggaacgagttctacttgttttctaaccagtccatactttaggtcgtcgacaagcatcgccgcctgtgcgatgaaaggcagcgtttaggcctcaagaggcaaacgcttgaggcccaaattgcttgcatcgagaggaagataagggccatggagagcgacccttttcagtgggagtggaggaacttcgactgcgtggcgaagatctcgcacatgcttcggatgtacctccgtgctcgaggccaagttcccggtcctgtaaacgctccggttctagtgatcccgtctgacagtgaagacggtgacagcgaggaagaggacagtaactcctgcaagcgcgtgaagaatgaacccgacatggacgacaaaaacgaggcgtccacttcgaaccccgaacggcgatgaaggagcttgttcctgaaccccatccctaaatgttttctgagactaaaaaccctctttatttattttcgcatg

SEQ ID NO: 5252 - DNA, 1205 bp, Arabidopsis thaliana landsberg
  unsure (1)..(1205): unsure at all n locations
actaagtctgctatattgaaaccacaaggcatacataatgtttggtcctgtggtagttttctgaagtagctaaggtgacctagtggagactttcaccaagtattcttcttataaatgcccttcacatttttcagaaagctaaacccatatttctatatttttgtattcttacagcgtgacgaaaaactactttgagaatttggtgaaagctctggagaacggtcttgctgatgtagactcacatgcggcttgcagcagcaaatcaacaagctctaaatcaacaggttgcagtagcaaaacaagaggtaaaggcaaaggaagttccagaactggtggatccagcagaaacccagatgacaacttataataatgtttctcatgtcctcgccaaggtacaaaacccgaattgatcgtatgcaattgtacaatgcacacgctcgaggaaaagcccaaactgcatgcacatagtggaattctaattcttctgtcatgcgtgtatgcgatttggatcatcggatttgtgacaagtttcctacttatgtatagtgtaaaagaatatgtatgtgtttatctatctctacacacattgtaacaataattctgttgcctactctgctatggcaatctctgnnnnnnnnnnnnnnnnnnnnnncatgtgtctggttttaaagaaaaaaaagagcaaatggtacttgctttgtttggctttacgtgaccatctcttttatgtttgtaatagttgaattcatgtttcatctaaagaaagtgtttaatattgaatcattttggtttttgtaacttatacaagagtttctacttgcacagcttggaaaactttacactacatgtgacgccattgttaatgctacaacttaataaattaaatgaatgtgtttaacgacctttaaggaaaaagatgaacaacgcagagttaagcccattaaatcacactttttgcacttgtagcaccaaaaacaaacacattaaaaagaatcaaagagtcttttgcttgttcattttttctattctttagtttcttagacctgagggtttataggttttggagatctgaagctccattgatttgttcttgggagcatcaagcagcttagccctcttccttgctatagggaactccatggaatgtgacttaggaccattgtccccaaaatcttctttgaacatcttgatgcttagagcattca

SEQ ID NO: 5253 - DNA, 5683 bp, Arabidopsis thaliana landsberg
taaatctgtttttattctacagtccaacgcgattactgtagaataattttaagccaacgactgtttggaactaatttttcagtttgatacgagagcaataacaaaatttcaaagaaggtttttttggggttaaatgtcaaaccaaaactcgttttagacagtaaaaaatatatacgattaaactatagtctaatacatatacaaattttactttgcatatacaatttaattcttagtaaatccaaataagaatctaaatagatgataatgatcaaaatctgtatagagatgcacatagtaacttcgtgaattctaagtattagactaaattctcatatacagcatgcagatatgtcatatgcatgcatacacatttttacgcatttcagtccgtacgtatcgtgtatatacggtaacgatggttggatatacatgtgcatgtttcaaagttatgtacaccgaagggacaagctaggctgtgatgctcctaattcaagcttccttcttacgaatgtcaacttttatttaattttctttattgtggcctggccgaataatcaaagatataataaatatttagaggcaattattgattagtgtcctttaattctccttaaattgtttggtttttggtcggttggttccgagattttattttctgtgttaaaatgttactaaccaataacggttgaccctaattataagttctccaacaagatgtgaacttatttgctaattataaacgtgaacgctaaacataaacggaagatttatttggtttgagtttggcgtctgcatttacatgtcgtagtaatataaatttacattaaaaattaatgtttctatattaaagatgtgaattatttcgttttttcatgcacataaacgcatatgtattgtgttgaaactagacgaggctataatgaagacaactgttgtttctttttatctgcaacaatagtgtatatttgaccgttaatgtaataagttcatgataaggttgggaggatagcttccccgtgatggaggtcgtagggtttgtatgattgtgtacagtcttttcatttcacctagctaaccctattgacgcattgtgcaagtgtaagacagttcatacttcgtactactcttcaattatatatatttacaccacattatcaaccaaaatatatgtatttcaatccaactgtatactagacttttcgaaactaatataagattaatgttgaattatgttttcttcacaaaattctagcattagtacatttgaggtgaaaaaacacaaaattcatcctaatgaacacataaagaaaataaaattttaaaactcttcttcgtcaccgaatatttacaaataaaatgatatgtgtgtgtgtgaacctaatttaaagcctatgccaatgagcacatataggcttttgctctcttttttttttttttttttttttaattatcacaatagcataaaatatgcaaaacggaagtacctttacaatcatttgtattcgaatttaaataaaaatgataaaacaccaccaatagtaagcaaaagataattagtgtgggaaactaatcatccgtaagcatatagagcacttcgatgaaaattagagtattaaataaaattaaaataaaccctcaaaactttttgaagagacacatagagtggctccttggcatatgattaaactcccttaatttatcttgtgggatatatataggcattacacattttacttattacattcacacacacccacattttacattcaactcttatacaatatgcccatgttaatggcgacacgtatcgatataatccaaaagcttaatgtatatccaaggtttcaaaaccatgacaagaagaaactaatcactctctccaatttggaccgtcagtgtcctttactcatgtactctgtcttcttctacaagaataccacaactcgtgactttgactccgtcttctccaacctgaagctcgggctggaggagactatgtctgtgtggtatcccgcggcagggagactgggtttggacggaggtggctgcaagctcaacatccggtgtaacgatggtggcgcagtcatggtggaggcggtggcgacaggtgtcaagttgtccgagcttggtgatttgactcagtacaatgagttttatgagaatttagtttacaagccttccttggatggtgatttctctgtgatgcctcttgttgttgctcaggtaaatttattgcaaattctatacgtttcctttctcaagaattttgaataatttacgtgtaaaaatgttaggattttatgttactactagattttaacccgcggtataccgcggagataatttattttttaaagttactatatataatagtttgcaaattatatttatttataaaatatttttgttttatagtttacgattgttattaagtaacgtcctgtcaaacccgtcccgccaatccgtcccgtaaaaaaaactcactgattttatttatgatatgtttatgaatcattgtctaaatattttttaattttgtagtaattaaatgctatcaaatatctctgcggtttgatgattataatcgaattattatagtcatgtagaaaaacaatatcaaaaatgataattttgtagtaattaaatgatattaaatattttggaagttttattttagtaactaatcgtgtagttaatgtggagagattttgggaagattgtcaaatatttaattcaaagattttctttttaattatcaaaaacaattattaaatgtcagtagcagccactgtaaataaatctcaactccaagatttattttacaaagtggctgcaaaaatgtatatatagatatctatatatcaatatttagttatatacgtactttgactagatgtctacaattttcatcaatacgaatggccagttaaagtaaacctatataagcacaaacattcattagcagagttataataaggaattttgagatcaaattcagattagaacgtacattctaagcaaacctttacacacaaatatctacgtccacatgaataaatatataatacttttgctgtaattaaagttttggatgggtttttaatttatgtgtatgctaagctaaagtgattattactaaaatccactaaatttatatatttaaacaaatagatatgaaacgcctgagaaacgggtagtgatttagttaatatttgatgatatatcgacgtataataaatgtaggtgacaagatttgcatgtggaggttactcaattggaatcggtacaagccactctctatttgatggaatctcagcttacgaattcattcacgcgtgggcctccaactctcacattcacaacaaatccaacagcaagattactaataaaaaggaagatgtggtcatcaaaccggttcatgatcgacgaaatctactggttaaccgggatgctgtccgagaaaccaatgctgcagccatttgtcatctgtaccagttgatcaaacaggcgatgatgacctatcaggagcaaaaccgtaacttagagttaccagactctggttttgtgatcaaaacgttcgagcttaatggcgatgcgatagaaagcatgaagaagaaatcactagaagggttcatgtgctcctcctttgagtttcttgctgctcatttgtggaaggtgaattcaagaaatttattttacaaattactgttttcacccaaaaatttaggtgtgcgttttaaaattttcaaaacatttttgatgatttaaaaaaaaaactatattaagaattttttaaaatagccattataagaaagttagaaacataaatattaagcgtataattttgcaggcaagaacaagggctttagggttgaggagagacgccatggtgtgtttacaattcgcagtggacataaggaaaagaacggagacaccgctgccagaagggttttccggcaacgcatacgtgcttgcctcggtggcatccaccgccagagaattacttgaagagctaacactcgagtcaatagtcaacaagatcagagaagccaagaaatcaattgaccaaggttacataaactcttacatggaagcactcggaggtagtaatgacggaaatctccctcctctcaaagagctaaccctaatctccgactggacaaaaatgccatttcacaatgttggctttggcaacggcggcgagccagcggattacatggccccactgtgtccaccggtgccacaagttgcttatttcatgaagaaccctaaagatgccaaaggtgttcttgtgaggattggcttggacccacgagatgttaatggcttttcaaatcatttccttgattgctaatatattagctggtgataattaattaattagtagaatctttgtggtagtatacagtatgataatggctcctctatatgcatgcgtgtgcgctaaagacactttattgtaattgggttatgatgatgtataatttaatgacatctctctgctttgtatttgttgtcgttatcacttttatactcatttcgtgataggctttattttcttccagaatttctggataaataattataaagttatgtttctttgtagacttttttcttaaggtcgccaatgttgggtggttgacacctaagccaggttattgggcatatggggccgatttaggctggtagtacaaatcattgtactactttgattctaacgttattttgcacttagacacgaagactttgacttcctcttcaaaacacctttacatttgtagcaaagagggtactttttgaattttatttatggatttggatcttcctaagttgctcaaaccagtgggggagcggtaaacaatagcttacactttcattacagagaagagagaagagacagaaccaaaagataataataattgattgtgtctgaataaaacaggtttctcaagctgacaaagaaaagggaaaatggagtttctcgtatgcatgttccgagtgagctaaaccatccaaatcccaatcaccttccgagaaatcagattggctctgttcctgttacagtcaaagtaacaaatcttcagaaatctccaaaagaataaggtgcaaaaagtaaatggtttttattgtatacaatacctgtgtcattaaggaattgactatatcatctaaggaaccagcatcagaagccatcaaaccactctgaagcttctgttgtcccatgagtaaaccttcgtttggattgctacttctaaacagttgagcttctgtcactggacctgagttgtttgcaggctgctgattcatctgtaatggataaaagaagtctgtttgtgcagcatttgtggatccaaaacccgtgtttctgcagagagatgccggatttgtatccaggtttgggtttactagcggactagctgagtcgcagaacgcattccattccaaggtgtcaggttttgaatgaacatcactctgtggaatgttggttgacaatgcagcgtttgaccaatgttctagacgcttgctgatctcgaaatgaggagaaaaacccgggtttgagggtaaagatgatgactgcgggttaccctcgagaagtaacagattactgggagctaccattggagagttttgttgtcaactcaagcccccaaagccctgttgatgttgatcaaaaattaaa

SEQ ID NO: 5254 - DNA, 2160 bp, Arabidopsis thaliana landsberg
  unsure (1)..(2160): unsure at all n locations
gcaaaacaaaacagtctctgtcatcttcttgtctttgctttcaagctcatgagtttccacttcccacaagaattttggagccaagtctcggatccttgagacgatacattcctcgtcccttattatgacaaacccctgcccaaccacccggaattaataaaagaccagaccacaactgtttttttttattcaacagtttaatgtcaccattagttagttatcgcaaaggtacctgagggcgtactatgcggtccatctcaaggatgatatcctctagcaaacaaccatctccgtagcttttgttgtagtgagagaagacatgatcggaatgcaccaaatcatacgtgcgcggatatgttgagaacgcctcacacctaagacacatttgtttttagtgaagtggtcctgatgcttggaaaatatcaaaaacaaaacaaaacaagtgtttgatagactagaagaactctcttatcagcttaccaatcatggaaagcgccatttaagcctctctcgaaaattccagacaaggtatcattcatggttgcaggtactacgttcattacccaaacaggatacgaattcatagctgcagcaaaaccaccaatgaatgcgttcatgtccatcacattccggacttcagtctcattgacattcattaaccgccagtaatgattaacttgttctctccagaacactgtatctgatgtatattcatcttcactgatccctgaatgaaagttttgctaaagtggttagttaaggaatctaacagaaacatagtaatgccaccgaagaagaaagatatacctatttttcttagagttgctggatatgcagaaagacgtgcagctaaagaagagggtctctcttctgtttgtccactgatttgcacacaatctttaagaggaactttccatgatggtttcaaaacatcttccacatcacataaacttattagctttagctctgctttctgcttaagacaaacctccttctcttctttaatccatattgcagtctgtaccttccgggaaataagcttccagcacattgcactagttagattgaccaacttatcccaaatcataggatactctttatcctttctatatgctggtggtgatgaatacacaaagaatccatttggtcggagaagacgatgaacttctttaagtaagatgccatctgaggaaccaagcggaagtattatcaaccaacttcttataaccaaattcaacacaagaatacatacataccatttgcatgccaatcaacacgacatctcgaacaatgaaccatctcgaacgaggctgcaggatatggcaattgtttggtggcaaccgcggatatcattgcaccaatgcctctctccaatgcaaactgaatctggttttcatgaccatctttgggagcaaatgacattgtctgtatacctaagggaagaagataagccgcaaagctcgcaactccacagccaacatcaagaacttgtaccaccccagctgaacgcaagtcacctgtttcattagtcatcatattccccaacctgaaagataacatacaaaaactcagtgcaatacattagacaaacatcttcacacagtataaataaattacctctggatgtattctgcagctccatgcttaaaatgagtaccaccaccagggaaccaccaaaactgaccttgctcatggacccaattttggccacctttaacttgagcaagatgtgtatggttcacattacttctccatacatagtctctactagttggccatctaataggtatcttataatcatttggcggaggtaccaaacaaaaaaggcggtgctcgagtggtgggcaatgcctttcgaggtcttctcttctagaaagattcaagcttnnnnnnnnnnnnnnnnnnnaggtgacattgtgacaaggtatatactcattgaactccagtggacacacattcatcccagtttcaggtgtgactagtggtaatcttctataagttagctcaattttgtttgcaaatttggaagaagctgcaacaacaacaagaatcactctaattattttgactgagcattgataaatttagcctcgagagaccaaaacttagaaaaatctacaaaaatccaaccgcatgcagaaaaaaaacttttaagaagga

SEQ ID NO: 5255 - DNA, 1378 bp, Arabidopsis thaliana landsberg
ctctccaatatatatatatatatatcttgaatggattgagtaacttacctccatgtatagtcttaactcgcctgcggatttcgatatttctataacacaatttgttggagtcacctctatcacctctgctgataataagtcataagaagatcttgatcttatctcctttggctgaatcttaacctaagaaaccaaacttatatattaaagtaattgatctatagaagaaaccttcaagtaactaacttatatattggtaccttgaagtgctttattctctcaactgataaactaacataagttgctgcagcttcaatcttcttgattgtttcttgtgctgtgttcttggacccaattcttgttttatatctcttatcatcctgaagagataacaataacgcaaaaagcttcaatatttaactctctttgttagatgagtttaaagatttaagcaaaaaataggtttaagtgttttacattttcttcgaagagacctgacaaatctagatcactagacattgctattatctgaaaagcatttatgaaatttgatgacgcggttgctgcatttatctccgcgacattgtcctgcaagatccaattcaaataagttacaactatgactcaaagatattaacgttttcagacatctagtgaaccaacttgccttgattgagtctgaaagttgatgataaactggtgtataacctatcttgaaccaagaatctttgatgattatctcagctagtgttatacgctgcaaccaaatattttcactcagttcttttttattcaaagactgacaatgatgaatatgttttatatgcaaatgtttcttgttacatacacttagaggatttgggtcaagaatgttaaagattagcctcttctgctctccagtgaatccaggtgggaacgtgtaatctgctctgagtatcttcttatacaaaaccggaagtgtatgatcatcgaaaggtggataaccagcaagcaattcaaatagaatcactccacaagaccatacatctactgctgctcctgagtagcctttgttcataatcaactgttttcattaaacaaaatcagcttctgcagattcaaagatagaggtaaatgattgttttttgtgaatgttagtattacctctggtgctatataacatggagagccacaagctgtagagagcatatcccccgactgtgaattacataaaccaaaagtcttatttagcatcctttgattgttacaaacccaaatattttgctttgtgtgactagaaaattagaaattgttactttaggaactgcacttaatccaaagtcagaaactttgagattaccctttgaatctagtaacaagttttgtggctgcaaaaagc

SEQ ID NO: 5256 - DNA, 1663 bp, Arabidopsis thaliana landsberg
  unsure (1)..(1663): unsure at all n locations
catgtaaatgaaataaaatctggtttttatggtaattaagtaattgtaacagattattccaaaaagatttatacttttttaaaataaatagagtattaaattatatatattgttatttttgaaaaaaaatattaaattatactacataatgaactcctatataggagatgatgaatcgaagaagagagagtttacaacggcaatctaacaaactttatttgtgtaaataagtgttgtacatagctcaaattagaaatgtaatcatacattagcttatatacttaagattaaatgtaaacattgaaccgatataaggttaatcaataaccatagataatcaatccaataaccggagataaagtatactcaatactacatgatcatttacactaggaaaatacatgctttcaactttaaagctctggcgtcgaaatttccaacaaaataacaccacatggacgacggcagtttgactagattacatctatacttcattcgaatcacacaaaatgagagattataatacaaagaggaaaaattccttaaaaaaaaagaaactaattttattttagacgtttaatatctaatacttctggattaaaataaaaatatcttatttaattattgtgtggtcataaaatatctcatatataaactattggtgaaatcaaacccgagatataacggccgttgacgagcgttacataatcatttaacgtcgttaaattttaaccatacggatatatacaagctgttttatatcatataggatgatatcgttgtggtccagtggttaattgtgtttaattctacctgcaacactcgggttcgaatctagataaggtttttttttttttttttcttattctttccttccccgccgcgaccacttcccagagagatgatagcttcatctaacccatgaacaagagcctccaattccgaaatttcaaggtttttagactcttctgctcctagatcgatctccaatcaccacatattgttacaccaatatcatttaattatagctctcgtatatccaatcattcttttcattcacctaatctttacaataaaccctaaagctctcatccccaatcgcagaagaggatgaagaagaacccccaccctcaagagagtagggattttataattgtgaccaaattaatcctccaattgtgctatcatctccgggatggtggtcgacggcggcgctagggcgaaaaagaaaaaaaaataaaaaaattaatatttaaagattctgggcagtctcgaacctagnnnnnnnnnnnnnnnnnnnnnnnnnnttaccaacagaccacatcgattttatcttcatttcaggaaataaattaaatatatctctataatatggaggggttaaaatttaacaccgttaactatttacgttacgtccgttaannnnnnnnnnnnnnnnnnnnnataatatatatatatgaagtattttataattataaataattagaaaaaactcttgaggctaatcaaaaaatatcagatattaaacgttcacattacaattagtttggatttttatctagattttcccaatacaaagatcacgccagagccattattatctaccataaattaagaatacgttttgccaaaagacgacatcataatctcatcgaaacaataa

SEQ ID NO: 5257 - DNA, 378 bp, Arabidopsis thaliana landsberg
ctttctttgtttcatttgtattttgtaaatagtttagcgtacgtgcgtaggagaagttgaatattcaatagtcgtggtctaaccttttttggttgggaaatgtataatttggacagcggagagcgaatgattaaagttggaatttttggtttattgttttgtatgagaattatgatgtcgttcttttggtcaaaacgtattctttaatttatgtgtagataataatggctctggcgtggatttttgtattgggaaaaatcttaataaaaatccaaactaattttaatttgaacgtttaatatctaatattttttgattagaataaaatattttatctaattatttataattataaaatacttcatatatatatattat

SEQ ID NO: 5258 - DNA, 1424 bp, Arabidopsis thaliana landsberg
gagggatgcttggggtagaaggcatccaattagcttatcttttaaatctcggagcgaagccttggtagggggcgggctgatctacaaatggaaagggcgggtactcggggagtgaaggccaaaccggaaccggtaacctaggtttctcaaaatcaggaaatgccggcggtggaaggagaggcacatcaggcagaggcggcgctaggagaggaagatcaggcggaggcggtggtggcgccactgcttcttggaaagaagggaagtcagggaatccaaggtcgtggaccggtgtattacgaccagaagatggataatcgtcggctccaatctgagctactttagcgtgggatctctgtagtcgtgaagaaaatgtttctttgggcttttggagtatgaagaaactcaaaaagacgacgtatctaagaacaagtgaaagtgatgccattgtatttagtgtgtgtgggtgttgatgtttagtctttttcgtaattttagggttactgaagattcaaatttatagctttgaattaattggttgacaattgtaaaatctttgctattatttgcattgtgttcctacttttcaccaaagcatatgctaatacttttttattcaaagtcaaacgtcatgtcaacgaggagtgttttgaccaaagatcaattttgataaatcgaaattattaggtcaacggcaacgaataagaaccttttcgtacacactatatggtcttgttttgattaatctaaaccaaaccgattaggccaaaccgattagggaaaataataaccgatccttacgatcgtgtcaaacaacatttggttttcctaacaaacaattcaaataagtactgaaactaattagcagtaagtgtttctttcaaaaaagttaggacatacaaaattcaaattttataatagatgtaaatcaactaaaattcaaactctttcttctttctatctttttttttttttttgccttattgataaattacttatgtttgatagtttatatttttcataaagataaatcaaagctatagtttggacaaaatcatattgataaaactggttaaaaagaaaagatcattcatatgtaattttttcttagccttatttggtgtacacataccgtgactccatgagtggtactgttgttcctgcagagccatatttcccatttgaagatcgtgagagtggcaatagaaactagtgaagatgtggaaccgccaaatgagagacttaacgccaaaagtgaatttgttaacataacatataaggacttggccaaggatcagaccggtgaccatgttgaacacaaagctatagttagaacttacaaagtgccatcgatgagctttcagaatacttatctctcgagggtgactttttggagtggagaaaaagctgctttctgtatgactctc

SEQ ID NO: 5259 - DNA, 3309 bp, Arabidopsis thaliana landsberg
ctattaataacaaagtgtaacttccgaatgacaatgacggtgcttggatgtgtttgctatatttatagaactcgaatttttcaaataataagagtgttggacattagtatagcgagacaagatgatgatgaattcaggtattctcacaaggcaacgttcccaaacagcaggaactaccacaagagcaggttagcttgtcgtctctgttctctccggccacacttacgtctccataactgaaacttaactcctcctctgcgattatgtcctttgctgcaaagaaacagagccgaggaagcaacgctcctgagcttctcaacagaacagtggagagatttccaccgtcacaagaatggttgatgaatctagcaacgttcccaattcttgtggcgtcgatgtttatccttaaacaagcttgtcctgaagggaggtgttcgcgtacgaccaaaagagctgaagcgaaggattgtgttgatctgagtttgtcgtaaatgttttgacgtctacgtgcttcatctgttgtcaatagctcacctataagaagagacgacaaaatcaagtttatgacttttgcataaaccaagtcattaaggcagatcacaaagaaaaaacacattcaagaaagaagaaagatttgtcattatctctaatctccaaatccagcattgtgatactacctctaaacgattgaaacaagaacatttcgaaagctcagatctttcactgatggagatcactcttaataccatgctagaatctcatctcaacgcatcgagctaaatcatatgcagtccaagtgtaaaaggctaataactaatgctaatattcctcaaatcatgtaatcttaagcttgattttcaagttccaattatcaatcttccaaaattagtgacctactgcaataaaacgaatcactatactattaggaaaccaaaagttggttaacgttacctaatgctaatattcctctaatcatgtaatatgaaatcgaaatgtaattgtaacctgcatattcacagatgaattggccttgcttgataagctggtcagcgtacaagcaccaacctttcttctcatctctcacaatcttcaaactaaccgaaacccccttctgcgtaacccggttcgaacaatcggacccgcatccacaacccgacccacattcgttagctatctcttccatccccgcgaaagctaaacacttgcagtatccttcctcacacctctcgcattcgcatcctgactcgtccactaaactcaccccaaaacgtccgctttcactcactgagtcaaaacaaggtctagactccgatccacattcattagcagcagctccccaccattgtcgcggcggaggaggagatgaagcggggatctgaaaaggtgtgtagatgaagtacgcgtatcgttgagaatcgatggagttgtgaaacgggattgagatgttttccaaggatcgtgcagcgtcgagagatcggtgaatggttagagatttcgagattagggataaggttttgcaggtttgagcaacaacggcgagttctcgagggtttagccatgggagaatcaaattcgcacatcggagaaatcgatcggcggccggaataatgtcggaagcttctccaagacaacgcgtcttcggtggtggtgactctcgcagtcgctgcatattttttctcagccagcgatatacaaacgacgtcgttgcgtttaattctatttatatccttaaattctattttaatttcacttcagtaagaattttttaaagaaaaatggcgagtttttttgtgttaatcataactatagatttactaccgtcgctttggtctgtgtaatgaaatctgtcattttcacagaggaaaaaaacttacaaagacaaaatccattgcaaaagagcgagcaacaacgacgaaatttcgaaatgccatcgccaccgacgacgacttctctctcggtgacacagaccataaacggatcacacagcttcacaatcaaaggctattctttggctaaaggaatcgggatcggaaaacacatcgccagcgatactttcaccgtcgggggttatcaatgggctatctatttctatcctgatggcaagaatcctgaggataattcggcttatgtctccgttttcattgctttagctagcgatggtaccgatgttagggctctttttgagctttctttgcttgatcagagtggtaaagggaagcataaggttcatagccacttcgatcgtgctcttgagagcggtccttatactctcaagtatcgtggcagcatgtggttcgtttcttcgatttcttcttttcaatttttttatttttctcttagccattttgctagggtttggtgaagaattggcttagggtctctgatttctagtgaaagctcattacttttagaacaaattttgctcctttgttggggtttatatgaggttacggatgttattagtggtcaagactcaagagtgtagattgttgaaggcaaaatgagattgagctcacaacattaaaaaagataaaagagattgagaaattcagaggaaataaagatacattagctgtggatttctcaatctgtttgtttcttttttgttgtgtgacctgtatatgaaattgaaagatgggtggtgagagcgataaacaatgttctttattttttatgctggaggctgcttggctttatttttgtggtctgcttgaaactgtgagtctgtgacgtatggaaagagagagggctttgagtagaagaagcaagtttctagaatatgaaggttctattacctgttttggacattctgtaactagtttacctgaacttttcataaacagaatttggttcctgctgcttcaccagcatgtagcgttggttctgtagttaaggaaacttgattgggaacgagagagggtttggactgatgatatttaggattttcttgaaaagtattgtgttttcacatgttggcatgatttcaaagacctgtcattgtgatgttttactatataggcaccaattctttcaatatggtaggctaattctgaagtaggaacattgcttactgtttacctgcatatagcagcacaaaccttgcttttatgaaactgttcatgttaggtttgaaacttcttgtatgagttaagcaacagagtattgtcttttgctctcaatattcgtacatttggttttcctgcttttttaaacatcttgttgttaagtctgcttgaatgaattaatcaaccattgactctggtttcttcttcttgaaggtgatgcctttggctttgatttgtctctcta

SEQ ID NO: 5260 - DNA, 601 bp, Arabidopsis thaliana landsberg
aaaaaaattcagaagataattcacatctaactataaaaccttcttaagtttatcatttatacatttaggctgaaaaaagcaaacggaacgctttgattccgtgtgcgtttaacttttagttacagtaacaatttttttttttttttttatttgttaagtttgcttaaagttggtaagtacacgaatataaaatcaaacaatcaaatgcatattatcgagctatgaataaaatcatgtcaatgacttttttttgagaaaatctattccttttttgcagtgtgagtacatgtattggatagcggaagaatgtaattgttggctcgttcaacattggagaaatcaacaaatcatccatggataccagagacttgtctccgacccaaaaacttatcggcgataaatgggacgacaatgatcttatggaagaagcttatgacgaatctggtaggaataacttagttagttttgttgcatttctcacctctaacctcatagaggttagttcactctttctttatgtctctctctttatcacactcagtttgtgttctttgttagagaggaacaaaagaaacgtttttgtctttaattgtctacattt

SEQ ID NO: 5261 - DNA, 1689 bp, Arabidopsis thaliana landsberg
gttgctagtaattggaagctgggaaaagaatttgaaaaaaagactcaacaacaaaaatccacagagacgtgaaggaactgaaaggtgaagcaccggttaatcaccgagaagtgtcaagactagtgcacagccgcatagctcttctcttgtggtacaagatttctggctccgcttccctttcattcggtacatactagataaaccggtttatctgtttacgagtggtaagcaaaagtagtttgttaacaacatgtgaagaagctcttctaagtggttcgctgcctgacccttcggctactggtctcaccaccgttagagagttgagcccaaacactctgagactttcctcctccgctgctacttgtgtcgtcataaccagcgaccgcctttagtagctcagactggaggtttggacagtcatccttcagatcttcatatgcttttgtctgcagaacagctataatttccaagacagtaaaaaaatcaaacttgaagaagattatctatcaacgtgatctcataaactggatcttgatcgtacctgctaggttttctgcagtgaattttaaggaaacgctttttagttcggatgcattatatttgtcggataaagctaagatcttggacacggagctgatagatatgcctttgcagatgtgagattcacacaataatctgagcctactcagattgtacatttccgcagctgccagaagctttacaatcagtgtatcatctatttcggacggccttaataggtcaaatgaatgagccgttaatggttccacatctcctgggagggaatctttatacatgaagtgtaacaaggcctgtataaggtggaccatcgacttggataagtaccaacaaacaatacgagaaaaatattacgagaagctataaactcgaaatttgtaccttgaaaaccttaggttccaaatcgctgatcactacgtcgctgttgttctctgctagagtattgtaaaacattgatctgaaaaactgagatcgtgcagccaaaaccaatttatgagcttgaaacttctcaccggcaacgtcaaatgtgacatccgagccttgtaaagtatccagcaactttccaaaatgtgatccaagttctgagtctgggacatgaatcgagagtaaccgtgggcaatgcatttctgaaacgacaactccaactgtacaattaattttcaagcaatcgtctttaagatagtcagatgtctcaagcaaggaccgtctgaagaaacgcttgtatcccctattcaaaatccaaagaaaagaaacaagaattagagggctctgagcctgagaaggcagttcaatatagcagcaaaacgagtgtaaaaataataatatatgccattgaagatactgaaaagactttcaagccataccacatacttcctctgtacttaagcgtataaggaccaccatcaagtgaacgattaaaatggctatgaaccttatgcttccctttaccactttgatcaacaagagaaagctcaaaaagcgctctaacttcagtacattcactagccaaaacgatgaacacaggacgtaagaagagttatcctctggatttttaccgtcagggtagacgaagatagtccattgaaccctccccggagaaattatcacttgtatgagtttaactcaccaattccttagtaaactgtatccttg

SEQ ID NO: 5262 - DNA, 2517 bp, Arabidopsis thaliana landsberg
ggtggaacggacgatgacaatctcattatccgcaacctccccctgttcctctccgacgccgcccgagcctggctggagcatctgcctcctgcgcagatctccaactgggacgacttggtcaaagcctttgctggaaacttccagcgcacatacgtgcgcgtgggaactcttgggatctccgaagctgccgccagcagccaggggaatccctgcgagactacatccggcgattttcgaagcagcgcatcgagctacccaacatcaccgactcagatgtcatcggggcattcctcgccggcaccacttgccgtgacctggtgagcaagctgggtcgcaaggctcccaccaaagcgagcgagttgatggacatcgccaccaagttcgcctctggtcaggaggcggtcgaagccatcttccgtaagacaagcagcctcagggaaggcaggaggaagacgtccccaaggcgtccgtacaacgtggcacgaagaagaagaccaggaagaaggacaacgaaacacaacaccgccgaagcagatctcgtcgctgctgccgagcacaggaatcctcggaagcctcccggaggccaacgtgttcgacaagatgctcaaggagtcgtgcctctatcacagggcccccgtcaagcatacccttgaggagtgcgacatgctccaacgttacttcagtaaagacagaccctcggcggaggatggcaaggaccaagacaacaacaagaaggaggcgacaaggcagaagagttccccgaggtccacgactgcttcatgatctacggtgggcaagtggcgaacgcctcggctcagcaccgcaagcagcagcgcctggaggtctgctcggtgaaggtagcggcgccagtctacctagactagtccgataagcccatcaccttcgaccaaggcgaccaccccgactgcgtgccgagcccaggaaggtacccgctcgttgtcgaccccgtcatcggcaacgccaggctcaccaaggtcctcatagacggaggcagcagcctcaacatcatctacgtcgagaccctcgggctcttggagatcgatctatccacgatccggccggtgcggcgccctttcacgggatcatccccagaaagcgtgtcctgccccttggacaactcgatttgcccgtttgcttcgaaactccctccaacttccgaaaggaaaccctcacgttcgaggtggtcggttccgaggacctaccacgcagtgctgggagaccatgtacgccaagttcatgccatccccaactactcctacctcaagctcaagatgccgggcccaacggggtcatcaccatcggctccatgtaccgacacgcgtacgaatgcacgtggagtgcatggagtacgccgaggccctcgccgaatccgaggccctcatcgccgacctggagagcctctccaaggaggcgccagatgcgaagcgccacgccggcaacttcgagccagcagagacggttaagtccgtccctctcgaccccagcaacgacgcctccaagcaagtccggatcggctccgagctcgaccccaaataggaagcagtgctcgtcgactttctccgcgcgaacgccgaggtttttgcgtggagtcccttggacatgcctggcataccgagggatgtcgtcgagcactcgctggatatccgagctggagcccgacccatgaagcagcctctgcgccgattcgacgaggagaagcgcagagtgattggcgaggagatccacaagctgatggcagcagggttcatcaaagaggtattccatcccaaatggcttgccaaccctgtgcttgtgaggaagaaaggggggaaatggcggatgtgtgtagactacactggtctaaacaaagcatgtccgaaggttccctaccctctgcctcgcatcgatcaaatcgtggattccactgctaggtgcgaaaccctgtccttcctcgatgcctactcagggtatcaccagatccggatgaaagagtccgaccagctcgcgacttctttcatcacgccgttcggcatgtactgctatgtcaccatgccgttcggtttgaggaatgcgggcgcgacgtaccagcggtgcatgaaccatgtgttcggcgaacacatcggtcgcacagtcgaggcctacgtcgatgacatcgtagtcaagacaaggaaggcttccgacctcctctccgaccttgaagtgacattccgatgtctcaaggcgaaaggggtcaagctcaatcctgagaagtgtgtctgtcggggtgccccggggcatgctcctggggttcatcgtctccgagcgaggcatcgaagccaacccggagaagatcgcagccatcaccagcatgggacccatcaaggacttgaagggcatacagagggtcatgggatcgcgtccggccctgagccgcttcatctcacgcctcggcaaaagaggtctgcctctgtgccgcctcttaaggaagaccgagtgtttcgcttggacccctgaggccgaggaagccctcgagaacct

SEQ ID NO: 5263 - DNA, 1783 bp, Arabidopsis thaliana landsberg
  unsure (1)..(1783): unsure at all n locations
caagctccttaaacattctctctagtatccctttttttctttggaacaaccaatctgcaaactttgctaatttgccaggaaagaaatcattgaaaccaagacgacctgaggctaccgagccttcttcaacaagctttatgattctctcctcgtcgaaaaacttgttcgtgcgtaagttctgtcctaacgctgtcctacataagatgttggcggcgagggagaaagagatcttgcttagatccacggccacgggagattgttccaatgccgaattggatatcttcttcaccacgaaatccatttcttcctctcttatgaactttaaagtttgaagctttttagggttcaaaagctccatcaccgcgactttacgatattctctccaagaatcattgtatggtgcaaaagtgatgtctttaaagttatacgagagtttacctgtcgccatcaactttgttcggctacatgtctcaagatctttggttttgagaacttcttcagctgcttcgcttgaggagatcacaacaactggcgtaaaccctagacgaataagcatcacgggtccgtatttggatgatagctgatgaaaccacctgtgaggaagtcctgtgacacggtgcaagtttccgattatcggaagacctcgagggcccggaggaagtcggagattcgaattatggtttttcttctttagaaaaataatggagaagagggtaagcaacaaaacccaggacaaatagatcaagatcgccatttttttagcttagtttcttttttttttccttggacttggaagtgttgctgatgattatcaccggcccttgaagacattcttttatagaatgaatttgaagattattcaatacaatgtcacacgcgcgtaaatgataattttttatttgttttcttgacagcaaaatgcgtaaatgataattacaacatttatattatcacgaaacgtatatcatagaacagcgcatgacattaataagcggaataatttaatccgataatgtgttgaaatagtatattacaatttagtctgaattctttttttcattttcatatggatttggctctatttcaattttcaataattatatgttttatgactcgtggttagccaggtaatatatatcatatctttttgattcgcaatctctaggttacaatctagcttaattattggcgtacacgtttcttgaattaatattactataatgtatagtatgatgaatcacatggagtgttggttgtttagcctcgaataatttttggcttcaccgaacacgaacagtgaaccgattatactatgtttaattcataattaatcacctaacgcatttcatggatcttatccattaattcaactcttagatttggactatgaatttaaaactctggaatccaaaagcccaaaacctactagaaatttttctatgatttaaatgatggtgtaggagtagccgagtaggacnnnnnnnnnnnnnnnnnnnnnttaattgatagagtccatcgataacgaagctttgagcagcacaaacgatccgcactacaaaaaaaaaacacggctcgtaacataaaacagacgtgaatattttaacgtcagtttctaaaacgacttaacatcttccaacgtatttttttgtcgaatatttagtatatagacatttgaattattgaatacgaattatggtgtaatttctacaaattaaaaactctaaaattgagttttttttttttttaaacatatgcattttgaagagagaaaacaataataaat

SEQ ID NO: 5264 - DNA, 1656 bp, Arabidopsis thaliana landsberg
cttgatattattatctaactgtaaacacaacaattagtttaaaaaaaaattgaagctccagattcgatcgtgcctactttattaacaaaaaaatacattataaatttcatcaaattcaattataaattcgattatttgatttcaataatcggtctgaatgtatcttttttttgttctagatcttatttctctttctttttcttttgatcaaattttctctttgttatgtatcttatttttctttgttctatatttaattcaatataatacgacataaaaatctgaacatttatgctataacattttttactttgaataacaaaatttagaattttgttgaatttaaaagattatgatctagtttttaagtaaatgaacaaaagttattctttcttgatttattattcaaacatttctttcttactccatataacacaacaaaatctaaagaatcttatgttttttgcttcatacactttccatgttatcgagcttatattttggctcatcaataacgttgaacaggcacaagttgaagaggtattttcttgacaatagagatattaccagcttcttccatatcaatgtcttcacctttagtcccatcaggcatactccaatcaaaataataaagcaaattcatcaatgctagttccacagtagcaatcgccattggcatcccgggacaaatccttcgaccagaaccaaacggtaataggtcaaaatgttgtcctctaaaatctacagagctatttgcaaacctttcagggttgaattcttcagggtcattccaacgcttagggtcacgtccgatcgtccacacgttaagctggatttgtgttttcggtggaatatcatagccttggatcttgatgtgagacattgtttcccttggcaccacaaatggaagtgccgggtgtaacctaaaagtttccttgagtatgtggttcaaatactcaactttgcctaaatcttcttcagtgattctttccttcttgagacccagagtggttcgaatactttcttgagccttcttcatcactctagggtttctaataagttctgtcatcgcccaaatcattgttaccgcgcttgtatctatccccgcgagaaatacatcctaaataccacataataatgacacaaaatttttgaatcaatataggttaacataagatataaagaaaaccaaaatttgagaatttaccatgacaattgccttgagattgtccattttgagtttgaaagaatctgaatcttcttgtttatcgatcatatccaagatcaaagtgacaatatcttgattcttccttccttctggcttcaagtgatcatcaatcacatgctgataaaaagcatcaagttccttaaagactttgttgatcctcttgtgtcgttgaaacaaccaatctacaaatcttccaagtccaccagggaagaagtcagagaaagtgaaagtccctagagcttctgctgattcggtaacaagttcttcgatcctgtcttgatcgataacaaagccgctttcattgaaattctgtcctaaggcgactctacaaatgatacttgcggtgagagagaaaaaggtcttgcttaaatccacaggagattgcttcaaagctgattctgacactttcttgaccacgaagtcgacct

SEQ ID NO: 5265 - DNA, 4129 bp, Arabidopsis thaliana landsberg
aacacaaaatttttagtcaaactaaagagcgtgttgctttggtttatgataatacgttctcaaatatacggtcaaaatgatcactatattaacttttaaccgtgaaaggactcgattttctctctcctaaaggcaacttttctggcgattgcaatccctaacccaatcgccgccattggccggcctcacgccggcaaacgagaatttctcgatgtcgaagaaaaagaagaagccctctcgcccccttccttttcgcccttcctccaagttcgatcgagtgttggcttccttagtggcgtcgtcttcgttgtctgctcctcgggctgttccggctcctttgtcttctgaggttctttcctcgggtgccacctcgcctcctcttccagttagcccttccgggactattcccgagcctgttgggtctccgtctccttctttgattccctggatctgaagatgtgtcttctcctcgtgaatccccagttgaagctttgtgttgcgtcgctgagcttcctgctcactctcttcctctcggcgactccagtgttaaagaactcctccactgtggtttccgaccatcttcctgtttcgtcagttcctattagctctgttgcgactccagtgttagagaactcctccactgtggtttccgaccaactacatgttttgtcggttcctattagctctgtggcatctccagtgttagagatctcctccactctggccaccgctgggattccggaacactttgtgcctatcctctttgtgccaactccagtgtctgagacctcctccattgtgattaccgccagcattctaggaagctcgccagtggctggagcaaacctgcagataaacaactcctcaggtcacacttccgtgaaatcctttgctgaagtttctcagtcctcgaattctgaccgtccttgggccacaaaattcaaagattcccttaggaatctgaagcaaatggatcccccttccttcttggaagatggcaccccagttgtagtggctctcccatcgatcctcttaaaaacagctgcaatgtggaagggtcatcttgtttcccaattccacggtctctgcccttcttcgaccacgatcttcacagacctacaccccatctggggtaagtttggcaacattacggttcgaataatctcagagacagcagctctaatcttcattccgtcgaccgctacccggaaatgggtggttgacattggcttctggcaagctggaaattgctcttgtacggtctatccttggtctcccaatggcccattggaacttgaggaacttcaatttgctcccacctgggctgtgctgaaaaatgtcccccctcaattttattccttggaagagattagcgtcattgctagcggaattggcgagcctcttcatacgaagaagtcctggcttgatctgattaacattggagttcccaaagtgaaggttatcatcaagttggactctacgcttcccaccactgtggttgttcgcgacatctaggggaacacagcacgtgtctctgtggagtatcctcgtccacctcccaagtgcctgaattgcgggaggtatggtcacctcctaagcagatgcccgaaatctctactgaaaaaatcccctttcaaggctggcaaacctgcaggttcgagagaagtgtctcacccttccattgttctgccaaccactgattctagctctctagctgctaacggggttgaagatccctcgagggccaccaatgctaaacccaagagaaggcgctctcggtctaagaaacgagcgtctagtctccctcccaagatagacccttccacctttatcgacaaagaaaaaaagatcatgagctcgctacctgttaactccacgtagtgggtggaaaaaccagtggtggacaaggcactgaaagtgtctctgccgctggtctcgctggctccagttttgctaaaagggggtacttctgctgagatcccttctccctctgtttttgatccagccggtaggcctatgcctccttgcagcgccatagggggtcctattcagagcaatgttagctcaaaacagttggttgataatgccatgtttccaacccctcctggttggggggccatgtctaagaagaagaggaagaaacatatgaagatttggcataataaattgcagtccggagctcaggctagtgcacgaggtgaatcctcgagcaaggctggaattcattgatgtatccttcaatataaccttttgtgtagaaatgacaattttttgctggaatatcagaggcttaaatagccattctcgtcaaagagtagttcgtagctggattatttcgaataagttattagttagcggctttttgaaagctcatgttgtagagaataacgccaaagcttttttggcttccattcttcccgggtggagaatggagagcaactattgttgttctgttttgggtcggatctggctagtctgggatctttcggtttccgttttggtctttacgaaatctgaacaaatgatcttgtgcagtatcaaagttgattctgttgccacttcgtttgctgctgcttttgtgtatgaaaagaatgctgaactcgatcgtcggttgttatgagaggaaatttcagctttagctacaacctcacctttgataaatactccttggctgctaatgggtgactacaatcaaattgcagcatcaagtgagcattactcaataagtcagactgctctttcgatcaggggccttgatgattttcaagaatgcttgagggtcaatgatttggctgatcttccaagtcgtggtgttttttgtacttggtctaatcaccagcaagggaatcctattattaggaagctgaacagagctctaggaaacgggccatggttttattcctttccgtctgccattgcctcgtttgaggctcctggtgactcagaccactcaccttgtataatccacttggtaaatcaacatgctcgtgctaagaagtccttcaaatatttctctttccttgcgactcaccagacattcttggattgtattggggctgcttgggagaaagatactcttatttgttctaatatgtttatgttagaggagcacttaaagaatgcaaagcttgcttgtagagtcttgaacaggtctggttttggtaatcagaaaacaagagacgctcttactcagttggaagacattcagaggctccttctttccattcctaatacttctcttttcagacaagagcatgtggccagaaaaaattagaacttctttgctctggccttagaatcgttctatagacagaagtctcgaataagatggcttcatgagggagatgcaaatacgaggttctttcatgaaatggtaattgctcatcaagctgttaatctcatcaagtacctcagaggaaatgatgattcaaaggtggataatgtcagccagttaaaagatatgattgttgcatattacactcagctttttggttctgaaaatgaggatacagttcctttgtctattgacacgattaaggctctgcaccgctttcgttgtgatacctcgcttgcagcaaagctttcagctattccttcagttgaagaaatcactcagtctgtcttctctatgccaaagaataaggccccggggccggacgggttcccagcagagttcttttgggattcatggtatgtggttaaggataacattattgctgctgcgaaagagttttttaccacatgtcatttgctgcgaaggttcaatatgacggctataactcttattcctaaggtgataggggcggataagctatctcagtttcgcccagtgacttgctgcaacacgatatacaaggttattactcggatctatctcagcttctaaagcttttcatctctcaggcggtccaaaataaccaagttggtttcataaagggaagattactctgtgaaaacgtattgcttgcttatgagttaatggaagggttttcatcttgagggggaagtctctagaggctgtttacatatagatttatctaaggcctatgataatgtgaattgggaattttttctcaacgttcttaaggctaatggatctcccttcgacatttgtaaattggataagaat

SEQ ID NO: 5266 - DNA, 2718 bp, Arabidopsis thaliana landsberg
  unsure (1)..(2718): unsure at all n locations
cggtccgccacgtctgctttaagttttttttttttggggacacagattgggcttatgttttgttttgtaaggcgggtcaaatgggctgtggatttggtgtcgacataaacaattagtcaaatctaaacgaccacctaacgtctgttttttggacggcaacaattttaagaggcattttacaattttcactttgataaaaatgtgttctcaccacttctcaatgtgtttctcaatctctcttgagacacacaaacgtatatgcatcagatcctaaaacaaactataacttttcagacctgttcttctctcgggtacaaagttttcccgagaacataaaagactgttttctaaacaactcctactcgaagtttatcttcttcatctgcaagaatgatcctcaaaaattgtagccctgcataaaaaacacaactaaatttaacccaaagaacaacaccaaaacaacaactgttgataggattcattagatttttacctcttttacagagctctcttcttagcttctagttcagtaactgaagtcatcttctttagttttcatgatcattttcttcagtttaccctgcgagaagaacaaatgtgttgtgttggaattaagtaacaaacaccaagtgagttccctgtgattgataatttccgtaagttgataaacctgtaaaaactttttcacaaacggaaggaccaccatgcgatactcaattgctgatagctttgggaattcatgtagctctccttgtgtaaattcgttcagcaatatctttgaatcaatcaaatggaactgcaaaaaatacccaagatttcttatttttatcagtagccacaggtcaaaacatgttataatgagtagaaagaaacgaagacgaagaatacataccttctttgtcagaaattttcgtagcttccacagactttttataacaatgtcattttgaacagcagtagatagcccagatatactctccatatactctttgtcggttaatacttcatattttggagaaggtgctctttcaagaacatctcttacaacattcaagaaacatttggtatcatcatcttgtatcactacaagctcctcacacttcattcgcagcgctgacgcatatgtgctccgctgattaacattcttcctattgtcttctctgttacaaatggtttcagcctcacccaacatcttatcataggttaccattctatgtctcttatcatagtagctttcctttttcctaaccatgccccttactattctcagagctgctaaccatatctcaaaattgtgtacgccctctcccatttgagacacaagtttctcatcgatttctgggcagtcgagaacccaggagaccatcttgtccccctcaggtatcacatgctcataaattccactggacttaaaagtctctacactccctgtgtcatcaaaatgatgctcttcttcacacagcagtctcccatcaagaagcagattagatgtaagtcgctcaataccgattgtttccttgacccgggaattttcccagaacctattcactacttttggaactaaactcgcgcggacatctgtggtgagctgtctaaaatagttgaggatgtgttcaaggtgcttaagatctaagaagcagatgcactgagggttcttaaagaagctacatttatcaagatagctcccaggaacttcaagtagttgcagattcctttctgtgtaatatatcaacgagtcccaaagggtacatgaaagagtatcattttcattaccgcaagaagatttaagaacctgagcaaactgtttgagtattttactccgctcttcatccttagcttcaggccaatcactacaccatccattaacataaacaaactcttccccgtgcttagctctatccttgatcannnnnnnnnnnnnnnnnnnnnnnnnnngctcccatttcccacaacatatcatgtcagctaataccttatccacacacttaggacgagcactgggatcgggtacaaatttttgcacatggttatctaagatgtgcctccggcaatctgtaaaacagtagtatacctgagaaaaaatgtggaacttccagtatctccatcgaagattattggcaacggatacacatttcccaaaatcttctttcactttgttaacatacttattctctacatagtctataagctttctagaatctaccaccaaaagttctcttttggtcttgtcatccagattaacccaaaaggtcttcaatagatcaaaagaaggatctttctttatcgttaccatccgattagccatagtacctgtatcggaaacagtcacagccgcatgcatcttctttgttgcaagatctatgaacgtataaagttctgtcttcaagctttcactatagcctaatagggatgtccacggtccttgaggttgcgtaactaacactccccattttgctttggtcgcagctttcttataaaacttgtttatccgaagctgatcacccaactggatcatcgaacgagcatagccacgaaaggacctcaaagcgtcaggacacagaagaatagacactgaatatgcatcgacagaagcaaacaagtatacgcatttgacgtcggtgttatctgtttcataggctagcgcaaaaaaggaaacaccttgcagttcgtggtgagaaaagcaactttcgtgattcctatgatcagaaatcgaattct

SEQ ID NO: 5267 - DNA, 1431 bp, Arabidopsis thaliana landsberg
ctgaaacattggatctcgcgttttaaagtttggtctcgagaggagaggaagacacatcagagtgcaaagttactgacctgaacaattctttgcttgagttgctcaaaacttttaggtaaaagggctcggaatgtgccaccgatagtaacagagtcgggaatgacattaaaagcatcactgccttcaaatgtagcaactgtaaccacctgtaagcactcaaatcaaccaacatcctataatataagagacacttttcttgaagagccaaaagagtaactatatatacctgcgagtctaaaggatctgcctctcgcgaaacgaggtgttgtaagctcagaataacatttgaagctgccaatactggatctatggcgaattgaggaagagctgcatgacctcctttcccgcttatcgtagctttgaaacgtccactaccagccatcaatagaccctctcttgagctcagttgacctaatcccaatagattcgaaacatgtaatccaaagattgcacccacattctccaatactccagcctccacgattttctttgcacctgctcctccttcctcagctggttggaaaaccagaatcactgtaccctgatgaataaaatgtccaacaagtgttaataagaaaccaaacaacctgatgattgcaacagtttgaaaatgttattagctaaaaaatacagcacaatacaatactaaacctgtagctcttcttggtgttctttgagcaactttgcagcaccgaggagcatcgtagtgtgagcgtcatgtccgcaagcgtgcatcttccctggaatcttactcttgtgttcccattccaccatttcctacacaattccatcattaccatgttcaataagaatccactagcttgcaactcaagtaatttaaaatcacataagaaatctgatccataagtcaaatgataatggttatatcttaaatgccagttagtattgtttgttgtactaaaaaaaatattcagaaaaaaacaaatttaaaacatgacaccatttcgactagcaaaatatgatcagtgattaaataatttgggcttgaagggaatagattcaaaaactttgtaaatgaaaaccttattatacctgaataggaagtgcatccatatcagccctcaaagcaacaaagggggcatggccagttccaacatatccaataacaccagttgggtacttataagaaacacccatcttctccaactctgctctaacaagcttagatgtctctactttctcataacctaactctggattctcatggattctccttctgattccaaccatccaatggaaaaaatcttctcttttagctggactaaggatatttttaggaatctgagacaaatcattcgaggtacatgatatcagacacgagtttagtaagtgaaggatcaataacaaaga

SEQ ID NO: 5268 - DNA, 1543 bp, Arabidopsis thaliana landsberg
atgtttgggattgagaatcacgtcgagatgcaaccattaatgggatcagaagatttctctttctaccaacaagcaatcccgggacattttagctgcgttggaatgcaaaacaaagctcgttcaccaatggcgagccctcactcgccgtactttgaagttaacgaagaattactaccttatggtgcttcccttcatgcttccatggccacaagatatcttcttgaactaaaagcttcaactctaaataagagtaacaaaaaagatgaactttgatgccaacaaacattggcttctcctattcttctactctgaaaaatgtcaaaacatggtaacagttttttcttttttacagagcctgccatgtaaagattaataaattgttatgcagtgtcaagcttctattaaatccaagaaatgttattactgcaaacaaaaacagatttgggccattgcaatgagagagctgaaacggtcaatttaaacaaatcagattgagagatttcagaagattcgacgcataaacaaatgctaaaattcgagagcttgttaacatgtctaactgataaagattcaatttttctttcttgttttttcttcttcttctttagattcaagttctgatctttgcttctttgaaaatcacaaatcttttcttctgggtttctataaaaaacccattttttgttgttgtcgtacaaacatttcccgtaaagattggatttttgtgtaagcatttgaagatagctaagaaagtgagaagcttttagatgaaagtgatggtaatggagatggaggaatgtgttaaagaaaatggttcatcaacacctaaatctagagtcacaaaccaatctagagctctcttaccgttgcgtctgcttcagattctgttattgtttcttgttttgactcttgggatctctgttgttagtatacacatgatcaagtttttgaagattcaacgtttagatcctgtggctccaattactttgctctctacgtataatcatgagagtgttactttagatagctttattagacctccttccaatgtttggcacacaatgaatgatagtgaattgctttggcgtgcttctatagagccgcaaagaaatggttatccgtttagacgtgtccctaaattggctttcatgtttcttgccaaaggtcctttaccatttgctccactttgggagaagttctgtaaaggacatgagggtctttattctatctatgttcattcgttgcctagttacaaatcggatttttcgaggtcgtctgtgttttacagaagatatatccctagtcaggtactgtcattgatgtttcagaggaaaatcttgttttgtgtttgtttcttgtgttctcacagtattagtttcttctgtgttataggctgtggcatggggagagatgagtatgggtgaagcagagaggaggcttttggctaatgcgtcgcttgatatctctaatgaatggtttgttctgctatctgaatcatgcattcctctgcgaggtttcagctttatctataggtatggctctg

SEQ ID NO: 5269 - DNA, 819 bp, Arabidopsis thaliana landsberg
catcagaaatcagatcccacagagaagtaaactcaacgaatcttcaactccactatagatacatataaccaaaccgaaaacacaaaacttcaagtatcaaacagaaaagcaaaagcaaaaaaagccacgctgttccatgagaagctaagagaacgagtcaattccagattttgagagcaaatacgtgcatagcaagtgcatccatatcagcccttaaagcaacaaaaggagcatgaccagttccaacatacccaacaacaccagtaacagcaactgggtacttataagaaacacccatcttctccaactctgctctaacaagcttagatgtctctacttcctcataacctaactctggattctcatggattctccttctgattccaaccatccaatcgaaaaaatcattccttttagccaaagtaagaaactttgaaggtatttgagataacccattagaggaacatgaaatcagagtcggattaagcaagtgaaggatcaaaacaaaagaaacccatttgaagaaactcatgacttatctcggattcgattgattgatacttgaatcaatcgaatcgtgtagagaaaaagaagagatcgaagaagttaagagaggtgtgcgtgatgatgaagcaggggtacaagaagcaaaaaagtggtatttaaatcccaagtagccaaagctcaaagccaaacacaacttaacttcgtctctattttctcatgaagtctttcattttattttattttattctattttaatttttttttggtaattttcctcgaatcccaaaattatttgtaagaaaacattcgttt

SEQ ID NO: 5270 - DNA, 658 bp, Arabidopsis thaliana landsberg
  unsure (1)..(658): unsure at all n locations
cgggaaaggaggccacgcagctcttccgcagcatactatagattttatactggcagcttcaaatgttattggtagcttacaacacctcgtttcacgagaggcagatcctttagactctcaggtaataaatataatctttggctcttcaaatgtctctatatagcatgtggattgattttatctatgcgagtgcttacaggtggttacagttgctaaatttgaaggcggtggtgctttcaatgtgattcctgactctgttactatcggtggtacattccgagctttttcaactaaaagctttatgcaactcaagaaaagaattgagcaggtcagtaactttaccctctgatgtgtaaacttttgtcttaccgaactgttttaactctctttnnnnnnnnnnnnnnnnnnnnnnnnnnnnnnnnnnnnnncgtgaatatgtgtaatgcaacagtggatttcattgaagaggagaaaccttttttcccaccaactgtaaatgacaaagccttacaccagtttttcaagaacgtttcaggcgatatgttagggattgagaattacgtcgagatgcaaccattaatgggatcagaagatttctctttctaccaacaagcaatcccgggacattttagcttcgttggaatgcaaaacaaagctc

SEQ ID NO: 5271 - DNA, 964 bp, Arabidopsis thaliana landsberg
aagtgatatatcattaggcaatacgaattcctgtacgtacacaagaattatccagattataactcaaaatctgatttttggcggaaacagaaatttccaattcaacttctcaaaattccatcctaaagatatgctaaattccgactagttctaacccttaatcaaacaagctttacgattccgatacagccaaagacaacagacgataaattagagatactaacccagctcctccgttgcctttgtcggagagcgttttctccacggggaaactctgagtacccgcttctccttctctggaccagtatcctgggtatgttgctttgtcgggacttcgtcgtttgctttattcccagccatagcgaaagttgctatctcgccagaggttcctcacttcgctgaaaaaactgcaactttctctttccctgattttggagttcagtggctcaattcaactacccaacaattcgaagtgatgtcgaaatatgaaggagtggataatgaattttgaacttctttctacttctctctcaaatctctccgtctctttctctttctcattttcttcttcttcggtttcttcgtttcattttttttttttttcaaaaactgaaccgcagaaactaaaccgaaaccaactcatgtgcggtttggttgcttccattaaggatattttgatccgaaaatgattgacaagacaaacggtgaaaatcatatctcactttgacaaatcatgggagtaattcttttttcatccacttatgtgaaaatttctttttaatatattgcaaattttattttttattttctcatgttaatatatgaagacaatagccatctagcggtttcacgcctccctcaagctcagacgcgaacaacgagcgattctgcttcctgaattctcataattgagataccataactcaaacggtgtgtgactaatttgtcagatcgtcaatgtttt

SEQ ID NO: 5272 - DNA, 3941 bp, Arabidopsis thaliana landsberg
  unsure (1)..(3941): unsure at all n locations
cctccaatgaaatatatatcactgccaattgtcacattgagtgtggagtggataagtaataagagacaaacaatcatcccacaagtattggtaacttggaaggcacaagttttgaaacaaaccttatgttctgcattctaaaatagtgaaagtttccccattgctctgaaggcccgtgcgggtgctttgnnnnnnnnnnnnnnnnnnnnnnnnnnnatcaatccacaaccagagatattacgagccattactcagacatacagatgtttggctggtgagattcatgcatcgacaaccatagattgaaaaggaaaaatgtaactagacacccacctgttcatcctctgacaatgggtacacatcaccaaataatgtcactcttgcattcgataagccactccatccgggtatctgccagccaaatcaacggttacataacataaagggtaaaccttttgctcgtataatttaaacacaatagccaatgttacctgaacaacaaggctgcatctaggttcattcaagagatttcgtgtgtggatggccagcggtgaaaacaaaaatattggatctgataagaaaaagtagaagcaattcaagaaatgagcatctattatatctcaaccagtagactcaaaacattaattgtaccattataatttggtattgccttcaatacacagacacaaaaacactcctacatgtacacctctaatgaaatttaaggaaaagagggaaaaaaccgctttgacttcacttcctactattcgttcccacaaaaatcaaatcaagttaagtttttacagttagaggagttatgactaagaaccaattgtcgactggcaaataattaaactcatactctgagaaaaaattgagcgtgcaacaaaagaagacactgtagaactaggagcagtcaacaaagaaagatagactcagtgacttacgccccatccgatcaggtgcaaaatctaccaatgagccaaatgggtacccttccctgcggtggtgcattttggacatcactgtgcacagatgagcaaacctagccttgaatcataaaaacacaacaagacaagacagataaagaacttaaataatcttttctcattgaagtaaaaaggaagaatacaaaccatctaaaggacaaacccttttacctgttccaacaagttccgtacagctaaagcaggccgaggtaaagcatgagctgatgtagcattttgaacaccaccagatattggagttctaaaaagcccagctcgatttcctccaccaccctgaggatgtgcaagagatgcctccacatcgattacactatgagaagtttcaccattgctattactcccgagcttttccttcacacaacattacaagctattaatctctatgtcaaagcaaaccattacgtggtatcatctttccgctaatctaagattcgattctacacaaactctgcatcaaaaccaaagttttgtgtccaaaattgtaatcttttgctgaatttttgcatacccaaaacaaaagttataatctttagttgaatttattcatcacaagacaagagaaaaagtacctgtgataaagagaagatatccccaggaaaaaaaccaaacccattattatcttcaccttcacttggcgtctcgttacgtaagagagcttgtatacgaagcccgtgacttgatccattactgagtctcagcttcgggaattgcgttttgggtagcgaattacaaaaccaacacgaagactgggatgaagtgggcagcggagatttgaggagaggcttagtctgtaaattgggtgtgtgtgttgaagtgaagagagcttccatggtggatgagaataagatttgggttgaagagtcttctgatctttcactatggcagatgcttcaggcgtctttgttgaaagtagctttaggaattaggacttttccagagtagggtttgtataacacacacatacatataagggtttttctttttcttttggctttttttttatagttggattacgattacttttgtccttcggaattacttttgatgtattttctattctcttttgttttgttttgatgttgataataacgaattttccttgaaataagaaaatctgtttcttttaaatttacaatttttattgataataacataatattctaagaaattatctttgtttaaaaaaattgggaaagaaaagatttcaatctcatctcaaaagaacctgataatgactattggattaccattattccgtttctaaaatcttcttactgttgattaaaaaaattaaatctcctctaaagaaatatctatcatctcaattggttcagaccatttttaatttacgttgaaaagaaagatcaaacagatcaatgacacaaactataattaaggcactaaacactaaatgtcctaatttgcataatgcgggacccatgtcaataatatttctcaaacgttgtcgttttcagcccatccttcctccgaatccacgcgccaccgtctaagctgctgcgtcattgcacgcgccaatttgctttcaaccgctcgaatcatcccagctgaaactccagtcacatcttctactttctttaaattctgccacgtcgtcgtgttcttaacgccgaaccaaaacgccgccgctaagaacactctcttcgtcgctcttggcctcgtctccacagccaaagccaaagacgcatatgaaacgacagcgtttgttaaatccctgtttagtcctaacttaccacaccaatttacaaaaatgccatccgccaccgtaaccgcaacggccttggcattcactctgttttccctccctcgcgctctgtttacgtcacgcgtcgttgacgatagctcggagcttgagacacagtcaagagacgagcagcaagaagaagacgacgattctgaacaacatgttgttcgtggaggccaaggaagaagaggaccagaaacgaaattttgagtaagagatttgcaatttgggcaaatgacacgccggaaatgacgagcgaagagaaaatttgaggcatggaacttagcgtcacaagaacggcagaggaaggcagagtccgcggcacaatggagatcagcttcggcaccacaaagctcgcaaaagctcaccattgagtcgatctctctggatcaccagaaagaagtgagagagaattggtttggaatgatgatggtgggaagagagatttaaggaagagatgtaaatgattgagggagagaaagagcggtggagtttttatggttcatggttgatgagagtagtctcttccacagttcacacatcaaagaaacttacatgagccataattttttagggaaatgaaatgaatggtgtttgtagaattggagagaatgacgtgtcgtgaggttttgaggctggtgagattatgtggtcatttttaaaactattacactagccgccaagtcattcgtcttccttttggtgtgacgtggagatttagtcaacactaatgtcttttcagagacttggtctcattgcaaattgcttcttcttcttttcttggttgcttccattacatttcttctgcattgttgcagtcttttatataaacttttatacattgatcttttgtcgaatacaaaacagaagataatactcttaatttataatctaaggagtaaggatacaaaacacaaggtgtaaactgtggtgaacctgtttgggttctgatccgaactagtacaacaatagtctatatcttgaaatctttccaaaaatggtttcttaaataaaatggtctttgaatagccaatctaaatccaatagctctgttaagatatatccatagagcccctcctacgaatcacactgagacctctccagagagttttacttctttggtatccgaccataatgcctctggcgtattctaaatgccggntttcgtagca

SEQ ID NO: 5273 - DNA, 1647 bp, Arabidopsis thaliana landsberg
acccccatattttgagagcctttgtttctagccttacacttcaataactgcattttcttctcgtgatgaaaatacattttttccattatctcattacatacttcttatcacagtctactagtctatattccatttaatcaacgagaaagctaaattgagattttgcatggtgctctcttcatcaaagctttgtgtcatttccacaaatccatgaaacgtttgggtcatttctgcaaattgtgcaacttgcccttctctatcactttccacagtgcagatttggcttcttctaaagtctcaacaccatgactttcctcaaaggctagcctttgtatcttaaactgcacaaatcacatattgaacacacaaacaaactcagagagagcttctgtttcagaatagtagtagaaatgttcttaggttgttacagatttattacctgagcaccttgacgaacccttatatcaatccctttgctatctatagaaatgatagcagcatcgtctagctcggcttcactagacaataactctctaagtggctttgagaagattgcattaagttcctatcataatttagtatgaaattacaactccacatagaatcactgagcaggctcgtcaatcatttaaagggtttcaggaaaagaaaactcaccttcagattttgctcacctccatcaacagctatcttatctggctgaagagtctcgtactcattgacattgatccacgcgacagtgccaaaacctccaatgaaatatatatcactgagaaaaaatcaagcttggtattattttctgataagtacactatggaatggctgaaattcaagaagaacacaaaaaccttatgttctgcattctaaaatagtgaaagtttccccattgttgggaaggtccttggtgatgcttcaacatatactgcttatgggcccattcctagaaatccagaacaagagaaccaatgaactagaaacaggaataacagtgttgaacaggtcatgtattactcattctgtgttgttccatattgacactcacttgctgctcttctggcaatgggtagacatcgccgaataatgttactcttgcattcgataagcaactccatcctggtatctgaaaataccaaattcacagagaacaaaaaagggagtaaacaccaatatgtttgtatagtttaagcacgattgataatgttgtacctgaacaacgagggtgcatctaggttcagctaagatattccgagtgtgaatagccaacggtgaaaatgaaaatattgggtctagaaacacaaagaagaagaagccaccgtcaaacacataaactaaacatacaaagagacatagtcaagggaaagacttacgccccagcggatcaggtgcaaaatctaccaacgatccaaatgggtacccttctctacgatggtgcattttagacatcacagtgcatagatgagcaaacctggccttgaagccataaccagtaacaccaagaactaaaatatttcagaaacttaacatctttcctcatcgagaacataaatgagaacaaatggaaatgattgttttacctgctccatcaagttcctaacagctaaagcaggtcgaggtaaaccgtgagcagaggttgcgctttgaacacca

SEQ ID NO: 5274 - DNA, 4453 bp, Arabidopsis thaliana landsberg
tctaagttcttgtgaaaatgtaatacaaatgaaaaggtgtgtctcgtcttagctcgagttagccgaaatattaggagcaaacaaaacaagagttgagtttccgtctatattagtgatcaagagtctgatcgatggaacatgaatccatgcggtggaagagtctggttcctagctagaggaacaaaataaggtttctagtctttgggtctaagttagggacgtatgtatttcgtggaatatatgttgaaaattggttagtgtcgacctaaaagatgtcttcgtatcaaataatcataattaagcaagatcatattgtaagagcgtagatacgtagccaaatctcaagttgtgtgtgcgtttcttatatttgtttttacagtgattggagtgtgtgcatggacactcaaaggattttcaactgctcttttatttgctgaaaacacaattcacacaagtgcatcttttagttctcacgaatccaaaatgtcgacactcaaggaatcacatgggtcacttttatattatttgtgagtattaattagagaagaagactaacatgccatctttctcgacaagttgaatgttcacagtcaattaaattagagaagactaacatgccactcaagtttatgttttcaatagataagcattactccccaaaccagtttcaactccggttaagatgtgaatggtatcacacattctcaactgatagttaattaaacaaagaaaaatgttcacaggttttgcattaattaatgtaaatttgaatgtaattgttaattatgttattggttgacgatataaatagcatgtgaagtgaaggattcacagcaggagagaagaaaaatgatgtatagaagcgtttgtttatttctaggattctagataggatgttaataatcatatttaataccttcaagtgacgatatttaattgttgtcggattgtttaaattagttttatttttcagtgtttaattaagaatcaagatctctcgtacacagcgttcttctaggaaaataattgttcaagaactagtattttcgtttagtgttacaataggttttaaaaaaaaaaacaagttttccgatgatatattttttttttttaattttaaaccagaaacagatggcaatatgttaaaatttatattctattttagattcttttgaacttctaatgtgaaacataacatatatagtatctcgattgatgagtcttattagtctatcttgaaccgataaatcctagctaattagaccaatgaattagattttgatatcatattaaatttcatgaatttctaattcaatattttcctacttttaatgtggaatatttctcacattagtatatagtgaagtaattgctttgaaaactagttcttgttgcttttattaccagtactactaacgaatatgaattcttattttataaatttgtgtttaaagaatagctaaaataaataaaaatggtcgaactttttgttagtattcctcctgaaaatctccctaaaagaaaatctttagtagaaaaaggtgataggaatcgttcacgcaataagaaaacagcagcattcgagctaccaaaggtagatctcactcataacctcacaatataaattttgtttgcttgtgttgctttaaatgtcaataccaccacaccatatatttttagatttaagatatagattgaagatcatgttcccactctctagtctctagcattgtactttgagttacattcaactccaccttctcaaaccaaaacaacatcaagttaacaaaagaagcaacatgaatatgatgatgcaaaaactctctattctatttctacatttaatattactagtactactctgcgtccatcctctcaccaccgtagccgaccgcaattccaccgattggtgcgacaaaactccataccctgatccatgcaaatgctacttcaagaaccacaacggatttcaacagccgacacaattatccgagttccgagtaatgctggtggaagcagccatggatcgggccatatccgcccgtgccgagttgactaattccggcaagaactgcacggatagcaagaaacaagcagttttggcggattgcattgacctctatggagacacgatcatgcagttaaaccggacattgcatggcgtgtctcctaaagccggtgccgcgaaaagttgcactgacttcgacgctcaaacgtggctgagcaccgcgcttacaaacaccgagacctgccgacgtggctcatccgatttaaacgtcacagacttcatcacacccatcgtttcaaacaccaaaatctcccacctcattagcaactgcttagccgtcaacggagccctcttgcccgctggaaacaaaggcaacaccactgctaatcaaaagggctttccgacgtggctttcccgtaaagataagagactcctgcgtgccgttcgagccaacctcgtggtggccaaggacggatcaggacatttcaacacggtacaagcggctattgacgtggcgggacggagaaaggtgacgtcagggaggttcgttatatacgtaaaaagagggatatatcaagaaaacattaacgtacgtctaaataatgatgacataatgttggtcggagatggaatgagatccaccattatcaccggcggtcgaagtgtccaaggaggttacaccacgtacaattccgctactgccggtaaataatttattcatttcattttttttttcattaatttctagttagtagattggatctaacaagtttctatgtcattaatgaaaagtattcgaatattccgtacgatttgagttttccaatagataacatacatggtggagacgtccaagttaaatcatacattgggatcgtaatcaattaccactacttttaaaaaaaagatttaaacgtaaccgttgtttttttttgtttttttcccccgcaaaatgtgtaagcgttaccatatttcattttctctcattatgaaacaattggctaaattgcatgtggtccaggtatcgagggacttcacttcattgccaaaggcataacgtttaggaacacagctggtccagccaagggccaggccgtggcacttcgttcatcgtctgacctctcaatcttctacaaatgctcaattgaaggataccaagatacactgatggtccattctcaacgccagttttaccgtgagtgttacatctatggaaccgtcgatttcatattcggaaacgcggctgctgttttccaaaactgtatcatcctccctcgcctgccactcaaaggtcaagccaatgtaattaccgcacaaggtcgtactgatctatttcagaacacagggatctctattcataactcaataatcatacccgctcctgacttaaaaccggtggtccgtagtgttaagacatatatgggtcgaccctggatgatgtactcccgcaccgtggttcttaagacgtacatcgatagtgttgtgagtcctgtcgggtggtctccgtggactaaaggttcgacgtatggtctcgacacactgttctatgcggaatataagaatatcggaccggcttcatccacgaggtggcgtgtccgttggaaagggtttcatgtgttgagtaaagcttccgatgcatctgctttctctgttggaaaattcatcgctggtactgcgtggctcccaggctctggtatacccttcacttcagaactctaaggccatctttgatttttcgtgtttcaggtgcaaggatttacattctatacttttgaatatataactcattatgcctattatgaaactgaagttttagctatagatggacgaaattttgaatgttacatatcctaataattgtcccaaacagaagtagcattgcatattgaatatccagaaaggaagaataatagtagaattaatgtagaagacccacacacgagaactttagttacagtagttgccaacgttttgaactccaaatgacctataactacgaagaacaaagctctagacacaaaccctcacgaactaacgttgtttagaaccatgaggaatagaagatatgagtacataacaatcaatgaaatatgagagaaacacaacgaacccaactgctctttgtcgttatacattctccatctacagccctaaacaataggagataagaataccaaaccagagtagatttgaaaatgatgcaacatactcagcaaaaggatgcgaacgaggcgaggaaaaccatcatcatgctgaaaattagtatcaactgtccatttggtattgattttgtggccgagctgtgatgttgttccctggaggaaaacagcaaataagagtttcttagtttgttttacataaaggttaaattagagaagcagagagtaaagtttctgatccttacttttgcccggcctgaagagcaccacagtacataaaatttaa

SEQ ID NO: 5275 - DNA, 1399 bp, Arabidopsis thaliana landsberg
tgttcttggatcattaagacacaagttcaagcatcaactacattgtcgtttctagaaatactgtcaaagattccagagattggtgctcgaggtttatacaaaggctcgattcctgctgttgttggtcaatttgcaaggtttcatctcttatgctttgccttgtggttattggttataagcattatcatgatttcatctcttgtttaaacatttttcagccatggtttacgaacaagtatatatgaagcaagtaaacttgcgttaccgctcgttgctcctactcttcttgatattcaagttagttattgtaaaaagctcattgccaactttattgctacataatgtttcgttctttgaatttttttgcttcttgattattttaggttcagtcaatcgcgtcttttattggtacggtattggggacaacgttgcgaataccgtgtgaagtgttgaaacaacggttacaagccaaccagtttgataacatagtggaagctacagtttcgacttggcatcaagaagggctcaaaggactctttcgtgggaccggtgttacccttctacgtgaggttcccttctacgttgctggcatgggactttacaaccaatcaaagaaggtaatcatggtagaacagaacaatgacatgtctttgtgtaattaatatgacgtggttgcgattgagtttcacaggtggtggagagacaattaggaagagagttggagccgtgggaagccattgcggttggagccttgtccggtggtttcactgcagttttaacaacgccattcgatgtgattaaaacaagaatgatgacggctccacaaggcgtggaattgtcgatgttgatggctgcttattcaattctcacacatgagggtcctcttgctttctacaaaggagctgttccaaggtttttctggactgctcctctcggagccttgaacttagctggctatgaacttcttcaaaaggctatgatcacacctctgaatcaatcagtgcatagtgagtaagattggaaaactagaccaacattttgtgtcataataatttatttcatgtttatgtattctaaatcttgaaaaaaaaaatgtattctacaaaaataacataatttacttttttttttttttttttttctcaagtgtagtattgtattaaacgtaacccgatcatacacaggctatactaaaagccccacgaaaagtttacagcatactgcataagaaaatttgtttgtactccacctaagcccacgtgtcagcaactggatacaaccacgacacatgctggatgagtaatcgaaagatttccgacatcaaccttcgccgttgagcatcgatttcggtgagaagattatcgccgaaatataatcggtcgttgaatcctttgtttgt

SEQ ID NO: 5276 - DNA, 3772 bp, Arabidopsis thaliana landsberg
ctttctttggaactagcggtttctgctgttgttcactaggcatggatcactcgatttcttcccaagaagtcgcaaccaacacttactatgtatggtacatcacaacatagacaataaaaactcttggaatgttccgcgaaacaggtgattattgactaccatgagtggggaaatgtggggtaagttaacaagtacactgcttcacatgggaaaaagaaaaatgagatacacataattcacaaaatataatttttatcttagacaatttttaaaaaataatattaaaatcagtgtagaagtggtccccaccactattttgtttttccttaaaattaattattatttttgctggactaaataaaattggttttttttttttctctctctgtcctaactctttttctttctctgttttgtatctctctctctctctctcactctttgtctctcccctaacctttattgtactagcataaccattaccatacatactcttctctatcacgccacaaacgcagattcatcacatcttcttcttgttcatagcatctccatcactattgggctctcttcaaaggtgtatttctggggttacttattccttctttgtattgattagtgttgaaaaggtgtctctgttgcgttcaagagctagctttagggctatatattaagaggtttccagaggttttttttggattataggcatctgtgtttggcttacatggatcctttttttaaggttttctgggcaagactaattgattaggaccaaagtttgtgtttttatttgtttggatctacaaagatcaattaggctgttgttgaattggatcgagtgatggaagctagattgatgaaggtggggaggctcaacaattctatgggtccgtaggtaatagaagtgtggagtgggatttgaatgattggaaatgggatggtgatctctttctcgccacccaaactactaggggacgtcagtttttccctctaggaaactcgtccaatagctcctcctcctgctctgatgaaggcaatgacaagaagaggagagctgttgccattcaaggagacactaatggtgctcttactttgaatcttaatggtgaaagtgatggcctttttcctgccaagaagaccaaatccggagccgtttgtcaggtcgaaaactgtgaagctgatcttagtaaagttaaggattatcatagacgccataaggtctgtgagatgcattccaaggctactagtgccactgtcggaggtatcttgcagcgcttttgtcagcaatgtagtaggtatgtctctctctctctctctctttcccaacaacaaaaaatgaatccaactttattcttcttcttctctcttgcaggttccatcttcttcaggagtttgatgaaggaaagagaagttgtcgtagacgtttggctggccataataaacgtcggaggaaaacaaatcccgaacctggcgctaacgggaatcctagtgatgatcactcaagcaactatctcttgattactctcttgaagatactctccaatatgcatagtatggtgttttactctgctcatctctacgttgtcttaaagtttgtatcagctgctaaatttctatccctttgcagaccataccggtgatcaagatttgatgtctcatcttctgaagagcctcgtaagccatgctggcgaacagttagggaaaaacttagttgaacttcttctacaaggaggaggatctcaaggttccttaaatattggaaactcggctttgcttgggattgagcaagctcctcaagaggagttaaagcaattttcggctcggcaagatgggacagctaccgagaacagatcagaaaaacaagtcaaaatgaatgattttgatttgaatgatatctatatagactcagatgacacagacgtcgaaagatctcctcctccaacgaatccagcgaccagttctcttgattatccttcatggatacatcagtctagtccgcctcagacaagtaggaattcagattcagcatctgaccagtcaccctcaagttctagtgaagatgctcaggtatgtatattcttacctcatccattccattattttctggatctcttagcctgctgatattttcctgtgaccttttcgtaatttgttatgattccatctcagatgcgcacaggccggattgtgttcaaactatttgggaaagagccaaatgaatttcctattgtcttacgaggacaggtattggtctgcttgattattctcaagttcttactttgtgatgttggaagttaaactgatgtgctagtttctcgatatacagattcttgactggttatcgcatagtccaactgacatggagagctacataagacctggctgtatcgtattgaccatctatcttcgtcaagctgaaactgcttgggaagaagtaagctaaacttcctctcccctctttgacaatactcgtctttataaagttccagactcctcaagggtttttattttgcttggcagctttcagacgatctgggttttagcttagggaagcttctagatctctccgatgatcccttgtggacaactggatggatttatgttagggtgcagaaccaacttgcatttgtatataacggttagttttgagaatactttcaccttgtgaatacctctctggatttctcagtatttatcgtcaatccggggttgcaggtcaggttgtcgttgacacttcattgtctctaaaaagtcgtgattatagtcacatcattagcgttaaaccgcttgctatagctgcaacggagaaggctcaatttacagttaaaggcatgaatctccgtcggcgtggcacaaggttttgttccgttttttttttaatgaaattttggccttccttgtcttaattttcttcttctttgatgtctaaatgtctttgtaccttttttacaggttactttgttctgttgaaggaaaatacttgattcaggaaacaacacacgattcgacgaccagggaggatgacgatttcaaggacaacagtgagattgttgagtgtgtaaacttctcttgtgatatgcctatattgagtggtcgaggattcatggaggtgagcacattccatttttactctgatcattgataaaacggtcacatgttgttcatcagactcagagcttacttgatggttattccagattgaagaccaaggactcagtagcagcttcttccctttcttagtggttgaagatgacgatgtttgttctgaaatccgtatacttgaaaccacattagagttcactggaactgattctgctaagcaagctatggatttcatacatgaaatcggttggcttcttcacagaagtaaacttggggaatcagacccaaatccaggcgttttcccattaatacgcttccagtggctaatcgagttctcaatggatcgagagtggtgcgctgtgatcagaaagctattaaacatgttctttgatggagctgttggtgaattttcttcctcctctaatgccacactgtcagaactgtgccttcttcacagagccgtgaggaaaaactctaagcctatggttgaaatgctcttgagatatattcccaagcaacagagaaacagcttgtttagacccgatgctgctggtccagccggcttaacacctcttcatattgcagctggtaaagacggttcagaagatgtgttggatgcgctaacagaagatcctgcaaaagaaactttgattttccctcttattcagcc

SEQ ID NO: 5277 - DNA, 744 bp, Arabidopsis thaliana landsberg
  unsure (1)..(744): unsure at all n locations
cagttttagtatgcgctaaccagttaagaatctgaaaattcgaatattagaacacatcaatatcactttccaaatcacaaagtgatgccaactaactgtcgaatttatatacctgtcctcgtaaggcaactggaaaatcattcggctctttcccaaagagtttgaacacaatccgatcagtacggctctgtatatgcaaccaaaacataacaagaaccgttacaattacttataagcaacaaaaaatgaatggatgaaagttgagatttgtacctgtgcatctccactggaacttgaaggtgattggtcagaagctgaatctgaattcctcctactagtttgaggtggactagactgatgcgagtcttgatgataatcaagagaactagtagctggatttgtcggaggaggtgatgatctctctatatctgtggtatcatctgagtctatgtagatgtcattcaaatcaaaatcattcactttgacttgtttctcggacctatccggggcaactctctcttgagcactattggcatacacttcttgccaannnnnnnnnnnnnnnnnnngatgttttatatcctgtcgaggggcttgctcgagtgagagcaaagcggataagtttccaatattttgagaagcctggagtcctccttcaccctgtagaagcccaactaaattcctccctatatgttcaccagcttggcttacaaggctctttagaagatgagacagtagatcctg

SEQ ID NO: 5278 - DNA, 570 bp, Arabidopsis thaliana landsberg
tcctctaggactaaaatttggatatcttaactgtaactttcatgaactacttacaatgaatattggagagtatcttcaagagagtgatcaacatataattgcttgtttgatcatcactcatagaagtcccattgcctatagtatcaggatttgctttccttctacgcttattatgcccagccaaacgtcgacggcaacttctctttccctcatcaaactcttcaagcacatgaaacctgcagacaaatatttttctcaattggattaaaccaaatctcattactaagacccgatactaaagttgaatccttttataacccttacctactacattgctgacaaaaccgctgcataattcctccaacaagtgcagtagtagctttagaatgaatctcacagaccttatgacgtctatgataatccttaactttgcttaaatcagctccacagttgtctacctgacaacaaatcgcccgactcggaatccctcctcaagtttcgtctttttcacaccattcccctcatattattaccaccaagattcagagttagtctatgagcatcatcatc

SEQ ID NO: 5279 - DNA, 2046 bp, Arabidopsis thaliana landsberg
  unsure (1)..(2046): unsure at all n locations
atccaacccttttaaattccattacctggcgggtccacctttggttattgaaaaaagcaattaaggtatttaaatgataaaaaaaatcctttttatgtaaaaaaaaaagaagggtatgaaaaagatctctaaaaatttgtaaatagaaaaacttatgcttttctcatgaggcacttaacctggtcgcatatacaaagatcatgtcaacgtaaaatgaagatggcttcatgattatgtcaagaatgtataatggttattggttaagaagagctgggtttatcaaaaacaaataaaagaaaaactgttctttttatcctgttttttttttattattattataaatttgtttgttatcaagaagacaagaataactaatttaattagattaaagtaaatttaaagtagaaaaaggcttttaaggatacattagctgagagtcaataatctaaaaagtacaatgacccacacacaacccatagaagcagcattaaagttaagacctaggacgcatcacatcaaaggttgacccatgggccatttggagccatggactcaatgagacagatcgctggttgtggttagatgaggatggtccggccacacgttcacacgatggacacatcgaaagcgtggtcggtggactcatctgaccatacagccgcggtgaaagctttaatgctcttaattccgctgcctctttctcgagccgccgattctcttccgttaatttctcaacacatcttttcaaatactcgcaatccacttcggtttgctttaactttgtcctattaggcacaaaaaaatgggttgtattgtaaataacattgctctttaggggctaaatggtcaactaatatgtaagaataatgagcactctagttctctcaccttgctcttctgttttggaaccacacttccacttgtcttgctgttaaacctagcttcttagccaaagccagcttctgtttctgtagatttaccataaagcccttgttaaaacagagtattttacaataatactttcacgctccgagagatggatgaatgacttacgggattgagagtattgtgctccttgaaagtgtcttcgagaactgcggattgatctttggatagcctaagcttcttcctacaagtttcacctccgtaatcttcctcttcatcggaggttccacgtgaggaagatctatctagagtgatgtcaaggtcatctccggcaccaccaccggaggttccttctctttcactcctcctcttgccgctcactgtactcgagatcgtactgttaggagatgaaactcctgtctcctcctccaaatccaccgtcgttggcaagctgttcacgtcgattttcctaagaaactgttgcttttgttgatctgaaaaatgaaaaagggttatttcaagatctgtgttgtttccttgtggaaaaaggttatcaagactttgttgaagaagaagcttacctgaggaagaaacaagggtttggttccatggaaacatctggagattggacattggcgaagaagtgggtttaagatttagctggagaggatggtggttttgtgcaaatcccaagctaagacttaaacccaaatcctcttttcccatcatcatgatattctctcttggtagaaaatgagaatagcaaaagctttgatctttatgagtagagatgactagaaaaaccttgatctaaagctgattttacctcaaaagatttatcagttgtgctaagtgtatggaggacaannnnnnnnnnnnnnnnnnnnnnnnatatatagagagagatgtgaaatgggaaatgaaaagagtaagagaggattaatataggaagtgaatgatatgagatgttgtcaggttggccaattataatctattaatgcccttttgaaaactcaattattatatcccaacttgtccctctttgtctctctttctctatttgtttctagtctattccttcttctctttactattaagtaatagtaaagtctacgtttgatactttttcatactcatgtggtcaattatgtatggaatcaa

SEQ ID NO: 5280 - DNA, 1006 bp, Arabidopsis thaliana landsberg
tttttttcataaacaaaagttgaaccgtcaggttattgaaatttagacggtttgatatttcttcctacctagacaaatcctaaaggaacccaggaattgtagtaagcgagcgagaatcttgattttttagaatgctacaatcttactgggtaataactcttaacagtgtgcaattaatgggccgaatttaccggcccaaattatggtggtggttgtcgtcgtctatttcaccagagaaagtgagaaacacatgcatatttgatcacaccagcaactgaccccattttgtcatgtacttggtgaaagtgaaagtactgaaagcaatttcttctcacacaagtgatgaacatcaagctcttgggattatccttgcaatctttgcttacaagtaacgaatgggggtctcaatgaaaccaaactcttcaccttagcaggaaaatatcgaaaaaatgtgttacaacgtaagcaagcaacactgagttatgacttttcttttgccaataattgaaagtgtggatatacaagtagactacttgcaaaaaatacacttacatgcacaaccaagaacatcattaatttgatcatgtaatgtgatcagaacattacatgatcaaattaatgagatgagaagcatttcaaccaatattaaactgcaactagctacattccgcacgatacaaattaatgagatgacaacatctacgtgatcttctctttaaacaggtaaccaattcagacttgtgatgtcatatggatgggtcatttgcttccttagaggtaagagactgcccatttaacttggcatttctactctgtttcaggaaagttttatacattctgttggaactgtgtcttgttgacctgaaaaattattccaccacactttctcagatactgatttgtgtttcagctatgctgcacactgaaccactaggtcttgctggtatttgttgtacaaagatgtgaattggaaccattaagtttgatggtcaagaggagtttgttt

SEQ ID NO: 5281 - DNA, 4258 bp, Arabidopsis thaliana landsberg
gagggcttaagaaagaattttattaaatttttgcaaaactatttttcacctatggggtagctaaaacgcatcaaagcgtcaataatctaacacaaattaaatatctatcttactatgaacacaagagtcttgaacaaaatcaaacatacactaaacgttgtaacttttatctatgaaatccaaacatgcctacttgataaacactttataaggtttaaaccccatcaactagttagctcaacaaatgtagaaacattataaaacatcaagaatctctcaacatgttataccttctcatggagaccaccaaggaagcaagctaaatagctaaatggttgggtttccctttatagtcaaatccttcatactcggagcatcttctgtcatcagattgaaaaagtcgatactagtaatactaagagactctatcagtttgcagtgtttaactagttgcttaatctcattgagttgtgggcacatcatcgtcttcttcttgacactcttgaatataacagattccaatgtgggtggcaccagcaaacagttgataatctgagagtggtcagattaaggaacttgaagatgttggaaggtattagagccccaacgatgagaaaacataggtccaagatccaaacttgttcccccagttcttttaacaccacattgatggtttcaccagttcttttaacaccacattgatcgccaaaacatagaactgtcaagttcttccacttgtctacccatgctttggagagtacagaagttctaacagcatttcgttgaagcaatcgaactagtatatggtcaagtatactcggatgcaattcggatattaaatccatgctgaaaaaacaatacaaactaagtaagatgacataagtgaaattgcaaacgcatctcataatttattctctaccaagtgaaagtgcaaaatccagagtactaacaaataaacatattttaatatgggagatcgtgatagaagatcgagggtcatttcatcaaatataaaattaggattgtcctacctaataaattcatgtgaatgttcaattaacatatgacattaatccagcggtcgtgattagatggaataacaatgtgaacattattaaattaaatattaagtttgtgaattactatttagaattcaaatatcatcgataaaatttaaaatagtaaaatttaaatttattttttatacccgctatttaagtggactttatctacttattagaaaaattcatttttagtatttttactacattcaaaactttgtttttgttgttttctatacatagtatttatttattatgtgtaattggttctagagagataatgattataaagaaatttgttttattcagacataattttttttaaaaattataaaattagcttaaactctcgataaattaatatctttactaattaatagaatttcagggttcgaccattattactttatagagatttaactgtgtattactatattgactaatagacaacctctattatattgtgaaaaaaaccctccaaatttgtatgatgaaattgtcttgcatgttgaacgatgtatggatctcgtgttaattatgacttacatacgaatcaatcgatgaagttccgtctagccaacacaaaactcctttttctctccaaatataaataaaataagacatctgacgcttgtacgatccaaacaaaaaattagaagaagttactttaataaagtcataagcattgcataatcctaaagcatacaaaaccatattgaccaaaaaagacttgacgaatatgtgattatatttgctcagcactcaaccatgcttacaaatgggtttatctcttcctcacacttatattcgatctcaataaaatggttcagaaccttttgaatccacaagagactttgatttgttcttcacatcactaagtttcctcgtctttgtatgttctttgatgaagccttggtaacagactttttacgttcttgttctctgatcctctgtctccaaaggtgaagaagggctgatgcaacatggcaaatcttgcggtctttatgttttgtaagtccctcaagcttatccatcatcctccttggttcttttggttttggagtaatgttgatcttcatcaataacgagagagcgttaatgcaacgagacgcctctggtttacctgagagaacacccttagcgttggccacatcagcagctttctttgttgcttcgaacaacttcaccatctcatccactttcttcttcttcagcagctccttttctgttttagtcttctttatcaatgaaccatcttcatgtggcttctttgttgtaacatcctccaaagagacacgccttgtcttcatgttgagctgctttagattggtctttgtctctttcttaaaatatttctcttcacgagtctcagatttatgatcctctatctgttcaaagccaaaaagttgttccttggtttattcttctctgtttcacgagttaatgatctctgatcttctttcctatttaactcccagagtttgatcgtcgtcttactctctactgcttcaacagtcatctgagatctcttgttttctttattcttcaacttcgaacaccttgttagaacatgcttcttcatcttcagacgatccttggtaagagcagctttgaaagagttgtcgcttccatgtgcgtagaatgtcttcaaccatgaatgaaacaaggcttgggcttccttacggattctagggttcctatgacttctcaaagtctccagtttaactattgatttagacaatcgtatatccttcacggaaagagacagagacttcaagtgattcaacacatcgatgcatcgctcgacttcgcatgggttccgtgtattgtaagtagccttaattgcagcagcagtcaagtcgcataagtcagatctctccttcgcaattctcactctcatcatctttccgtcgttcttgatcatcaggtggctagggttttcagtttatgttgaaatcgaaatatgaaagagataatgaacaagagtaaatatataggaggacttgtgagcggtgccttacaaaaaggaaacttgagtcgcgtgagattcaaagattagatttggatttgaattttcttatgagatataaagatagaagatatactgagagttgtaacaaatccacatgtaaacaaatcaaaatcattacaattttgctagtacaattttggttcggatggtttgatttgcttctgaagcaagaaatatagattggacaaataaagacaagttactgatttcaggactgtaacaagttttcaagataggcacaaattacaatattcacaatcttgcaacttgcatgagcacaaattatatgatcaagtagtaaacaaggttttcaattagctgagcaataccaaacaaaacaaaaaagtgtgttatattcttcttcggttatcgactcgggttctcttgaagtcaggttgtgtttggctgcttggttgtaacctcttttggttaccactttcttcaatctgtttacaatgtgacaattagaaaaaggttttcttcaagcgtctacaaaatttgtaaagagttcacttgtaaaatacaaactcggtaagttttgtaccttattgagtttctccctcacagttttaaccatctgattcattgaagatgacgcaaaatactcctacacaattccagttggacttattttggccaagatatattcagtggaaaacagatgaccaagtttttaatgacacatatgtcaagatcaccaaataaaacacacacctgatatgatgaaactcgagtaacaggagcatttcctctatggaattggtactccatctctctcctacagacaaaaagagcaatctctcatgcactaactctatttgtttactgacgatacaaagaacagaccaagtagaccatatgttttaccgctgtgaggaaacattgtctgtttgggtcaaagctggtccagccaattttgtaacttgggaggtgctcttttctttctgggctgttcacaagatgagaaccatattagacttgtgaagttatactgtaaatcgtcttaacagttaatattatcccactttgacatcaaccatgtcaatgcttttccaaccccaacaactttactaatacaatgctataaacaaaatgttagcttttgcaacatatgaatgatgtatgttacctatgaaataagtacgtaaagataaagggataaaga

SEQ ID NO: 5282 - DNA, 913 bp, Arabidopsis thaliana landsberg
gcatccatggctcgtaatcgcagcctctcctgggaagcacttagagtagactttcttgcctgccaaattaacatacatataatcatttgaaccaatagcacaatctctttcctgagttttcctaacaaacaatagcaagactatataccttcggaacaacagccaacttaagtggagcttgcacaacatcaccaaatcttatctgttcatgcttggggaagttttcacggagggtatcttcagtctttcctttattcttcttttgcttcttggcctcccaatacctgcatcaaagtagaacagtcattaaacacaaacacatgaccaacaaagatttagccatttaagagaaatgaataaggcttacttcttcttgcgttctttccttttagaccgaccatcaatctctgcaagttcgttttcaaaacgaagatccgtcatttgatttctcttcctctttttcttcttcttctccaccacactatcatctccatcactctcctgatcacacaaggttgtgtaccctcagctttttaatccaacacatttctaattctaattgaaacttccctcaacattaatcaattcatatcattttaaagttgttctatagcacaagagtcaaattaatatctctaaattacaaaaccccaagttagaaaactataccgttgcaggaacaactacttcagctttcttaagcttttccttcttctctacgacttgtttagtagaatctgaaggaagaacattacaaaacaaacagtcacagagaagaaatcacaacaacacacacacacacacacaccaaaatcgattctattcgttctaatttttaccatggggagaaggagaagtgtagttcatgaggatacggagcgtagaaggaacatcatcttgcttcgaacgatca

SEQ ID NO: 5283 - DNA, 1466 bp, Arabidopsis thaliana landsberg
agatgcccactatcagaaggaagggtttgatctttgatgcacaagatttcaatgtcagggcagactagctgatttttgctaaggacctgccaagaaccattaacaaagacataaggaaacacaaaaaggcaggcgtatttagatagacataggacttcactgaaagatgctcaccgcacggatgcttgtaatattagcttgagccttcaggatctcagtatcacgttcaagtttatccttccagtcgaccagcgaagcatcataatgttatgttttaaggacaaacgaaaatgaaataaaaagaagcaaattgtaaacaaaaaaatacaatagtacaggcttagacctcaggtaattggatggtcactttgtttggaaatagcctagtgatttgtttcactgctttaggcatttctgtgttcctatcctgctgtctaccaccaaaagtatcctgtagatgacatgaaaaatcactctaaatataatgcatcgtcatttacaagttacaatccaggggaaagaatattagatgtcttataatctagaaattataaaagattatcataccggaaatgcaaggtccagcagtgctgtctggttgctgccaaactttgtgaacaagaaacctccagggtgggactgaaaatgaaacgatcaaaacaatcaaactaaccatgttgagaagaacttaagtctatcaagacaggttaagcatacaaaaagagatattaaatagaactcctactttttcctttcggttgtccaactgggtttgcgaagctatgacaacaatattctcgggtaaattctcaagcttgctcttcaaagttatatacacatcagtgttccccgacacagatttctcaatgtctttgaggaacaatatcaatgaccctctttcactttcattaaaagctacctacaagatcattcaaaaagattaaagggtttctgtagctacgaaaacaaagatttaatataggcaacaaaaagtggtagaactacctcaaagatttcattaatggcaagtttatcagcatcgtcactggaagaactttctaaccgaagagaactcgctgcacaggaagaatgtcattactacaattaccttttaaacgcaaatgtgtagtagatattagcacgaaaattaccagtacaaaaaaaaccatggtcttcttcgcatagaccaccaagatcattgccatctggtatcgatctatcaaatctaaccccgatttttgaagatccattgccttcaaacgcaaggagtacttttccttgaaaacctgttgccggtcccctagacagaataatacgaaaaaagaaataaattgagttttgacaacagcaatctacatcagatgacaacccctcgcccaaaagaagagaataaaaacaaaaaacaatacataggtggagctcggagagaagcaagagaagaagtgaagggcctaagacattctcga

SEQ ID NO: 5284 - DNA, 928 bp, Arabidopsis thaliana landsberg
tcaaatgaagaagattcaccaagaaggtgcacgattggtctaatttcataaccagcacagggacatttccaccatcagcttcttgaaaagggtccaatccactgccatcgacattcaggttctcattggcagtaccaggggtagaagcagcagcaattttttccacagaagcaacagcagcatggtcattattactatcagcatcgttcatgtctgtatccgagatgcaatcattgaaactggaaggtaccacaggaaccgcaggattttgctgcctcttgccagctttagcaattggtggtagaagatggaagctgcggagctttgatagagatgccaatatagaggccccatcaacatctgaggccccatcaacatctcctgcccttgtctcgacatgaacccctttcagaggggcaccccgagcttcacatatactcaacgaagaagctctgtcaggagctgctaaattttcatctttaacaggttgaaatatctagaagatggttaagaaatttttaccaaaagacactgattttaaatgaaaaaaacgttataaatcatttagaatggatcgataaattaataactagtgaattaggcgaattaactttcacgcaactccaaaaaggatacataagcatgtttcccattaaggctgaagatcacctcgtcaccaccccgtagatgaacacaagtacttttctggtaacacttgccattgacatgaacaataactccatttcctaatatctcaagggatgcaactgatggaccaccgtgctgcaagagactctatgtaagcaaaagacttcttcccttttggaaaaagaaaaatctgatgtgattacctcagactgcttcagttcacagagggtgctgggcatagcttggtctctgatagataaattacatccccggcgtcaac

SEQ ID NO: 5285 - DNA, 2452 bp, Arabidopsis thaliana landsberg
tgataacaatagtattagaatgatgatttagacatttagcctcaggaaattttgaaatctgcaaaaatgttatattatctgctaatctcatttgaacatatccacagtccatcgtgtattcgagttacaagttttttttctctctatataaatgagagtggtttaattatgcagttacggttgttgacaattgacaattaaccggttgttaactgttaaccactgcgaattaacaaggctaactacacaattaaatctctctaatatcgtgatatctatgatgcaaattttctctctcttttttattatcatcattccgtaatcgttattgctattttagtattttttaccgttttgcgtcatcaataatataattcgagcgtaacgacagtttaccgtatacaatagctcatttggttgaccaaagtctaggaagaggttgaatcatatttgtttgatttaattgagtatcatatgatttcggttttttctgtttttctattgaataaaagcttacgaattcggtttttctattcaaacactttaatcaaaactaattttgaatctttaagctcataatcctttcgttataagacataaattagtttaccattcatgcaatgataccgtcatagggaagaccatattttcttctagctaccaagtttaattgtagtgtaccaactagttttaaccttaaaaggatgagagcaaactctcaataagaagttttcgaatactttactttcggataaataactaaacttaggaatgaataatccaaaatatattcacaagattagaattagaggatatgttatatgtataagtaaactagagttactgccacatacattttttttggttggatctacgttttatatttttagtaatcgaactcttgatcaggacataatcaaatcatcttgtggtgaccaatttttagtctcatagccaatatttgattagagaatttttagccattcaacgaccttaaatctctccctagctccatgcaaaccctaattttagaaactacaaatcctataagaatgtctccacaatgcaccacaatctctaccagccccattaataaaccaccgggctctgtttcaataaaaaaaatcccctccctctcatatttacctcccgaataaaaccggagggagagaaaaaacataaaaagcaaaaaaaaaggtaaaatcaaaaaggggaaaaatatataacaacaaaaaaaaaaagttagaaaaaatggcagtaggaaaggttgtggtatctgtggcatcactcctcctagtggtgggtgttgccataggagttatcacgttcgttaataaaggaggcggcgccaatggcgacagtaatggtcccataaactctcatcagaaagcggttcagacaatttgccagtcaaccacagaccaaggttcgtgcgcgaaaacactcgacccagtcaaaagtgatgatccaagcaagcttgtcaaagccttcctgatggctactaaagacgcgatcacaaaatcctcaaacttcacggcttcgaccgaaggaggtatgggtactaacatgaacgcgaccagcaaagccgttcttgattactgcaagagagtattgatgtacgctcttgaggatcttgagaccattgttgaagagatgggtgaggatcttcagcagagtggaactaagcttgaccagctcaaacaatggttaactggagttttcaactaccaaaccgattgtcttgacgacatcgaggaagttgagctaaagaagatcatgggtgaaggaatctctaactccaaggttttgaccagtaacgctatcgatatcttccattccgttgttaccgcgatggcccaaatgggtgtcaaagtcgacgatatgaagaacataaccatgggagccggagccggtggagctgcacgtcgccttcttgaagacaacgactctaagggactccccaaatggttttctggtaaagacaggaagcttatggctaaggccggacgtggcgctccagctggcggtgatgatggtatcggtgaaggcggtggtggtggcggtaagatcaaggcgactcatgtagtggctaaggatggaagtggacagtttaagaccatttctgaggcggttatggcttgcccggataaaaaccctggaaggtgcattatccatatcaaggctggtatctacaatgaacaagtcagaatccctaagaagaagaacaacattttcatgttcggtgatggtgctacacaaaccatcattacctttgacagaagtgttaaacttagcccaggaaccactacttcactcagtggcaccgttcgtaagtcccacaaaacattatgttttacattgctacataatcggccaaggtactaacatttaatatgtacatgcagaggtcgaatctgagggattcatggcgaaatggattgggtttaagaac

SEQ ID NO: 5286 - DNA, 1671 bp, Arabidopsis thaliana landsberg
ttaattatatgaatgtccataataatttcagtaaattagagaattgacaacaacgtaaaataaattagttaaattataatattttaaaaaggttattaaacataggtacaacacagcggataaattattatattccaaaacatagaaacaaaaatcaaacaacataaattttcaatattttttttttcctcatctttcatacgtgagacaaacaaaaagcaaatcttacaacttcatctccccgcgcatattaccctaccgaaaacgacgttgtattttcaccttttacatgagcacgtactactcttttttttttatttgatttgatttgatttgatttatacgccttataatccaagcgtgacgggaacattggcttcttgaatccagttaataggacctaaccagttagcaacagtgaagtcattgacctcagctgcagacctggcgatcttaacccagttaactcttcggttagtgatagctcctggtccacggttgttgtactcaacgtacctacatgacttgtggaaactttccccatcccaaatcttccaaccttctggtctaatcacatctcctatctcggagttgataatcacggtggtagagaatttcttccatggccttcccaagtatgactccacgattaatctctctgccgctagtttcttgtcgggaacgatgcgacagttttggaggacgataccgattttcatcgctagacccttttcgtttccatcggctgtgaccgtgttgaattgtcccttgtttcctttacggacaacaatgagtgagttttggatcacggttgcggatttgccgaagatgaagtcgactgttcctgacacgacaatgtttctgtagaactgacgaccattgttgacgtacaaggtgtcttggtaaccgtcgaacctgcagttgaagatcacggcacggtctccgttcactctgatagccacagcttggtgtcccattggaccggcggtgttcttgaatccgatccattttgccatgaatccttcggactcaacctctgcgcaataatatataacatgagctatatatgtagagaaaaatatttgttaacctaactagtgaattagggtttggtgagacttacggactgtgccactaagggaagtggtggttccagggctgagtttaacacttctgttgtaagaaatgacggtctttcttgcaccatctccgaacatgaagatgttgttcttcttcttagggatgatcacttgctctctgtagataccagccttgatgtggatgatgcaacggcctgggtttttctcaggacaagcattaacggcttgttgaacagtcttaaactgtccacttccgtccttagccaccacaaaggttgctctgatcctagcaccaccgtcattactgccacgtccagccttagccatgagcttcctgtcagcacctgaaacccatgttgggattccggtctcgtcaatgtcttcaagaagacggcgagcaggaccatctggatcggccacgggagaatcatcagcaacaggaggggttcctttgttgacgggagctgctcctttgtctgaaggagcgaagattccgcctgtcatgttcttgaagtcctcgaccttcaagttaagcttggccatggcgctaacgacagtgtggaagatgtca

SEQ ID NO: 5287 - DNA, 1525 bp, Arabidopsis thaliana landsberg
  unsure (1)..(1525): unsure at all n locations
tggtttaattgattaacaccaacttacccaacagagatgcattttgtacaaaaattttgcgagatttttttttttttttttttaaaaaggaaactgctaaaatatacgtacgagactaatgctatgttacatatttccaaagatttaatcttcttccaacgggtatttataacatctagtttaaaacctctaagacgtaaaatttcctttctcttcttagacgtagtcatctgagattctgtcacgatagctagacccatatctctttcaacgttatgtaaattataatataagtttctaatttttatttttaaatgattattacttttgatccctcattgttttttaaaagtttttttacaccttttcattcaagattttattttaaagttgagttttagcatttaagtccaaacagaaagttttataatactagaaacttggatgataaatttgcaatacaatataaatataaactggattttggatcatgttatttgatatagtttattcatcattagagatttcacaaattcaatttttcgtgccatcatgtagatttatcatacaagttattaatttaatttgatttttcaaaaatatctttttaaaaagttttaaaatttgatttaaatttttatctatttaaattttcaatttttagaatttgaagtaatagaaacttaatacgtttgatatacgatgtaaaaactaaccattgaataatgtcaattgataattagggattttcacaaacttaatatataacacaatgtcgatttgttacacaaatcccttatttagaattttaagtaatgaaaaattagataataaataagaaaaattaaccatatttggatcatttcacctgaccttgtttatagtaaggactaatgactattatagaaagttaatcctaaattccatatatatggacgtaagattgaaataacgtaaatacccttagtaagatttggaactgcaaatttacgttcggcatccttttttaagttcgacgtcacgagctccagcgaaagttaaataaagctttttgaccaaatattctcagccattcgttgacccacatcaatccctctccatgcaaaatccatgcaagttactaattttagaattcaaaaagcttctatataaacctccagaatccatcacaatagatactggcctaagtcattcaacaatttggctttaatctaataaagcctctccctctccgattaaccttaataaatccggagggatcggagagaaaaaagaaccagaaaaaaaaaaatgattggaaaagttgtggtctcggtggcctccatcctcttaatagtcggagttgccataggagtcgttgccttcataaacaaaaatggcgatgctaatctgtctccccaaatgaaagcggttcaaggaatttgccagtcgacatccgacaaagcnctatgtgtcaaaactctcgagccggtcaagagcgaggacccaaacaagctgatcaaggctttcatgctcgctacaaaag

SEQ ID NO: 5288 - DNA, 1551 bp, Arabidopsis thaliana landsberg
taaaaggttagagctttcggcggtggctttggatacagtgacagggactaaagatcgcttggcttggggtgagactgtgaatggtagattcacggtgcgatcggcctattctatgttgtttagagacgactcaccaagaccaatgatggcgaatttctatggccgggtgtggaaggtgattgcaccggaacgagtgagagtctttctatggctgctggggaatcaagtgatcatgacaaatgaggagcgttttcgaagaaacttatgcgataccgaaatctgtcaagtgtgtaaaagtggggtggagtctataattcacaaccttcgggactgcccagcgatggtaggaatatggactcgcattgtgcctagagggaagagacgaactttctttactaagtctctttttgagtggctatatgataatctgtgtggaggtggggaagcggacggtagcatatggtcaactctattctccgttgcggtgtggtggagctggaaatggaggtgtggtaatatttttggttcagagaatagggtttggagagacagagtcgggtttgttaagaaggttgcaagagaggtgctcgaggcaaacgcgaactgtggtctcgctgctccgagagtgagtcgagtggaaagaatgataagctggcagttgccgttggtggggtggataaagttgaatacagatggtacttctcggggcaatccgggacttgctgctgcgggtggggtgctacgagatgaggcgggggcttggcgaggggtttttgccctgaatatagggcgatgcacatctccgcttgctgaactttggggggtttactacgggttagttatagcctgggagagaggtataacgcgacttgagctagaggtggactccaagatggtggcaggttatcttacgacagggatagaagactctcatccgctgtctttcgtagaacgtttgtgctatggcttcttatcaaaggactggttagtccgagtttcggatgtctatagggaagctaactgtcttgcggacgagttagcaaactatgcgtttagtttacctgtaggctttctttctttagacgcagctcctccgtttgtcgatttgattatgcgggaggatgctgcgggagtggctagggctaggcatgtgcccaagtagttgtttggttcgcattttcgttaaataaaagacgggagatttctcccgctgatccaccaaaaaaaaaaaaaggcttaaacattttggaggtccaatactcatgtatcttggatttgtgccaagggtccggtctgcttgttcggctcatcattaactgagttttatttgtatgaaaaaattttgaagtagtttttagcaaattgtttagcttacaagatgtaacgaactcatattttttatatttacactagggattaatctggcctacgtcccggctatgagtgctagtatttttaatctatatctcttgtataatttcttttccaactgttattctccttttaaggaaaaaatttatatgtatttttccacaatattggtatggagag

SEQ ID NO: 5289 - DNA, 2584 bp, Arabidopsis thaliana landsberg
  unsure (1)..(2584): unsure at all n locations
gatagagaaatacaaaccctcaccgtcggttaaatatccgagcattatcgcctccgtcgccgtagatatcgctggtcgaaccgttactccctccttccgatacctctcccgtcgcctgtgactcatttccggctatatccacagtccacagatcggccggcaaaaacaggaatcgttggtagaagaaacgtcgaccttaaatgggcctattgtggcccaatagatatatacataagcctcttaacttcagccgagagggtactttcgtaataactacaaacaatttctaatggacaatggcactgtaaacatgaatttgtctcatttgtgtattttttttttgccaacaacatgacaattagttagatataatatggttgttgaaaccaaaaatcgatgttaaaattaaggtttcttctataaaattaatcaataattgttcaatatttttgatatttaaaataacacacaaaagaaaatgatagtgtaaaagagaagaattataaagaaacacactgaaaaacaaaacgaatcaatgacgagaaagccattttttatcatggcatttgttgaatttgtccttttatgaacagtttgtgagtttgtcatttctaacacataggaaaagacgattttaccctcattttgttgcaaaagaaaaatctgaatttgttcttgcacaaaatccctaaaacaaaattgatctctcgatctaatcttcttcatgacagatctcggaacaactccagtttaagtaagaccaaaagacaaaagcttttaatccaatctctttttctttgggttttgatttgtcaagagaaaatttaaaaaaaaaagaaaactcaaagctttcatgattatgtgattataattttcaaatttggtttagatttgaatagaaattggaaatttcgattaaatcaatgtttattattaatgcctttgggtttagtaggcactatccctttagagtttagtttttttcattcaaaatcattggattcaaccaaggaaatgttgttggtgggtggtggctatgacgtttcgtgaatcggaaacaaggacgatgatgtaaatagaattgaaactgaagcggtgatggagttgaaggagatgcgtcgatggagtacgatggtggtggtcggcagagcaagtaacaacagaatggaagacaaaggttgaagataagggcaaaaacgtcattgcgttaggcccaaaatggcaaatccataagcccaaatcaataatggcataaccaaaagatttggccaaaaatggcaatatagacaataatcccaaacaaaacccacatatacactagtactgtctactcttacaagagcttattaaataggaaaaccataactaacaagtttcgaaaactccatcactcccgtagttatctcataatctgtgattctagtcaattatatataatcccaaatgccttaacttttatgattttagcgtgtgattgattgcacgcctactagagaaacaacctgggtctgcctgacggaagtatcggttccgtaatggccaagttacctatggactcctccgttgtcaccggatcaattactttgctgtacctctcgtaccaattttccaacttctcggatctaacaatatcaagcaggttatccggaagctcagaaactccgttcaaaatcttaacaactgtagccatatccggcctaacctcttcagcctcatgcgaacataacactcctagcttcagaacaagctcgagctgtcccttatcattatcttgtcggattctttcagtagctgcctctacaatatcaccgttttcccaacaatttatcgcccagttagtaagaatagcctcttccgactctgctcgtggctcaaacagttttctatcgcaagaaacttcaagcataaacataccaaaagcgtaaacatccgttcccatagttggtcttccggttctcatgatctctggcgccatgtacccgaatgttccagctactctagaggtttgaggatcatatccttgatcatataccttagccaatccgaaatctccaagacttgcattcatcttgtcatcgattagcacgtttgctggcttgatgtctctatgaatgacgacatgtatccacccatgatggagataggagagtgcagaggctacatctttgatgatcttgaaacgttgactccaagagagttgtttttgatctgatgttccgtaaaggtacttgtcaaggcttccattgggcagaaagtcataaaccaagtagagctcttctttgtatctgcaataaccaagaagcctgactagattggggtgtctaagccgaccaatagtcgaaatctcggccaataattctctcattccttgacttgagtcatgagaaacccgtttaacagcaatctttgcatttgaacctgaaagtgtgcctttaaagacaggaccaaaccccccttcgccgagaagttgtttgaaaccatttgtggcattgaagagttctttgtaagaaaacctatgtggtccacattcgacttcccattcctcgagaacctccaaangtttcttatgtctcttatagaagaa

SEQ ID NO: 5290 - DNA, 726 bp, Arabidopsis thaliana landsberg
caaatgacgactgcgtcgaatatatcttcgccggagacaccacttgagctcctaaattgaactctccatttacaactgttctccgccgtcggctccacacgaaaaacctccgtctcgaatcggatcatctcttcgatcttgaactctttggcgaagtcttgaagatacctcatgacttctctgtgatccgggtaccgtctcgggtccctggactcatcatcgggacgggtcacgaacgggaagtcactgtaacccatacactctcgtggaagattggtgcggagggattggtagacgctcgagtggacgacggttcgatcagggtcgatgcttagtaagtctggctcaacgtttggagtgtaaacccaaagtcctcctacttgtttctgacgctcaaagatggtgacggtgtgaccttcacgacgaagctctcgagccgcaacaagcccggcggctccggctccgatcacggccacgttacgtgagctgattgaattaggcggtggtgtcatagtatcagtcaaagtatttgtttcctcgaagagtgtgtatgacgatcactataaatataaggaaatggtcttgaaattggaccgtttataaaagatttccaaatttcatacgtatgggggattacaagctcgattgtgtaaccttccttctcacacgtgttcaagtatactctttttccataaccgaattattctcatcattatattcatctta

SEQ ID NO: 5291 - DNA, 2058 bp, Arabidopsis thaliana landsberg
tctttgttttggcaactttgtcgagaaatttggaacagaatcagttttgtttcacaaatcttttcagttttttaaacattcatgtaggttatgagagagttgaagtatattatgaaaggttatcctttattgaacatagaaatgagaaaacagaatagaaagagttctatacaagctgtttaacttacgaattggttttgaagctttcatgcgtagactattacgaatgacagaaaagagatctagtagaagtatgttgtgaaaggttatcctttattgatcttagaaattagaaaacagagtagaaagagttctctatacaagctgtttaacttaccagactctaaacaataatgagtttacactttactcgtcaagccagtctaggctgaagcatttctcagcagcttcgatctttaatcctggaacagccttctcaacttcttcccacataaatgcaacgtcggtatcgcatattacatggcgcagagacttcagtgaaacagcagagctcggtctatccgagaagcaacattctctcatgtcgatcttctcaagcttctttagctttcctatttcctctggaagacaactcaggctgacacattgtgagatgtcgagatacttaagcccaggaagctcacatatttctccaggtaatgtctttagctcagggcaagcatatagccttaagatttcgagagcctgtagcttactgaggttcttgggcaattcaccgaggcgtggacaatttgttatgcttaagcagctaagggaggtcagtccgcaaatgcttggaggtagtgccacgagatcatcacagtgatctatcgtcagatcgcccaattttgggaagatatctgccacgtcaagtccggtttgatcaaaacttttattgatcttgcacagaatcaaagacatcttgtggagatttttcaagggggtggttgagttggagagttgagggacgtgaaaccctctctagccagagacttcttagtttcgacaaatgagcaaatattgaaaagtcatggagaaccgcatgagacatgccgttgttgataatcactaggaccttaagccggctcatcttactgataaaaggcggaagaacatacttgtctgaagagaagttcaatattagaatctctgccttggggaactccatgtcaaaccattgcatgtcattcatttcccctgcaaaaaacaaaataaaaatccataccaacattatgatcctggtgattatcacatgagagaaccaagaatatttgcagtgtagaaaagctcttgccagtatgaatagagacaatctgggcaatgtaatgctcatcattgttcctttcccaatctcctggaagctttaactctcttttcggcatcagcaaccgctttcttctgtttactttccctgcattgcttaaatgaagtgctaggtctcgcagaacatcatgctgtgtcacaaatatatcatagtggcttgcgtacaaagagccaagcctgcaaattaatgtaacagtcataatttcagaagactttttaaaccttacaaaaagtgaactaagtacaagttttgtgatccctcaccgtggatccttcccaagagtaaggagattcttgtgtgacaaatcaacaaggatggcaaaagcatttccttcatctatatcatgtaactcaatccaaatgttgatgagaacatcaagaggaatcttcctgtcttcagggaaggcgccaagatccaagaaacaatctttggtcgtctggtcgagattgtctagactagcttccatttgacgaagcaatctactctcgtgagagttatcagcaggttcaccttttgataacctctgcaatacgcccttccagtacatttcaggtttgccatttaatgaagcacccgtgactttgagagctaaaggaagccctttacattcattagcaacctgagccaaacagagaactctgagaattgaaaagctttgaatattatgctaggcgtcggagaagaaactattaaaattacctgcttaaccagatcttgcagaaaccaagagggct

SEQ ID NO: 5292 - DNA, 1043 bp, Arabidopsis thaliana landsberg
tcgagattcagaaagagttgtacatcggcagacctcttataacgctccggtggtaagaattgaaagatgagagatctgcagaggggacagatctagaagcggaagaggagttgcctccatcggaaagggtatggtcacgggaaaggacgaaggaggtcgccgtcgatgatctctgcgaaacagaaaaaagcctccttcctgctactcgcagcatctctgctcaaatgggttaagaccgattctagggtttcgctcaaagcaagaacacacaatcgtaaggttagagatggccgatgcaaacaaaaagattagtcctttaccaaaaaaatgttttttttttcttctttgcggatattcctttaatagtcttcgagaaatcgtcaatttggtttttttactattaatactgaagagaacaatgacggtgttctaacatgataattatgtagcttcgtggcatcttaatgttcattcgtgagtatgaataagctacttgggcatagtttgtagatttatttaccaaattagcccaacgattcaaatctaaacaaaaacaatctcattgaaatttgatgtctcgaaaagctttatttcgaagcaaacaacaatatgtaaaaagcaaatgacaaaattcaaagggagagaagtggccagctattatattgtttcccaggagggtccatatttatttgtcaattggtggcattcatcacaagcatgttttcttgggggaaatttctctcaagattttcagaggttgttgaagtcaacaggttcacggaggagcctctccatctgttgtgcccttgtcctgattgacatgtccaacaccttttgttggaactctacgattagtccaccgtagatacttggatcaatctacaaacacacattaccaccattgacatagatgcttatatccattttatgggttactagaaaatcacaagcctttgatgcatatctgattacataccttttgttccacagtgattttcttccctgctccaatgatctcctgaagcgtctcagtcagttctttc

SEQ ID NO: 5293 - DNA, 1098 bp, Arabidopsis thaliana landsberg
  unsure (1)..(1098): unsure at all n locations
gctttttgcagtatgttccagctgcaatgtggcggccaagagatggagatgattcggcttctatgagtaatggagatattgcgagtgaagctgtggcgggagagcttcgatctcgattatctgatgaagtccagaataaacctcctgaacaggtcacaatgccgaagccagggactgacgtcgagaccaaggacagagagattcgaactgaaagcaagcctgaaacgcnnnnnnnnnnnnnnnnnnnnnnnnnnnnngagactaagcaggagaccaagtcagagaccaagccggagtcaaaacctgatcctccagctaaacctaagaagcctaaacacatgaagagagtgtcaagtgcagggcttaggactgagtcagtgttgcagaggaagactgaaaacttcaaggaattctattccttgggaaggaaactcggacaagggcaatttgggacgacttttttatgtgtcgagaagactacagggaaggagtttgcctgcaagtcgattgctaagagcaagctattgactgatgaggacgttgaggatgtgagaagagaaattcagataatgcatcacttggctggtcaccctaatgtcatctccatcaaaggagcttatgaggatgttgtggcagtgcaccttgtaatggagtgttgtgcaggcggcgagctttttgacaggatcattcaacgcggtcactacacagagaggaaagcggctgagctcactagaaccattgttggggttgtagaggcttgccattctcttggtgttatgcatcgagacctcaagcccgagaattttctgtttgtcagtaaacacgaagattccctcttgaagacgattgattttggactctccatgttctttaaaccaggtttgatttcattgttactcatcttaaaagatccacttccagatttggtctttaacgtgaatagtgtgatccttgtcgaacaattatttctgaactcgattcccttcctctttgcagacgatgtttttacagatgttgttggtagcccatattatgttgccccagaagttcttcgaaagcgttatggccctgaagctgatgtctggagtgctggagtga

SEQ ID NO: 5294 - DNA, 525 bp, Arabidopsis thaliana landsberg
  unsure (1)..(525): unsure at all n locations
ctctctgtttggtttccttcattgtgactttctattttctgggtttgtttcaagtcatgatttttccgatttccttttgatttttcttgctatttgtgacctgtgnnnnnnnnnnnnnnnnnnnnnttctcctcatccaagttgggtttatcagttcagctgtgtagaaattcaatcgtctgagaagtccgaggtttgatgtctgatggttttaagatcgaaaggatttgacttttatcagattagtaatgagattagattgtttttgaggttattgtaatcagatcttgatgctatttctggcgaaagagatttaagacaagttagggaatgggtaatacttgtgttggaccaagcagaaatggcttcttgcaatctgtttcagctgcaatgtggcggccaagagatggagatgattccgcttccatgagtaatggagatattgcaagtgaagctgtttcgggagagcttcgatctcgattatcttgtgaagtccagaataaacctccttgacaggtcacaatg

SEQ ID NO: 5295 - DNA, 1366 bp, Arabidopsis thaliana landsberg
cataactggcagtacaactatctaggtctgttaagtgttacctgaataatgtactcatgttgtgctgtttaagatagtgcttccttcttagatttatgttactctcctgcgaataatgctaagctatgaaatccttattactctccatcgtctaatatatatggaaaatgtattctcaacataccttctcctggggtcattaaatagctgcatgttctgtgaacacaccccgtaaggattagttgatctactgctgccataagaacactaacttgaaaaaactcatgtgctcatttaaacttgctaagaacaatatatgtttcatcctcgatgtcggttgccatgattttttttaatgttgaaggtgccgatctcgaattggtgctggctttaaaaatgcagatttcgctattaccgttcacatggggtcagcgttgcctcgttggtgttcagtagattgatgtatacagaagaaggtatctggcaatgttattcaggcttgcaggtttgagacttaccaactccaggaccattactttagtgtaaatctagcaggcagaacttcattttctgagacgtttactcttcctaaattatcatcattgaagatgcacacctaatgtttaccattgagattgggggagttctgtaactcgatttgcaacctagtgtaacaaaattgcataagatatgcctgaacttacatggaatggctaggggagagtgtaatgggaaaatggctataatattacatgaagatctaattttattttcttccaagcatcactgcggtttcaattattctatggtgccaagctgaggcaaaaagaaatctgttcacttgaaatagtttggcatgttatttgtaagattagagctgtcactgcatataggagtcttaaacgtgtggcacttgcttttgaatgtcatgtgcacctgactgctgtgatgagatccattttgttcatgctgtcttgctttgttctttgctcactttttagtaatatctattatttatgctgtgccatggatttcatcttctttgtcctaatagaatcatgttctctgataatatttactgtttcaaatgtttgatctctattgtctctgatgggaagtttcattgttgtgtttttttgtagaatgcaaggccatcatcctattccggtggctataatcagcctgcctaccgtccccaagggccaggcggtccacctcaatggggttcacgaggtcctcatgctccccatccctatgattaccaccctcgtggaccatattcatctcaaggttcatattacaattctcccggattaagtgacccccccccccagcatatgcctcctagaggtgaaaaaggacaaga

SEQ ID NO: 5296 - DNA, 4440 bp, Arabidopsis thaliana landsberg
  unsure (1)..(4440): unsure at all n locations
actagcaatggccggattaatcttaggtagcacacgaaacgtttcagtgtgagtatcgacacctaccacttttatttcgccattatatggttccgtgaaccaataaatagacccgtttgtagctgctggtacttggtcagggaatatccgatagcttggagtgcaagtcaagtacctccaagcgtttgccctaaaatcaaaaacctcgcactttgtaactcccaggtttggattcgaggcatcagaattatacaaccacactaatttgtaatcattgaccttcacgaatgctgtataacagactactggttttatgtcaatccaagtgtcttgagtggggtataacttttgcatcaaaatctgaaacctagccggaggaagttgtcgaaaccaccgagtggccgggttaactacatatatggcttgtgtttttagggaatggatgcagaaaagtccgtcacagctttcagaagcatagatccggtgttgaaatccttgagggaaagtgataagagtggaggacagaatagaagccgattccaaacagattgtactaaaaccaatgtctgtatctggacgaggctgattacctttacttcctttcaaggaatattcttcagacatgaccatgacctgtggaaaatccacgcgtgatcgctcgacgatcttcaagtgtctctcttcaaaactgcgagactcgatcgtcgatctccattgttttgagagagactttagttggattattgctgtcaccggaagtcgtaagaagatttcttctacaacatcgtttggtagtgatgatggtgcaaacactgccttctcgtttcctcttcctctaggtattcttcttctctttcgttgtgataatgatgcaatcaatcgcttcccgtttcctctattttttattactcttcttctatttctttgtgatgcaatcgcttgtttttcttttttcatagttgatttcttctcttttgatatgaatgaatcctctctactctccatcccacttttataaatactagatttttttattaggagatttaggggattacgagatcgacttgaaagtaaaattcatattgtaaaatatattcttgttattaaatagatagatttagtattatcataaatctaaagaacttgcttgctatgcaagtaacattcttgtataaataagcttattggctaattaatataattgagagaaactatttcacttcaaaggcttcctccaaacttatcatttttgtcggttatataaatagtagataatatctgcactatgtgtgaaataaaaaaatattaagtaatttttatatataatcaatattgaaggtattcaattttatattattaattagataatcagtttgtattaatgactatcaagattagtaaatatatatttatgtttatcgtgatttatgatatatatattttgtatattaatagatacaaaatattagatacttcattttgaatagatttgtatttcttagttgcatacatcttaattgaattttcgttttaataattaagtagtaaaaaacataaattatggtttgggccgggtcgttaagattctgaaccctctaactgacctggaggtttcacacccatcatcagatctgaaaaattctaactaagtctttcgcgttaagctccgacactgcattttccgagtactcaagagaaaggcgatggggtcatcacagtcttcgcaattactcgatgaaggtgaagaagtagaagaagaagaagcagagagcgaaggtgaagaagtagaagaagaagaagatgaagcagagagcgaattgaataacagaagaatcgagctggataatctcttggtcaagaaagttctcgagcaagagcctgagatgcttccttgtcacgcctctgcttctccactctctcctcagctctcttctcttggaactcctcgaatcggaccttccattaaagtctgggatccttacaacgtcctcgcgccacctcctccttcttctccgcctcttttctctcgtatctcctccgccgcggaacacgatcgctccgccgtgacggaagtctatttcatcagccacggcgagtgtgatctcaatctcaggcctgatctgattggaggtagatgccacgtggctactctcacacccaacgggaaacgtcaggcgagagctttagccgtatttttaaactccgaaggtgttcgattcacctccgtcttctcttcgcctctggatcgagctagatccatggctgtttctgtttgccaggtacagtctctactcttcgatttctcaattctagatctaaggctgtgaaattggaatccaattcttcaaaattaggtattagtatagtagctaggaagctcatgaaacgaaaccaacctgaatcattctataatcttgttagatcgaatcagcctgatgattctaagaaaaacaactttaagactctatattattgttcatggttcaataatgttgcgtgatggattagtaataagaacaaacaaatatagtaagaatctctgaagactgcgatggaactagttaggatgcttgtaggatgatttctggattgaatgctgcattgatacttgttgcaggaaatgaattttcctgaggagcatttgcaagtctcggatgctgtggttgagatgagtttaggggactgggaaagctgtcatcggtcagagatctacacacctgaaactctaagtttaatagaaagatgccaacctgatttctcagctccatctggtgaatcactcagacaagtagagtttcggatggttcagtttctgaatgggacagtctcaggactttcggagaagctcaggtcagaacttcttccatctacacagcacacaaattccagagggttctcgttagctacttctattcatcgtccaattcttacaaggaagaaatctgggaagagccggtttcaggtgatgaatgcaactggtgatcacgagggtagtgaagagatatttagtaatcacaatgatgaacaacacctaggtgatataaacatcaagagttcttcttctctactctcaacctgcattggagttttcactcactctttacctataaagtgtcttcttaccggtatccttggatgcagcccggtaatgacacataagatctgtgtggaggattcctctgttaccgtattacagcattcgtggaaaaccggttggcaggtaaagcggttaaatgacaccgctcatcttagactgttgtagcctcatcatcatcaaattcttttactctctgaaagctctaaaacacaacgagctggtaaattattgcaagaccttcacaagtcatttaagtctgcagaagaagatcaacaagcttgcagattacatgctacctccacgagcctcttgtacgctgttttgagaaagaaaagctaaagatttgttaatgctgatgtttcactaccttgttctgtttgattctttctatttgcaagcttcctcttatgtaattcttatgcttataatcacacaaaaaaaaaaagctcattgccatatcatcaatcttgctagttgccgaagtctccaccgcttctcatttacttcagaattatgcttcaagatcattaaggtttctacttgttaccccctttaggtggtggaagtgaaaaagaggtaaatgaaatcacatgacttaagaggaagaaaccaaaaataagcatgtgaaacaattaaggacacatactttggtccgtgaacatattcattgcaattctttgtttcttagtaagacacgcacactcacacatgggaacaaaagaatctgtcttcttctctgttctattatttatacttacttggtaaaatatctttcttgtgcagaacagaagaaaaagaaacacccatggctctgttttctagcttctcagtttctgcgtttctcttgatcgttgtatcggttcaatggactctggtttgcagtgaatccacaatcttagcttctcnnnnnnnnnnnnnnnnnnnnnnnnnnnnngatatgtcttcatttttcccttctccgaccaaagactggccaatagagacagcgacatctcctgttccagaaccagaagcgcctggtccaagctcaggccagcttaatgggaagatttcaggcagatcaatgcggctccatcctgatatttccttggttctagccattgttgggatctgtacctttctatgttttaatgaaccaatacttgttaggtttctacactattgatgttgcaatcttttgtggttcgcttttagagcctcattgttccttcttggagtctgttttactcttcatcacatgaacttaaacatatactacgttattactggtattcttatgtgtatgaatattttggtcatataaaatacaagtgtgcaaccatgactaatttagagaaaacgat

SEQ ID NO: 5297 - DNA, 2298 bp, Arabidopsis thaliana landsberg
atgctttcttgactccactacaagcagctgttttcgttgtccaaaaggtatgctgcttcttaggggggaatgttgagtcattcaggtttttatcttccttcagatccagaggctaataaattgatttttttttttcaggggcttcgaccgaaaatcccaaagaaaacacacccaaaagtgaaggggcttctagagagatgctggcatcaagacccagaacagagaccactctttgaggaaatcatagaaatgctacaacagataatgaaagaggtaaacgtcgtagtgtgatctccgagtaaaaaaaaacaccttacaagggcgagaatctcagagcaggatgtggtgaaaacaaagcaggttggagatgaggaccctagcaaggacaagcactgcatacctttctttactcccttcagaaagccccgttactagttcttatgatcatcaacagttacacgattcaaggcattattttctggcctgccttgtacagtttcttttttgcttgacctagtttttgaccttagagagtgtgttttttttctccttttagttactctttgattcctttccacttggaaattagaaatcctctattacgttttcctttttttcttctttcacaagaaaggaagtttaatagagttgcatattcattagacaaatcattttcactggattagttattaagcactaaccatttaatgggttgtgtttctcatttgtttcctccggatcatagaaacgaatacaaaaatgacacaacaattactatctttctccatctcaaaagaagaaaaaaagaaagtgtcaaaaacactttcggattgtgtgtcgtttaagacatttgacaacgaacaccgtgccgtttggctatgtagaaaacgacatcatgattaggataataaatctctggagctccactaaccgaatgaatttgggattaaacgcctctggtttgtaagatttgcaggttcttcttctctctacacctcttaacatctcacatattcgaataaaagctcaaagttccgattttaataatttaccttcataacaaacaactgattcacttacttatcagccggtgactgtttttgggtctacttcaattgctgtggaagagatggtgttcttgagttggggccgtccatcttccgagcaacagcaacaagtaatcaacaagtaagaatcagcataatcgttacttagaaagaaaaaaacaatatctttttgagcactagaaagctctctctctctctctctgagtttgtgctttttataatcccagaacaggaaccttcaattatgacaacaagtacagaggagtttcgtctaggtctattgctaaacttaaggaagattcagagattgataaagatggattcttgatcaatcatgctcgtgttttagtcggttctggtagagagagttatgagaagggcaaaaaagctctccagaattggaagtatgttttgctttctatcactctcaaatcaatggaacaccaatcggttttgtactcattgatttctatttgcaggcattttggtatggattgggcatttgttgatcctgcaacacctgttgaaaccggtaagaagttttgcatttgtgtgaaagaagttcttccatgggtgatgcttcctctacaagtggtttatgttgacgaaagccggaaatcaagaaaaggccctgcgcatttcggttacggaagcggtactcttcagggacatttactcgctggagaagaaaagttttcgatagagcttgatggaaatggtgaggtatggtatgagataacgtctttctcaaagcctgctcatttcttgtcgttcctcgggtatccttatgtgaagctaaggcagaagcactttgctcgtcattcttctgaagctgtgctgaaacatgtcaatgcttcgtgatgacatcgaaaatgaagatatttgaataaacactttgtctataccaaaaatgaagatgaaagggaaggatttttattcagatggttaatactcttaatacataaaatatagctttgacctaaaacaagatttagagaaagctagggacaaacatttggaaacaactctgctcagattccgacattgttgtgatactaccatcatctagcttgaacaccttaatctaatcttccttttcgtcggtgaagtaaatagaatttggcaggcatccgtagaactcatgagccgaaaccgagaaacaggcattggtagctatcacaatcgcgttatctaccaggacttgacttctacccatttaacagttcttcat

SEQ ID NO: 5298 - DNA, 1597 bp, Arabidopsis thaliana landsberg
tggttcgatgactactacttccattaccatcgtctagcttgcacaccttaggccatgtattctcggtgtagtaaatagagtttggtaggcatgcgtaaaactcatgagccaaaaccgagaaacaagtatcggtacccatcaaaaacgcattgtctcccaaggtcttaatttctatccattttgctaattcctcatccatcgtgtaagccttgaaaccaaccgttcgtgagttgtgaaaaaagtccccagcttttctctttcgggtatttttcggaaggcgctccacaatataaagctctccacagccttccacaaatctcaagtctccccaacagccatcagtgatgttttcatcgagtgaagttccaaacctagagatctcaagatcggactttatcagccaaacattgccctttgaatccaagacataagttactcctttgtgaactataatgtcggagaaatgatcacccatttgtttaagttccgacaagacatttccatcccagtagttgatattcccatcccgaccaattccgagaactccatcacgatgacattctccttccttgactttgacaggagcacttctttggtatcctttagttgctgatcttcccttggcagtgttaagaaccgtgtaggcttctcgaatctcggagacagtgaactccaaaagatcgatgctctcggaataaagacgcaacgggtaacgtgagagaacgttgaggagacggaatctcccggagttgatgtccatgtctgatttgatcatccagcccttgctcgaggaggaggagacagtgactcggaaaaaggcggcgcgtgagagaaacgcaccgggtctgctaatgtaggaatcatcggatgatagggtttcgctagggtcgatgggatcgaagtggatgcgagggcgactagggaaaggattgttcctgttcacgcccgaagtagaggagcgccaagatctgcaaatgctcctgaaacgtttcagttcgactacgcagaataataggagggcgatcatgtggaggagctcctccggtaagttagaccaatcgcaatcaaccattcctctcttctctctatctgtttcgttcgttactttggttgtttgtgagtcacataatatctctaatatttacttatacgacgcttcgtgtacttcacaagaaacctaataatttcatagggttgtttttgtaacttttaaagaaataagaaaatataaaaacaaaatccactcattccaataaatgaaaatgaatacattgaatctaaatgcaagatattagtgctaaattgctttaaaaataataatttaaattcaattggattttataccataaatggttttcatggttcatcattgtgggatagatgcatgttttggcctggacttgaaaatttgtagcattacaaaatattctctccatttctagatgaaagattttgggttgacttccctaaacaccaaatatagtgtttattgtttatacttacttttttgtggtatggatatctttgaagcattaatatataattcattatcagaatttaacttgatttactgattgtattagattagggatttgat

SEQ ID NO: 5299 - DNA, 593 bp, Arabidopsis thaliana landsberg
aaatcaaagatattttgaaattcacacatacagattcttaaattcaataccaagaaacaaatcttgacctttaagaattaactttaacttcatgattggataacaccaccttagggaagtcaacccaaaatctttattttccagaaaaagagaatgtaataatcctacaaatatgaagtccagcccattacacgcactttatacaacaaatgatgaaccatgaaacaatttatggtatagaatctcattgaatatgaatgaatattatttagcaatttagcactaatattttccatttagattcaatgtattcattttcattgttgggaatgggttgattttttatatatatatatatagtttcttatttctcaaaaagttacaaacacaaccaaagtagcaatactgataaaagagagaaatggaagtttggtctaacttagtgggagagctcttccacttgattgccatccgactgtttctccatcgtcaaactcaaacgtttcagtagcgttttcacccttggtgctcctatgttttcgacgtgaacaaacaaattttataacaattaaggaaatgagtgttcttgttca

SEQ ID NO: 5300 - DNA, 560 bp, Arabidopsis thaliana landsberg
aatcatcttagtacggaccatcattcgtgaaaccatcacaaatagatatttatggaaaagagctatgtttaatgttgtggagagctttacattagcaaaatggatagaagttaagtcattgggagacaatgcgtttgtgattgctaccgatacttgtttctcggttttggctcatgagttttacggatgccttcaaaactctatttacttcacagacaacaaggatatatttaagctagacaatggaccaatggtaatggtagtattgagataatgtcagaactttcgcagagttgtttccaaatgtttgttcctagctttctctgaatcttgtttaggtcaaagctaccttttctttttctattaagaataccagtcatcttcaataaataaaccttaattttcatcttcattttcggtaaggatttacttttgtattcttgcctccaaacttaatctatgacatgtataaaatttgtaaaaccttaattttcttccaaatgtttaagattgttcaagtagatttgagcaatctatcaaactctcattgtgttaattta

SEQ ID NO: 5301 - DNA, 565 bp, Arabidopsis thaliana landsberg
  unsure (1)..(565): unsure at all n locations
tccatgcccaacttnnnnnnnnnnnnnnnnnnnnnnnnnnnnnnnnnnnnnnnnnnnnnnnnnnnnnnntgctcaagttttaaagggtttttggattcacttccactcctaataaaaaatattaagacagaatatcaacgagctttatcaaataggtcacacgtccgaacttataaacaagctaagaacaaaaaaaaaagtttttgaggaccaaacttatagtcttacccaagaaatcattgttattggtacaagtttaaattttaatctaaaacagaaagcttctccaatcaaatgagagttgagtaaccaacctcttgacgtcgcgtaaataatactaacgttcatttcaaaacatagccaataaaaaaaaattatgtgaacaaaatgtaccaaacataattgtttttagattttttttagagatttatctcatttaaattcataaatactaaacaaaaatgtttgtaaaataaattaattcaattagtttgaaaaattaagaccgaaaatcaatgatttctttatcacataggtcacatgtctttaatcgaaataaaagaat

SEQ ID NO: 5302 - DNA, 1992 bp, Arabidopsis thaliana landsberg
aatagtactttttgctcacaagaattagtgtatcggccaaccaggtaaacagagatggaaccccaagtaagggcagccaacagaagatctaagaaaggccaaccatttgtatgccagtgaaggcaacttagcaacgaaagcacagaataaaacacagataatgagacgcaacaaataagaaccagtttattatacgagaaagatatgtgtttaaactcttcattcatgatagcatcagtatcttcacaagctactctctttttgaaaagccatgaaccaaaaagaattagcatcaacaccagattcaagaaaaacgaaagtaccgaaaggtagatgggctggaggagaagagaatcgataggattttccatcaggaactgagtgttgaccaaaatgttcactctgaggacaagatatatctatatatatataggctactgagtcaataaataatattactttcgcagaccaccaagacaaaagaacaaaagagaaaattatatatatatacgatgacgccgtaaccattaaccaacaaaacatgaagagtttaataatgttaaaagactcccttctgaaactccactgatgcaaacagtggaccattctgagaacatagacagatgtgtagaagcagatccatcaaaattttgagttagaaaaatcacaaacatgttgtaacagaaacagatgatacttactgatggtaacaatatacgtacccctgagtgctggcaaatggtaaattcttcatttttcccaccaaatagatcacagcaaccagctcactttgacaatacggtcaggcggtgaatctaatttctcaccttaagatggaaaagagtttcatcgtgaagttccctgagatcctaaaatgtcatgcctgtgatttaaaaaaaattgtaaaagagagaaatagagaccaaaacgtgttgtaaactgataatgtaattcgttcctcatcagagagaaaacaaacaaatactatttcttacaaattattactgttttctttctgaaacaaacacgacaaggcaagattattaattttattataactagtttgttttcattgaacttcttttgaatcttgaatccgaacttgctgtgtactctgccacaagctttgaaaatgacgaggacttgtcttccagcaatctcgccggtgaatcgtgttcttctattaaccctgcatttttagatacataaccaatcttcatctaagccttccttctgatagaacaaacgtattaaaaaagtgtatgatcattaccttggtctaggagcagtaccatatcactgtctataacagatgatattctgtgtgcgattgttattactgtacagcccgagaaatgttgtctcagtgtttcctgtatcagagtatcagtcgctgtatctacagaagctgtggcttcatcaagaatcaatactttgcttctctttagcaagactcgtccaagacacaccagttgtctctgaccaacactccagttctgtccattctcacttactgcaatattagagattcctttcattagatgtgttttaacagattcgagatgactcttgtcgactatagttttagccgtactaaccaggggaatctagctttagttctttcttccttatttcatccccaagttgacacttgtcgagtgcctgaaatcagagcaacaaaaatcgtgtgagaaccttcctttttctatctgcagaaacattgaaagaaacaagagccaactaacctcccagatttggtcatcagcgtattcctcaagagggtccaagttactgcgaaccgtgccttcaaacatggttggttcttgaggtatgatacttagtctggaacgcaggtcatgcagcccaatggtcaagatgtttattccatctatcctgatttctccagctgcaggttccacaatcctaaaaagggtttgaattagagtggatttgccacatcctgttcttccaacgattcccgttttcaggcct

SEQ ID NO: 5303 - DNA, 559 bp, Arabidopsis thaliana landsberg
ctctctgttttctaatttctgtgtttcatataaaatttaattctcttttgattcatataggtttcttgcagatagggctgcatatttagcttctaatgttgtttctgaacttgtcaaggtaaaaaggttgaaactttattgttttcgttagtacctaattgatctcagaagcttattattagtcttgatcttataggagctcaaatcaaagccagttcctttagtgtttgcttctttctctggtggtcctaatgcgtgtatgtataaagttcttcaagtaagcttttgttttcaccattttttctgaattttgttatctctttccacaagtgtgtaactaagatccttctttatgtatatatatgtagatacttgaaggaacatgcgaaacgggactaaatccggtatgcacttgttgttttcattcttgttaatgattagacttgtctttatcttgatgattcttaagttaatgggttttggttcatttctctgtgttcaggatgattgtagattggttagaaactgcatctcagggtttatttatgactcatgtcct

SEQ ID NO: 5304 - DNA, 3867 bp, Arabidopsis thaliana landsberg
tctaaactcatgagacagatacggaaaaaacaagcaagctcaacaaaaatgaatcttcagagatgggactttcaaatcaaatgagaatcaagcaagcagttcttagacaaagaaaagagtcattctgtaaaccaacatccaaaggttccagtaacatggcgagaaagaaaggcattgagacatctaaacccaaagtgataaagaagtttacatagacttccgatagcttaataaccaccgaaaatcagaagcaaactataagatatcatcacacaaggcaaaaaaaaaaagaatttgaactggatacatcttagaggagaacacaaaatgcagaaagagagagagacagacctcgataatcaacaccagagttgagcttgacaacaactggtttaccacggatagatttcaagaaatcagcaggtgtcttagttgttccagaagctttctctccaactccactcatcttctttgctaagaaaccacaatatctgcccaccaaattagatccaaatcaaacaagacccctcagaatatcccacaaagccaacaactttaagcaacaaattcatgtcagcaattcgagatccataaatcaatcaaattacataaagaccttgagaaaaggaatcatcttgaataccaaactcgtagcatctcaacgattactcccgaatcaaacaaaactatgtgccctaaaaccctaaacctcagaccaattaggaaatgcgcgaatgacttggattaagtaaaaagagaaactttgaaatggattgcagaaacagatgagtctgggaaatctaagaacaacgaacctcgagtccacgaacaaacggtaattggctagagacttccgctcgatgaagcagccgaacagagcgaagaagacatgtgacgcatttacaaataagtaaaaataaaattacaattaaaaaggcccaagcccaaattcgaatcagcccacatggaaaacaatccgaagtccaagtttttttattgtggtttaattatgtgcgagattaaaactttttagtcaattttaaaattttaatcgtgaaaatggtgaattttcaaaattcgttgggagaagaactttgcaaagatgtttgacatcagcaatttggaaatgcctaatgtgaaccaaacaaaagaataatttcagtttctttttttacattttgtaaatagtatagcttgcaataatttaacttttcacaagactttagttcttctatcgttttaggtttagatcaataaatacatctacacgtgacataaataattcaacagaggactggaacacgtacagagcccgatgatagcaacttgcaacaatctgccaaaatctatttaaattcgcctatcaataaaaatataaatatgtataacacatatattacttgagtacgtagcaaatgaaaccaaaacattagcatacaccgaaccaaacccgagccaacagttttcacttagaacgagccatcgtcgtcgtctagagaacccgatggacttagccgtgagttgttattgataaccaccggaaacagaggcgtggcggtctggttcgatggcgaatgtagtggcatggatccatacaccgttctctcgtttacgcgtccaacttctttacacacttgatcaagaatcgtcagaaagtctctgaccacagcgaaaatgcgaaaaggatgagtttccgagttcccgtggaaatactctgttacttctttaaccatcttcatgacattgtctccatgagattgtaactctgtgatctctttctcacctttgttcaagaacgagttcattgactccaagaatctctctacacctgtttcttgctttagctccgtgattacttccttgactttcgctattcctctggcgatttccgctgtttcgttgatgagggaatttgaatccattgccgctgctttcttgacgttaatcagctgagagctgagacctgaaacgacttgcaacccgagtttcttgagctctaggtcatcttggaatgcggattgctcggccatgttatcgcctatatggctttgactcggagtaaaaggaacccgagctccttcaaattttatgatctcttgaaccacaaaatgcaataaggtggttttcccatccgcgcttttgatatctcccagttttaagagcgtgtcgagcttgaaagcatgtgcgtcccctctattggttcctatattcatccggttcccagtcttgagcacggcttctaaaagcttcaagaacatccgcgtgttctttaactcaccagtagcagcctgagagtttgatcaaatgcatatgaatgatctgtttgatcagcagacatacacttatgaggtggacaagtagagttttacctcgagagtgtcgaaggatctgttaaggtactcgatttctgattcgaacttgacaatgtaaagcattgcatcaatcctcttgaaggcgaaaggaatgttcaacaatgctttgaggaatttctctgcaggtcctatcttggaaggagatccatcatcatcatctttaagctccttaagcttgtcctcttcttctttagtaggagccatcttaagcaagcattcgagaagctcgggtccaagcgtatccgagttacctgattcatgaacaagaaagtgattagacatcaactaagtcaaacaagtcaagcttcaataatcacagaccaatttgaggaatcatcaaaccaatgcaatgttgcagtaagtgcgagtaacctaagcaacaacagattggaaattactcaccttctataagagcttcacatacttcatcagcagttacattaagagctctcaacaaaatagcaatgttgtgtgactttcttggatcaagaaaccgattctcctgactcacggattgaacaacgccatctcttgttctcgaagttggatcattcaccttgaacaatgtctctatcatttcttcattcactctgcaaaaacacaaaagaatcatatcttagtcgtgtatgcaaaaggatagatcaagtctttaattcagattcgttatgtcttactgaaaggagtttgatttgatttggtcccacaccataacacggctcgagcttgctctaactttatcccaatgtaaagtcttcaactttggtttcatggtctccactttcttctctgggtcagaatcatcaccaggaagggaatgcgacatagtagccggaacctccgagacctgtggcggcggaggaggtggtggaggtggcctcgctggacaaagccgcttcggaatgccgttgtttgagcttatctgactgtgcagcgagacaggaggactaattgacttaggtttcaaacttgttcccggagaagcattcaacgacggcgcaaaattagtcggcgaacacgagttcgagcctgagccgttgatactcctgttgtcaatctgatcaacatcagagacacgggtcgggctctgtttacgccctgaagatcctctcggagagaaaaactcatcgttttcgttatcgtctccgtcaaagtcttgtcttttagggtttaactgttcagtgcttttgtaaacgggagtgaaagattggagctttggtaaagggggaagaggacgaagctctggcgagcctagcttatggtactgtgagtaagaagaagaagaagacgacgaagctggaggaggtaattccaatacgccggtgataccgccagagagggagattggagacttttgctgctctaaaccattgcttcgagagtttactaaagtacctaagtagagaaactcagaggaagtgtgtgaggaagtgtactattggtggttgttgatgttgtttctgtttcttagagccgtcggaaggagaggagttaagag

SEQ ID NO: 5305 - DNA, 3094 bp, Arabidopsis thaliana landsberg
  unsure (1)..(3094): unsure at all n locations
atactcggcctcagcggtggatagggcaacagaagtttgtttcttagagttccacgacaccagggaccttcctaagaattgtcacgtccccgatgtactcttcctatcgaccttacatccagcatagtcggaatctgagtatccaattaagtcaaagttagacccttaggataccagatcccgaagcaaggcgtacgcactaaatatctaagaatttgcttcaccgccactaagtgacactccttaggatcggattgaaatctagcacacatgcatacgctaagcataatatccggtctactagcacataaataaagtaaagaccctatcatggaccggtatgccttttgatcaacggacttacctcctttgttgaggtcggtgtgtccgtcggtccccatcggagtctttgcgggcttggcgtccttcatcccaaaccgctttagcaagtcttgcgtgtacttcgtttgggagatgaaggtgccgtccttgagttgcttcacttggaacccaaggaagtagttcaactcgcccatcatcgacatctcgaatttctgcgtcatcaccctgctaaactcttcacaagacttttggttagtagaaccaaatattatgtcatcgacataaatttggcatacaaacaagtcaccatcgcaagtcttagtgaaaagagttggatcggctttcccaaccttgaaagaattaacaattagaaaatctctaaggcattcataccatgctcttggggcttgcttaagtccatagagcgccttagagagcttacacacgtggtcggggtaccgttcatcctcaaagccagggggttgcccacgtacacctcctccttgattggtccattgagaaagcgctcttcacatccatttggcacaacatgcaagaatgctgaccagcatacggctaacactatacgaattgactctagcctagccacaggagcaaaagtctcctcaaagtccaaacctgcgacttgggcataaccttttgccacaagtctagctttgttccttgtcaccactccgtgctcgtcttgtttgttgcggaaccacccacttggttcccacaacgttttgcttgggacgaggcaccagtgtccaaacttcacttctcttgaagttgttgagctcttcctgcatggccaacacccagtccgtatctagcagggcctcttctaccctgaaaggctcaataggagagacaaaagagtaatgctcacaaaaattcaccaatctagagcgagtagttactccctggctaatatcacccaaaatttggtcgacgggatgattcctttgtatcgtcgctcgaacttgggttggaggtgcctgaggtgcttcttcctcttcaacttgaacatcctgtgctcccccttgatcatgcgcctccacttgaggtacctgttcgtcatcttgggttgggggatgnnnnnnnnnnnnnnnnnnnnnnnnnnnttgttccaaatgttcctatggtcgcacatctccaatcgccatggtgtgtattgcgaccgttggaacgtcttcttcatctacatcatcaagatcaacaacttgctctcttggagagccattagtctcatcaaatacaacgtcactagagacttcaactaaacccgatgatttgttgaagactctatacgcctttgtatttgagtcataacctaataaaaacccttctacagctttgggagcaaatttggaattcctacctttcttcactagaatgtaacatttactcccaaatacatgaaaatatgaaacgttgggtttgtaccggttaggagttcatacgaagtcttcttgaggaggcgatgaaggtagacccgattgatggtgtggcaagccgtgttcacggcttccgatcaaaagcgctcggggggtcttaaactctccaagcatcgtcctcgccatgtcgattagcgtcctgttcttcctctctaccacaccattttgctgtggtgtgtagggagcggagaactcgtgcttgatcccttcctcctcaaggtactcctccacttgaaggttcttgaactcggacccgttgtcgctccttatcttcttcaccttgagctcaaactcattttgagctctccttaggaaacgcttgagggtcccttgggtttcagatttatcctgcaaaaagtatacccaagtgaagcgagaaaagtcatcaacaataactagaccatacttacttcctcctatgcttagataggcgacgggtccgaagaggtccatatgtagtagctccaggggtcttgaagtggtcatcacattcttgctgtgatgcgctcctcccacttgtttacctgcttgacaagctgcacaaggtctatttttttcgaattgcacgttagtcaaacctatcacgtgttctccctttagaagcatgtgaaggttcttcatcctcacatgtgctaaacggcgatgccacagccaacccatgctagtcttagcaattaagcatgcatctagaccggcctcctcttttgcaaaatcaactaaataaagtttgcccgtctagtacacccttaaatgctagtgaaccatcactccttctaaagacagacatatctacatttgtaaatagacagttataccccatgttgcataattgactaacagatagcaaattataccctagagactctactaaaaacacattagagatagagtgctcattagaaattgcaattttacctaacccttttaccttgccttgattcccatctccaaaaataatcgtatcatgggaatccttattcttgacgtagtaggtgaacatcttcttctcccccgtcatgtggtttgtgcatccgctgtcgatgatccagcttgagcccccggatgcataaacctgcaagacaaattaggcttggtttaaggtacccaactcttgttgggtcctacaaggttagtcacaatagcttttggtacccaaatgcaagccttgtctcctttgcatttggatcccaattttctagcaaccatttttttcatttttacatgaaagtacgaacatagtgttgcaagtctcaaagccagtggtaggtttattacacattttaaaaggaaca

SEQ ID NO: 5306 - DNA, 264 bp, Arabidopsis thaliana landsberg
acgaggggacaacaagccaggattagggctctggtttttccttgtttaggacatgataacaccgagggaatggtgaacttgttctccactggcccctgggccactgctaacaaataataaaaagtgataacatactcaaatggtgacagcacgccgtgcttaacagcttaacacggtacatgggaacatactaggaggagctgaccaaaacatccttaagtgagtgcaatattgccagcagaaccggtccagcaggaggatagg

SEQ ID NO: 5307 - DNA, 1976 bp, Arabidopsis thaliana landsberg
caaatcagaactaggctttgacgatactatgtcagcatcctcagcgttaactggtgatgatgccttagccgtaagtggtgacaatgcctcagccttaactagtgatgtacaaagatcaatattagcactttctttgggtgatgaaactaaaacctcctctacatcattattatctgaaacagaaggttttttctcagtatctgaagacaaaaagccagacggagattcagaatctatggatgacatgaattcatcaagagagacaattggaggaagagatccagtggcagcctgcatctcatcatctattgtgactccgtttattggcccagtgctctcattagagctgttcaattcattcttgactccaagagttttcgtgatggaaggggttttcttcttaaaattctttgttcgagaccagttaatcgaactcattccaacagagacctctactgaaccactatccattggttcaacttccacttggaactctcctttgtgtgttttccttactaggcttctgatatccacctcagtgtcctgcagaacaaccatctgagccatctcttctgcttttgcttgtcgccactcagctagttcctttgaagcaagttcctctgctgacatggaacacaatcgctctgctgcaatttctccatacataactttttccctgagtttaggattactcttgtctttcaaattgaacaagagagaccttcctttctctttatatttcttatttacaccaccaaataacttaaagagttctgtctctatttcaaatgccaaaacttgtggatccagtaacaatttttcgaggctcccatcattagccattgcaccaatcatttcattttgacaattgacagtaaactcaatgtccgactcgagagcccaagagaggtcattcccttgcaaaagatcatcttttgaaaacacattgtcactatatgaaacattgtcttgcacaaacggttttacagcctcaggtacttgggcatcacttgtcttggcgatagacaaaatctccggtaacactgtctgagcagagatacctcctctaggactatgatcaccgagagtcagcatctcagtacttccattagataccatcacatcagctccagaagcagctgacactggctcactaacataaccttcgagaagattagctacactctcactatctaacattttcaactccttgggagcttccacttggcactgcaccattgccaatgcaccagctaaagattctctcattttagacctaacagaaccagatgactcactctgaggtttcagcaacatcggtttctgtaatgtcggttttctcgccgcagcttgcttcccaggtttattaaaagaaacaaaactattcttactaacaaacgaagcaggcaaatactgtgttctaggggaaacagaagataactgcacaggcattggagcagacgcccacggtcgaccttccataggtaatgccatccgtttattttgcacagaaggatgcaacggagatttccgcttaccgggtaacagagtcttatccatattaactgatcctaaaccaacagcactaggcaacattacatgaaaatcttgtctcccaccagagatatgactacagattggttgtgacaatctcatttccggattagaaatcagctcaggagtaggagtagggacattaatgaattgacccatttgcatacaaggctgaggcaatagattgttggacataaaaatcaatctaacaaaacaaaggctgcaaaagaaaaatgacaaagcggattcagtgaagattcaaaagattttgtaacaacaaatgtatagacattgattcagctgttcttggttctcattgaaacaattgatgatttagtgaaagagatgattaatcgtgaccaatggcaatgatatgaatctaatcttttacttcatcaatgtaaaaaaaatgtaagaaagag

SEQ ID NO: 5308 - DNA, 885 bp, Arabidopsis thaliana landsberg
  unsure (1)..(885): unsure at all n locations
tctcttctgttggggcagagtcacagcagatgatgtccctggttggattttatgttcttatcataagagtcatttttctttaaagtggctttggtagatgatttcgaggattttgctttggctcgaggtttactatttgatgtaatctcagcagagacatccactgtcccactgtcaacgggatcaatttctacctggaactcacctttatgcgttttcctcaccagatttctgacatcaatgtctgtgtcccgtaggacaaccatctccgccatctcttctgcttttgcttgtcgccactgagaaagctccttagaagcaagttcctcagctgtcatattacataatctctctggagatatctttccggacatgacactttctcttagctcaggattgttcttatccttcaaattgaataagagagaccttcccttctctttgtacttcttgttcacacctccaaatagcttaaaaagttccaactcaattttagatgccaagagctctggatcctcaaacgacttttgagtttcattctccccaaaatctgaaacaggttccaaaacccatgagaggccattaccctgtaaaagttcatcgccagtaaaaatactatcactaaaacgaacatcatcacaggggaaaacctcgtcaaatnnnnnnnnnnnnnnnnnnnnttgattaacataattcatcttggtgtccttggaactctcttgcgacaaagttcttccattgccgttcttctgctcaaaactntcatcccttgtggacattgctggcgtgatgtcttcacctactgtaacactggtaccacaggctgacgcangctcattactatcagctactggaacactntgctcttcagtttctgaattcttt

SEQ ID NO: 5309 - DNA, 577 bp, Arabidopsis thaliana landsberg
  unsure (1)..(577): unsure at all n locations
tatcaaatactcaagaagcttgcttaaacagtccttattggatgttttcctaaatagcacataataggaatgattcccgtaaaaaacttgagaatcattctgggagcaagtttcactagcttgcaatggccaagacagatgcttggcaacaggttttannnnnnnnnnnnnnnnnnntgaaaatgcgaaggatccatcttcaccttgatttccattagccatctgtccagccacactaccacgcccattacagttcataactctgttgttctcttcatgacaactaaccttggttcctgaaacaagcatttcagaggcagtcttattattctctgataacttgtgacaattttcttgtttgtcatcttcagcgcgagttttgttctttgctccctttttatcacaactttgcttgtctttattgcttcttacattgtccgtcaccttttgtaaaggcttgaaggcattctgtccattaacctcaaagttgctttgctcacgactggcggtgggagataattcaccctcttctagctcatgcttttgcaccgatgctgcggtaaccatatgattccct

SEQ ID NO: 5310 - DNA, 2775 bp, Arabidopsis thaliana landsberg
tgatcacctaaagaacatgtttttggaacaagcaagttcgacagaagaaacaatagaagtttatcagccaagtggagaaaagattcaacaaacagacaagaagcttcacgaccaaaaggcactcgccgagatctatctccttagcctaaccgatgaacttgtgacaagcacaaggtctacatttggatatgtagctcaaggtcttggaggtttaaagccatggatactctatagacccgagaaccgtacaactcctgatccttcgtgtggtcgggctatgtcgatggagccttgtttccactcgcctccattctatgattgtaaagccaaaacgggtattgacacgggaacactagttccccatgtgagacattgtgaggatatcagctggggactaaagctagtatgattttttgtgtgctttactctgtttttgattatttgatgtatcattttaacttcttaaattagctttaattaagtcaatttttgtgcttttgacattttctcttaaattagataaaacaagagcataaaggttgagtttttattaccaaagtctccgtttttttttgttgatgatctttttgcttattctcttactcttcctatgtaacaaatgaggaaagtaaaagggagagatcagatttgatttctatttccatttttgtttagatcttagggtttctgaataatgtatccctccagaagaagattatctctttccagagccattgataaagaaccggaggaacaattaggagtccaagaaaagaggtgcagattcttaggagcaatgagaattacagagatcttagctttgttcatggttttagtccctgtctcgctagtaatcgtagccatgtttggatatgatcaaggaaatggctttgtacaagcatctagattcataccaatggaaccaaatgtgacatcctcatcagatgattcaacattgcagagagatcaagaacaaaaaggtaaacttactttcttctttttgttttgaaatgtttctaaatctttctttgaatgtttcatcagattctgtagatttgtctctgcttggaggactacttgtatctggtttcaagaaagagtcttgcttgagtagataccaatcttacctctaccgtaaagcttcaccgtataaaccttcgttgcatctactttcgaagcttcgagcttacgaagagcttcataaaggatgtggaccaggaacaaggtcgtataccaatgcggaaagattgcttaaacagaaacaaacaggtgagatagaatcagaaggatgcaagtatgttgtatggatgtcgtttagcggattaggaaacaggattatcagtattgcttctgtgtttctgtatgcaatgttgacagatagagtcttgcttgttgaaggaggagagcagttcgcggatttattctgcgaaccgttcctcgataccacttggttactaccgaaggatttcaccttagctagtcagttcagtggctttggtcaaaactcagctcattgccatggagatatgctgaagaggaaactgattaatgaatcctctgtttcgtctctgtctcatctctatcttcatctagctcatgactacaatgagcacgacaaaatgtttttctgtgaagaagatcagaatctctcaaagaatgttccttggttgatcatgaggacaaacaacttctttgcaccgtctctcttcttgatcccttctttcgaggaagagctcggtatgatgtttcccgagaaaggaacggtgtttcaccatttaggtcgttaccttttccatccttcaaatcaagtgtggggactaatcacaagatactatcaagcttacttagccaaagctgatgaaaggattggtcttcaaataagagtctttgatgagaaatccggtgtatctcctcgagtcactaagcaaatcatttcgtgtgttcaaaacgaggatttgttaccgagactaagcaaaggtgaagaacaatacaagcagccatcagaagaagagttgaaactcaaatctgtcttggtcacttctttaacaacaggttactttgagatcttgaaaacaatgtattgggagaatccaactgtaacaagagatgtgattggaatacatcagccaagtcatgaaggacatcaacaaacagagaagctaatgcataacaggaaagcttgggcagagatgtacttactcagcttaaccgataagttggttattagtgcttggtctacatttggttatgtagctcaaggacttggaggattaagagcttggattctgtataaacaagagaatcaaaccaacccaaatccaccttgcggtagagctatgtcaccagatccttgtttccatgctcctccttactatgattgcaaagcaaagaaaggaactgacactggtaatgttgtcccgcatgttagacattgtgaagatattagctggggacttaagcttgttgacaacttttagataatcaacattgtaatgtttccttttttctgaatgtttcagttgatattaaaagatagaagaaccaagccatttccattattgtctttcactaatgacttcttttacttaaccctgtaataggctctgttttagtgcgcttaatcactattaggcccatataataattttcttgtgtttttgttttcccaacagtaagtgagaaaaagagaaactcaaaagttttctcaactaacaacggaagaatagggcctctgcttcgttgagtgaatctcttaaacagtgtctcctcatttta

SEQ ID NO: 5311 - DNA, 2852 bp, Arabidopsis thaliana landsberg
catatgatcagttagcggatcaggataccgaaacatagtgggtgatacataaccgacgaatatactcgatctccattgtggccctatttttgttctttgtggtggagcaataggaacataaaccgcacacctaaaaacacgaagataggctacgtttggatcttggctagacgttaattgtaaaggagaatatttattatacgcgcttggtcaaatctgaaccaatgtcgcagcatacaatatagcgaaaccgcatacagaaattgagagttttattctcaatattaatggtcttgcaatgagttgcagccgtttaattaaagattcagccatgccattttgtgtatgagcatgagggaccggatgctcaatatagattctcattgacatacaataatcattaaaggcttatgaagtgaactcaccggcgttatcaagcctaactttctttattacataatcatggatttatgctttccacctgattatttgggaaataaattttgcgaaagtcgaattttgtattgtcaatagacacacatgtgaccatctactagatgcgtcaatcattaccataaagtaacgaaatggcccacacgaatggtggataaagccacctatgtcacaatgtattctatttaagaataatggcgattcattcccaattttagttggtgatggccttgttatgagttttccttgagaacatgcgttacatgaaaactcatcagatttgaatattttttggcttttcaatggatggttattagaactttgcaaaaacttttgcgtcatgactgaactaggatgtccaaatctttcatgtcatgtcttaaatgtactagtaaactcgagagtttactataacatttgttgtgattatatttatttttgtgcaatataatccgaaagataacattggcaattcttccaataggtattgcctcttagattttatgcaaagatattcaatgccatctgtaatactctcaaaccgttatagaactaagaacgaatccggaagcgttacgtgtgatgcccgtagacgatctgaccgagttcccagaacacatccggtaccaaggtcagttcatccgtgaacatcgttcctctcgaacatggcctaaggcttttcaacccgtaccatgtccgtaagttgtgttagtcaggacaagactaatattagagatacacaaggatttctaaaaaactcattttattaatcttaaaatatctcaaaatacaattgtgttcggctagccaaggcctaatgccacaatcaagtcatacaacatatatttttaaaaaaatatctttacaaaggcaacgaactctacaccggcttccttacgttcgtgctcccctctaaggtttctcactatggttacctgcaaaatagagtgagggatgagcaccaatcgcttagtgagtccaggctcccctaaacatgcaatattccccacccagaaacccaaaataataatcaaatgcatgcaatcaacaaacaatcatgcatcagacaatcaatgcaagattcgaatatactcgattgagtatacttgacaagaaatcaaccaattactcttggaaaagtgtaatgaacccaatcaatattaagcatgcatgcataactacactaaccgagcttacgcagcggaaccacttatactactctaaagcctttctcttttcagcgatttttatttcccacaaggcaatgtctctaacccttagccacaaatgctagaaggatcacatcccttcccccttactgtctacaagggaccaaatcccttacggtataatttgtactaccccatcgggccgcctcgggtggtagcgagccagtccgagccgttgggacaatcatgacatcgcttccgaactagtcataaaaatgactaatcacgtttacttactacgaccctattgaatctcaataccactcgtaataagatctacctcacaaccaaatgtctcaattactacctagcatgcaaagccaattacaaataagttaacaaagcaagtgcgagattaaccaacaacaatcaatcaatgataacaaacaagcaatcaatcaatactactctatcatgtcaataactaactacttattgaccacccgacaacgggtaacataatagttatactaacaacataacatgtattgcgaggtcatccagagcataacgtttacactaacgtctagcccaacctcacatctaacgctataaataaaatgtttataatttgtcgggatccctcggttaaccttgcaatcataaacgttaccagaatagtttagcatttgcccacacagacacaatgcaacctcctaggcgtctctcacaacattgtataactacttaagcaagtagttaaaactaaaagcaatccttcatagatctattcctatattctacacttagctaatagaaccaatctaaaagctaaactatgcaacctaatcaatcaacaattctagatctatgaacggaaagtaaacaaacaacaatcaatctggttcacacgagttctatgaactacatgtaaacacatgcaacacacataacctagactcaccttggcttggatgaccaggaaaattctacccttgaccgcctatatctcgatccgacttaagctttctccaatgcgtactaacgatggatctaagccgcggaccgaaaataaaacttagaaaaatattctaaaaagaataaaagactaagggcggaactacttacctattacccgagtaactcgactctcgactacctgaccaatgctcctgacgaccacggcttctccaagaagctttacgacctaactagtctaaatgtgatttt

SEQ ID NO: 5312 - DNA, 289 bp, Arabidopsis thaliana landsberg
atatctgtctctggtcctttgtcattccaatttgagccagaggctgtctcttttcaatcatctatgttggttgatactcagtctttgatgcctcagttgcaacttccatattctgtagagaggtcagtagctgcatgtagtaactcagtgacagggaagcggaaatcgccaccagagtctactctcagtggttctgctacttccgagaagttagatgcatctaacatgcgagtagagccagtgcaccacagaccatggctagaacaattttattcagaatgtattcagc

SEQ ID NO: 5313 - DNA, 582 bp, Arabidopsis thaliana landsberg
  unsure (1)..(582): unsure at all n locations
cttgcctgggatctatctcttcagttgagggaggagttgagcgtgatttttcattgtcagcttttgctgcctcatctttgagagcggttttgacagaatgagatttggctctgggtcgacgtttgctacgtgacatgatgccaccagagacatctactgtgcccctgtcaactggttcaatttcaacctggaattcacccttgtgtgttttcctcaccagacttctgacatcaatatctgtatcctgcaggacaaccatctttgccatctcttcagctttggcttgacgccactgagaaagctccttagaagccaattcttcggctgtcatagaacacaacctctcagcagaaatttcttccgacataactctttctcttagctcaggattgttcttatccttcaagttgaataagagggaccttcccctctctctgtactttntgttcacaccaccaaatagcttatacagttccatttcaattntagatgccaaaagttttggatcctgaaatgacttttcaccaccggttccataatccttcgtttcgccaagatctgatacttccagatcccatgaga

SEQ ID NO: 5314 - DNA, 1802 bp, Arabidopsis thaliana landsberg
tggagagaacttgaataaaacaatcaacagctttagcattatttccggtaaagacgatatcatcaacgtacaccagcatgtatatgagtacatctcccatgtgaaaataaaacaccgaggcatctgctaaagaattaacaaagccgttactaagaagaaaatctcgtaactcattataccatgctctaggagcctgcttcaaaccatatatcgctttgtgcaaacgacatacatgatgtggtttatctttgtcaataaatcccggtggttgactcatatacacctcctctgtaagtttgccttgtaagaaagcattattcacatcaagttgtcttaacacccaatttttttgagcagcaagcccaagtaccactcgtattgtaacatgcttgatgaccggactaaacgtttcttggaaatctatgccgggtcgttgatgaaaacctttcgcaacaagtctcgctttaaatctgtcgatcgttccatctgcttttctttttataacaaatatccagcgattgcctacaacattagatgccatgctcggatcaactagagtaaacgtaccattacgaacaatggaatcaaattcagctcccatagcccgtctccatcgctcatctttcaaggcttgaacatgagacgttggttctacttccgtaagatgtatattgttcgcgaacttcggattgggtttcttaatattattctttgcccgtgtgaccatctgatgatcattgtttggagctacggtgggaacaggagttgctgccacaatattttcaacaacattgcttgtctcttgtggtgttgagttagtgttcccagatggtgatgaaccattgtctgacggcacttgttctgttgttgttggtgaaggatccaaactggggggcgagctgatgatgagtggctcacgatagacccgagctgtagaaatagggtgaacaacagaagaagaagactcatgggaattgtcagtcgaggataaaaatgaattaaaaggaaattcattttcatggaattcaacatgacgtgacacaaaaaatttggaggaggaaaaatcataacatatgtaagcactttgtgtaagagaatacccaagaaaaacacatggagtggaacgaggagaaagcttgtgttgagaatagggacgaagccaagggtagcaaaggcacccaaacacacgaagtcgtgaatagtttggtgtggattgaaaaagagcttcatatggagagacattggagagaatcggtgtaggcattctgttgataagaaacacggctgcggctagtgagtaagaccaatactcaattggtattctagcatgtgataaaagtgacaatcccgtctccacgatatgtcggtgtttccgttctgcaatgccattatgttcaggtgtgtgaggtggtgatgtgagatgagatattccatgactcgcaagatatgatcttaagccaatgtactcaccaccattatccgagaacaatgttgtaagttttgttttgaaccgattctcaaccaatgccctgaaaaccggaaaaattgaggcaacatgagatttttgtttgagaggataaagccatgtatatcgtgtataatggtcaacaaaaataacatagtatttatagccatcaatcgagtggaccggtgatgtccatacatcggagaaaacaatctcaagaggaaaatgtgagtgaatcgaagattgagaaaatggtaacttatgacttttattaatagagcaagcattgccaatttggtgaaaaagacatagggattttaaaacgagaagaaataag

SEQ ID NO: 5315 - DNA, 3789 bp, Arabidopsis thaliana landsberg
acacgtaccactgttcgacgattgcatcgtttttgttaagttgttatattgttatataatttttgttggtttttttaacctgtgtcttcatgatgatagctattctgaaaaagaagaatcgaacataagtaaatgtaaacaccaacgaataataattttttcaaacgtaagcatgatatactacgtattatagtcaacgtaacaaccaagaatagtatttctaatgcatgcatgatataataatactctaatagcaatgtgtctggtcatgcgcgtctaaagtagaaaataaatatgacagtgtacgtattatatagtcaacagcccagaaagaagttttacgtaccaagagaccctctgcgtaaaagagcttcccgtcagttgctagcaattattcaagaccggagccgtcaatagtgattttgaggtttatttgttttgtgtgaaaatagcaaataagtcaatttcaaaggaaaaaagtaaaaattctcttaggcactagtatcgagaagctattttaggctaaaacttttgaaaagtagatctaaaaatttcttttgactccctttttccctaaaaaagcaagtatccaacaactcttctttacccaaattagaatttggccggagctttgtcttgttgcagaaggcttccggtggtctcaccgccattgagaccggtgcaggaggcgcccctcatggtgtggctacttaccaacgctctctccaggctctattacctccaagcttgaagctttgacctgattatctcttaaaagcaagaagctctaaccagaaactgtttcaaaagctgaatgactgcatttatggcaccaacctcaaagatcccaactgcttccctccaatctggtaactctctccttttctactcatacttgcattgattgaccctgcaaaagagtagcaatatataacccttgttttcgcctgttaaaccttttaaacctgttttaaacctttttacctgtaccttatctgaagaactgtgctacacaaaccatcaaaacctctcaagtaccctataaacttcagtgtctcagaccatggacaagagaataccgtaccatctgaaaggaaagggcctggaaagaggctactcccccccaccaagaaggagaataaaagccccggatctggacacttctgagctcattggcagcaaactccctcaccctaatggggagactcactaaccctctagaccaaagactttggtctctattccctttccttgcaaatcgatggactcttaaaggcaaagcagtagggtcggatttgggaagagggtgcttccagttctgctttgactatgaagaagatttgcaaaaggtccttgataacagaccgtaccacttcgaccaatggatgatcatcttgcagaaatgggaaccaataatctctgactccttcccctccaagattccctcttggattgagttacaaggtctacctaaacactactggcaaccagaaatgctgaagtcaattggcgaggagcttggtgagatcctagacatggaaattacttcttccttagtgaaaatcagaatcctaatcgatggtctacaacctctggtaaaggagacagtggttgattttccagatggtagtgaagcaatcgttttactagaatataaaaacctaaagaaccattgccatcattgtttccgcctatcacatgaaaagaaaaactgccctgggttaagagaagcgacagagttacctggtgatgataactcctcaagatctcaacaacaccccagagagtcttcaagaaactactataccccaaaggataatttcacagaccctagaaaccaacaagtaggacctgttaaatctgatatcccacaaacaagaaactcttctttgaaaagaaagttttctgacagagaaagaatgccaaactcatactctgcagaaagatcctacaatcgcaaccaccactcttctagagcaccacaaggtcggtctgcggttctctatgagcgaagatctagtagagaactttcttactctcagcactctaatgacattaataggatttcacatcagagtaattttcagtggaaggaaaaatcttctccgatacctatctcacctctggagatctctaactcctccagaacaagacgaccccctctggagagaaatatttccagcatggccccctgctctcctcccctacgcagactacactccctagaagtggtctctcatcctcttccaattcctacaaaagaacaagtcatgggcaaattaagagaagtcactgtccaatacacaacttgtgctgatcctactgaaagtgcagcacagaaacaaagggtattgcaaggagaggcaaaaaacttgatgaacaatactgctgaccaaattattgaagctatagtagcctcgctaccaagttccctccctctattacctgataatagatctggagatccgatgcctgactcagtccccattgaagagcaactaataccatccaaagaagcagaaaaagtagtcaaaagaggaagaggtagaccccctctttcaaatccagctgggaaaaacactctaaaaatcactggggtcaagtgtcaatagaggaaccttgttcacagctccccaaaaaagaaccatacctcaaagccacctcaaaaacaaggtcactcaaaagctggtacgagtagagcacctcaaaactcgggttcaccacctcagcatgctggcgtttctgtaggaaaagccccaacttcagctccttctagctctggaggtccaaaagtaaaactgatccctgcgatgaagaaaaaaactttggattttcagaagccatcaacccatcttccttaagggctgtgagctggaactgttgtgggttggggaatcccatgacagttcagcggataagagagatccgtaaaaagatctttcctgacttactctttattatggaaacaaaaaaccccacaaccacagtcttgaatcttcttcaaggacttaactatccctcccatcatttagtggaacctcactcaccaggtgctggtggcttaaccctgttctggaaaaataacatagaagtagaaatacttagttcctgtccccactttattgacactagaattaaggcaaaaggtagggaattctatgctactttcctctatggagagccagacagaacaaagagaacacaagtctggactcgactccaagatattgccctcctcagggatggaccctgattgatcactggtgacttcaatgatatcattggcagcaatgagaaagttggtggtttagagagaccagaaagctttttttcagacctgcgctcctttatgtccacttgcgatctatatgacctcaaacacactggaagttttctatcttggaaagggaaacgtcatactcacacggttatgtgcagactggataggtccatggccaacagtgattggattattgcttacccctcaggcgacagtgagtatctccgtttcgagggctctgaccatcgccctatagttacatcctttgatcctgtaaaaaagaaaagaagaggcctcttcagatatgatagaagcctgaaaactaatgaggaggtaacagctctcatttctgaagtttggaactctgaaaatactgcaatgattgatagaagaatccatctgtgtagagaagctattatcacctggtgtaaaacccaacactctaatagccaacaagaaatccattctctcagaatccaactggatgaccaaatgagtaataatgatgc

SEQ ID NO: 5316 - DNA, 957 bp, Arabidopsis thaliana landsberg
  unsure (1)..(957): unsure at all n locations
tcaagtattccaaaagaagaagaagaaatactttctcaattttctctaatggctctgataaccttacttgaagtctcaatttctttactctttttctccttcctttacggatatttcttgattagcaagaaacctcaccgttcgtttctcaccaactggccatttctcggtatgcttccgggtttactcgtggagatccctcgtgtttacgactttgtaaccgagcttctcgaggcctcaaacttaacttatcctttcaaaggtccgtgttttgggggccttgacatgttgatcaccgttgatccggctaatatccatcacatcatgagctcaaacttcgcgaattacccgaaaggaaccgagttcaagaagatattcgatgttttgggagatgggattttcaacgcggattcggagttatggaaagatctgaggaaatcagctcaaagcatgatgactcatcaagattttcaaaggtttacactaagaacaatcatgagtaagctagagaaagggcttgtcccacttcttgattacgttgctgaaaagaaacaagtcgttgacttacaagatgtgttccaaagatttacgttcgacacttcgtttgttttagcgaccggggttgatccaggttgtctctcgactgaaatgccgcaaatcgagtttgctagagctttagacgaagcagaggaagcaattttcttcaggcatgtgaagccagagattgtttggaagatgcagaggtttattgggtttggagatgagttgaaaatgaagaaagctcactnacattcgaccgagttgnctctnatgcatagcttctaagagagatgaaataccaatggggttataaacattgactcttcttctaaagatttgngatgtgctacatgaatgtggatacatttgtcatcaccaagtacagttgttgaatccaagtgatgacaattcctagag

SEQ ID NO: 5317 - DNA, 633 bp, Arabidopsis thaliana landsberg
gtttggggagaacatgcaatggaatttaaaccggagagatggatttctgagagtgtgaagttcggtacatgagccatcttataagttcctatcgttgaacgccggtccaagaacttgtttggggaaagaagtggctatgacgcaaatgaagacagtggctgtgaaaatcatacaaaattatgacattaatgtcgttgaagggcacaagatcaagccagctccttcggttattctccacatgaagcatggtcttaaagtcactgtctctaaaagatgtttgtcttgaatgttttaactagaatgtagaaactgtggcagttgacgaagatgatttctatgatatgaagacatctcaaatcatgcatcctgaaatataatgttattgttaaacataatttctaaaatttaagtaaaatatataaatgttggtaagaaaattaataatttcctttttattttaagtgtagagttaaatcctatactcaagttataaatacaaattagccgaaaacattaatgttttttgcacgttatatagatcttcttttttttttgtgtgtgtgtggaaatgcacgttatatagatcatgttgaaaattttagaaagataaaaaaagctgactaatgatatctt

SEQ ID NO: 5318 - DNA, 1343 bp, Arabidopsis thaliana landsberg
gacttttcttatttgcttacacttgacttgtggaattcttgaaacttttgaatggcggctctacgagaattttttttattttctcagtgtctactgacgtttaatcagaagtcaacaaagatacaagaatccaagctcctggagtatacgtttttggtattttaaggagtctttttacaaggcactgttcaagtcactacattggttatttgttatgtcagtggcttccaagtaagtgggtattatttttgttcacttgtttctttttttttgttcaaagctctggttttccaaggatgctttagcctatttgcctctctgctatcgatgtttgctcttgttttttggtgattcaaatgcattgcaaaatgacaaagcagagtattgcatttgcatctttaagttatgggtatctccggtatatagaagtaaaaaagatccgaactattggtatcttatgtacaaaacttatcagttacttatgattgactagagatacacgtttttatatctatgctcaaactgtacaaagatacattggctttacactggaaatatgttttgatcatacactatgtatgtttgtgtgaccttcctcagcaggtagtagatgaggatctcctacaggacttgtgtggctagtcttcaacttcttttcgtcgaggtagtgctgatagacaaatgaaatgaatccccagatagctaaaatgatggagaagatctttgacgcgttcattttatcatggaaaacaatcactgctacaactggaactataggcaatcccacagcagttatggaattggagaacacagaagatgactcaaagatcagtcccacgacgccaatggtgtagacttgccaggaaatagctatcgaggccaaagtcataacgtatggcactttccccagtttgtagttttccatctcacttgttaaagttttccactccccgcttgcgaaaagtcctatgagaaccacacagcttgcaactagagattggtaagcgaccaagtcagtgaccgttgagaatgtttgcttctttaaaaccttcctgaggatcagttgtaccagggatagcagcaatccaatcccagcagaagcaccaatggtacatattatccctatcacatattttactctagacacttttgctgtgttttccgaatcagtgttgaccacgaggagggcagaggaaatagtaaggagaaacagagaattcacaatgaaaggtgtgaacttctgcgagtttagaaaatatgagaagaaggcagtgaaggccaaatgtaaggccaagatgagggagaaagtagaaactggtaagtatagtaaggcaacagaggac

SEQ ID NO: 5319 - DNA, 1196 bp, Arabidopsis thaliana landsberg
ctctagacctgaagatcgacctgatatgaacgagattcttacacatctgatgaaacttagaggcaaagcgaattcatttcgagaagatcgtaacgaggatcgagaagtttagcagcaaagcttttttgatgacaatttttcgactttgccaaactctgttacgaaggttgaatactttggacgtaaaacgttctgattttgcttttcgttatgtatttctgtttttatgtaaggttgaaatttggttttgatgaactttttcatatacaaatgcattaggctacacatggatactatagtttcttattgcaggcagatcaggaataaggttcgtcaagtttttgtcatcatgatggagatgacgtttgtcccttccatttaatcatgaaacaataccactgctagtatcggacaataggcaatctcacgacggttatcgagaacacagaagatgactcaaagatcaatgccacacaagacaattgtgtagacttgccaagtaatagctgtgaaaactagagtcattacattttcatctccccgggtaatgttttccattctcggctagcgaaccgcagaaattgcaagactagactgatagaaaaccatgtcagtgactgttgagaatgaattcttctttaaaactttgcaatttcatataattctttaacatcactatacatttttggacgaactacatattgtttgcttaatccttacaaaacaaaatctaaagaatatagcacaaaaaattgaaaactttaaatcggagacaattacttcgcttttgtatggcaatagagaaaagtagttgagcgatgttggtctatgcggttcttggttctgcctttggtgaacgtcctttgaagctgaatgtgcacaagaaaatgatcaacaaaactaacttgtctttttacttattttcctttgctttgatgcgaccacaatgaagaaacacaaagaacaaacacttgtttttgcctgtaaatgacagaaatcaacaaagttttcgttagattttttatgagtggatggccaatgagaatgatttggggactcacggtttctaacgatgaatctgaagaagaacgaatgagaagcaatagagtggaagagcgatggcaatcccagctatgaagttagagaagagtcgcttgttgtcttttgtgggtacgaaaaccgtcttgagtgtgttg

SEQ ID NO: 5320 - DNA, 1079 bp, Arabidopsis thaliana landsberg
aaagttctaaatacctgaaatatgagcgacatacatatcccatttgcatggaccatttttgatattacacatacaagctttatataggttatttacatgactgtgtacaactatgtatgtttgtttctgagaccttcgatacaactatgtttcataaagtttgtgtttcttcctcaacaggttttgtctggcaagtcttcaacttcttttcgtcgaggtagtgctgatagacaaatgaaaggaagccccagatagctaaaatgatggagaaaatctttgatgcatccatcttatcatggaaaactatcactgctacaactggaactataggcagtcccacagcagttatggaattggagaacacagaagatgactcgaagattaatcccacacaaccaacagtgtatacttgccaggaaatagctgctgaggccaaagtcaagatatatgacactttccccagtttgtagtttctcatctcacttggcagagttctccactctccacttgcaaacagtcctatgagtaccacacaagttgcaactagagactggtaattggccaagtccaggactgctgaggatgtatgcttcgtgaaaactttcctgaagagcagttgtatcagagatagtaccaatccaatcccagcggaagcaccaatggtacagatgaacccaatcacatattgtactctagatacatttgttgtgttttctgaatcagtgttgaccacgaggagggcagaggaaaccgtaaggagaaacaaagaattgactatcaaaggagtgaacctttgcgagttaaggaaatatgagaaaaaggcagtgaaggccaactgtgaggccaagatgagggagaaagtagagactggtaagtaaagcaacccaactgcagacaaataagcataagcagacactagcagtccagtgcacaagtaaaccgatgcaagggtggtgaaggaaggtgactgactgaaatttgtatctgttgatttgggttgcctgattcgagaaaagaagcggaagagaatcagtacagggaagccaatgagttgaagaagtgttaccacatatgtcttt

SEQ ID NO: 5321 - DNA, 4027 bp, Arabidopsis thaliana landsberg
  unsure (1)..(4027): unsure at all n locations
gttgcgaaaaggaagaaaagaagactcatcccgagctggaccaccaagcttctcagaattgtcccatatctcattcaagtctcctactacaaaccatggctcattccttgtcaaaccaatattaattaaattatccctcacttcttgtcttgaattccaaactgggtctccatatacaaacgatgcaaaaaaccataaggacccgagcttgattttggtatcaatgattctcttgtctgaatctaacacttctacttcatatgacgctttccagagaagtgctaaacctccactcaaaccttcagggtccacaatatgggcattatcatatcccatccaccccttaacattcaaaacattattactggagtttttcgtctccaggagaaacagaatatccgggaaatgatcacgtctcatctcccttagtataggaattgtcagcgagctcctcaatccctgatcattccagctcattatactcataactgctttggcggttcctcatgcggaaccacctctgtttctgatcgcttagcaatctttggtgatgataatccttcctccacagctttcctcttcaacggtgtcacttcgtcccctaccggctttgttttttctctgtaaaccaatgttgttttacgctccccttgagccagcttagcagcctgagccttcctctggtgttgactaggcctacgacgatatttcttcgtgatcacacttgtcccggatgaactagcatggccgctagtttgaaaccccgtagaacaaggaccgaaattgatgtgatttgtgtctgtcgctggcttagcaatgtccaaatgaccattttttattgagaggttaccagctgtaatagcagaacttaacagcttctctccagtgacacttgtgttgttgttcttccttgtatcaaaatcaaaaaccaggcctttgcctttgttaatttctgtggtgatttctgttgcaggttccaaacgcaatatcgttttttggctcttaggatctccttctaaatcccacacagatcttcgcactctatcaatgcgagcttgtttctcagtagcatctgacaccgatagatagcttctcatctcgtccaacacgtcttttgaaatttttggtcttcccgtggcagcatcaatacccacatcttcattagttagaactccaaaaagtggatcatcaggacttatttgtggtattgtacgtccggatacgattgtagccagcttcatcctccccgtagcattaggttgccggttctgaggattcagcggacaccgtgtcctatcatgagtaagacgctgacattgaaaacacctttttcgcacacgttcatactcaacgccaatcgtcaccatctcaccagtaggcagttccacctccttcgaattccacaagggtttattgatctcaaacagaatcttaactcttacaaaacccttactttnnnnnnnnnnnnnnnnnaaagcaacagtgacaacttgcccaatactctcaccaatttcttcaaaggtgtccgctgtgtaaaagttcaccggaatatgacgtaaccgaatccacagaggaaggatttaaacatttatgtttaatatttttaaaaattattaaatagcttgctgacatggcatttggagagagcatctaaaaaaatctgatgggaacacactgagaaagcctcaatgagctttcgaattgccctctccaaagctggatgtgggttgggtgattcaacaaaatcgagaagaggagcatgaagaatttttcaaagaagattggttattcatatactcatttacttaaatatttcttctgtttggtcttcatatgcaagtagaaagaaatcagccgctaaacttccaagagttagatcagtcctatggagttgcagttgaaaatattatgttgtggccgcgaaagtaattcgtatgcatcataaataaatttgatcttacaagagtgtatggccaacaacaaacaaacaaataaaagagattcttattgggagatactcaatacacgcactctggtaaacacagagcgacagaaacagggaatgtaaaaaccaacgattgtacatgaggagcgatgaagaaaaccagactcaagatttcacatttgtttatgtgtttttgactcaccaccagaatcagaacatgtagacgacactgtcgtggatcctggacttctggttctgtgcaacacattcagatatccacataaggttcctgatctcctgctctcttaacctcatatacgcaaagaataccgcgtaatggaactgcaaaactcaggtttgaacaaccattgttagtataatacatgaattgagagaagcataacacaatcagactctctaatgtattagtccagaagttatcattgaagcaactaaaaccgaaggttatcattaaagcctagattttgtggactttggaaagttctttgcggttcatttggggagaggaaaacaaacctgctgctcaaaggctaagcaaagccttctgacttcttcttcataaaatgctttgtcgagcatctggctctctccataagacatcttcgagaatatagcttgatacggaggatatttctccataacaccacgaacctaccagtgaatgataacggaattaaatgagcaaaattcgtaaactcaatatatttaatatattagcttgagatttacctggtctatatcctcgcagatagcaagctcttcgtgaccatatggatagctgcagaagaaaaaaatccaaaccatggtgagaactgagaaatataaacatctagtggaatatatcatttgactgtagaatgcttcttacagtagaccaaagttagagtacagtttctttctgtcttctcttgtgagctcagtgccaatgctgcatagcaaagaaaaccaatttcagaaacaaagcttatgatggtaacatcagctggttgatattgatattcactacctttgttgttttatggaacaaaacagtaagtaattacctgttgatagtgatattcactgctcttctatcggcctcaaaggccaaaaggtcagacataatctccgctgttgcgccaccaagtttctatttcggattgaacagcaaaaaacaaaaaaaaatggggttagctagtataggtagattctaaattcctggaaaatagattgagaagtcaactaagcacctgacagaacttgtaaaaatcctcaaggtatgctttgtagagggtgttcctcataatctctatgttcatgtcatcgagatcctacacataatatgatatgcatgtgatactacaatcatagcagaaactataaaacaaactgcacatgattgattaaaagtaaaaactagaataataaatccttgagctttgtacctctgacgttaagcattcagaaaagtatggagccaaaggagtatccacaagcaccaaccggtagagttcccgcatgttctgagcaactgctagtgtagcaatactggaaaaaaatgagagagcgagcatgataaaaacttaaaagtgaacaagaaaagatgaggtataaaagatggaaaaggttgatgcgggctacctgtcaaacatgcctaaagggtgacatttctcaatcaactcttgaacatctctctcatgcagggttccagtaacaatgagcacgacattgtcaatcatgtggccatatctgcattacaatatcaaaaaaacaaacccaatgcgtcatatatttgacagactgtatactaaacgacacccagggaagaaaaaaagaagctaacaatctcagcacaatatctgctctgttctagtttgatctcggtaaaggtggaaacttcaggaaagtaacaaatcttacactaggatggatagcaaccttaactctagaaactaataacaagggctacaaagaaaaaaactataacagcatccaccattgatctagactcatgattttagtaatggggagagcaagaaataagtatctcacacattacctgatgtactctaaaaaggtaga

SEQ ID NO: 5322 - DNA, 1156 bp, Arabidopsis thaliana landsberg
gaattcgatgtgaattttgagtcttgtaacaaaatgtgtttgtgatctgaatctgatgttagacgacaaattgattccttgagtctcaggttctagtttttgcatctgaatcgttgttttgtaacgcagaaccatcacctctgcataccactacaattgtggagaagtgtacgctcaagctagttgatgactacaagcatatgctttgccaagctactgagccaatgtctacctttttagagtacatcaggtaatgtttagctctgtctcagtgtacatcattattagtgtaagattttttgctctcctcaagtcacaccattagttacctagatcacagagcaactattcatttcactatgttgagggaaagattatggtaattctgaaatgctagcttagattgtgtccttgttttcctcctggaataatttagtatacgatctatctgtcatttgatgtattgggtttgtatgcagatatggtcatatgattgacaatgtcgtgctcattgttactggaacccttcacgagagagatgttcaagagttgatcgagaaatgtcaccctttaggcatgtttgacaggtagcccgcatcgagcttttgcatcttctattatacctcctcatcccttagctgtttcataacccttttctcgttttcccacttttatgcttttctcatgctctctcactttttccagtattgctacactagctgttgctcagaacatgcgggaactctataggttggtgcttgtggacactcctctggctccatacttttctgaatgcctaacatcagaggtacaaagctcatggattttttatactagtttttgtttcaaattaatattatgcaatttcttttctagtttctgctatgattgtagtatcacatgcatatcatattatgtgtaggatctcgatgacatgaacatagagattatgaggaacacctctacaaagcataccttgaggatttttacaagttctgtcaggtgcttagttgacttctcaatctattttccaggaatttagaatctacctatactagctaaccccatttttttttgttttttgctgttcaatccgaaatagaaacttggtggcgcaacagcggagattatgtctgaccttttggcctttgaggcc

SEQ ID NO: 5323 - DNA, 2348 bp, Arabidopsis thaliana landsberg
tagttctagaaagagaaaatatattaataaaaaatatatagcttttttgaatagtgaagaaactcttttcaaagtttcttatataaggtattttggcactttagaaagaatttcttcaatatttaagaaaaccacacattttttattaatatattttctatctctaaattaagaaacttatgtttggaaactaccaatggggttgctcttagaccatccccattgaacaaatttagagggtgtcttcaaattttaacagaataaaaaaatagacaaatgagaattaatgcactgaacaggagagacacggtgactttaatgtctgtgagaagacattttttgatattggaagacacgaatgtgtcaccatgctattggttggtgctactgttttctatttttttccttcatttggccagcaaatttctctctcttcattttgccaacaaatttttctctctttatttgaccaataaattatagttaagacattcaatataaattaatatcaccgatgtggatgctcttagaagttcctggatatctatcatacgtgtcacacactcttctatgtgatggtatttctcataagataaagtcacacaacatgttcctcctcgatgatcttcccttttatggccagtcaacacgttttccctatatccttcaacgtgaggatcagttggacatgcgttatctctagtttgagttggcaaatatttggactagcttgtcctttggtgtttccatttccccaccttctagactagcatggtccgctatgtccaaatttaagtgaaaacttcaatttaccttccacttgggtcgggcccgtcctattctctccccgtttagaaaagaatatcttacgttttgtttagggaaatgtttaagataagtgaacgtacacaaaagttttcatttatagtttcgtaggaatatgctaagactcacgtagatatgactgtcactaatcatcccaagaaatatatacatccaaattgaacgttaaattaaaggcgaacaaaagtgttcctcgttataataagtcacggcttaacccattccttcgacaacatctttttttttccggctataaacgtctccaccgttgacctaaactcatcactgctcagatcatccatatcgcacaaccgtctcatactccggcgtaaatctccccgcacgtcaatcctctccgatttcgaccttctgtaaacctgatgatcagtagcagtactctcagtagtagctggaggcagaaaagtcatttcttgcttcctccttatagcatgagctgtctcacccacagaactgaccgcccgaaccatctctcgcctcaacggtcgagcctctccgacggttagactaacggaggtaagttccgtacccggcattccttctgaagtcttttcttcgctatcagatgccaaagattgtgatactacggcggaggaggaggaaacgtattgaaaatacagatcgtgttcggttagcttctggtggttagataaagagaagatcagggcaacgagaacgttcacgacgccaaatatgtatattccggcgccggtcataccactggaaataatacgccggagatactcaccggcgaagaaagttgacgttaaccaatagagtagaagtaacacggcaactagagcttcaactgccggaagaaagttcaaaaaatttctcgtaccctcgaacctcctcatggcgtcaactttctcagccgcaacatccattttctaagctctcttgcaactccggcttagattttccgaggaaataaagtgttttaaaataaagtggatggtcacttagacttgtcgatctaataatcacttggttgatgattttataaagagatataaggactctataattggttcaataattgaaacaaactggatatatcgtatttctttatagttcggtcgtggaattttcatgactaaaaagcattaggtgaataagtccaattcctgaaaaaaaagaatacaaaataaactcattagatgaacaattgatcatagaattattggggacaatttgaataaagaagtattataataatgtagaagaatggttggaaagagttggcgaggagagagtgagggcaggtgaagctgcactgcacagcaacgaccgggccaatataatgcacggttgggcgacgtacaccgccggacgaaactgacacgtgtaccctttgttctttcttcttttttgaacccctcaattactacattcattgtaatgttttcggaataatagaggatatatgtatttttgctctaaatagtagagtatgagtgactagattcactatatgataactggag

SEQ ID NO: 5324 - DNA, 2079 bp, Arabidopsis thaliana landsberg
accaatcatccttcttctttaggtttacaaacgtcctcccaagctactttttccttttgcggattcatatcagtatccgaccagagaaaactagagcaaagtttttcaacttttagaatgcattctcgtggtaaccgaaaagctgacaaccagaaagtacataaactccaaatgatagagctgatcaattttaacctacctgcaaaggagagaaaacgtgatgtccacgatccattgcgcttctgaatctgctcaaaaggtaagtggtttgcgatcacctgatgagcattatgagataaaccagccaagtacattgttcattactatatattatgtaacataacataagatctatataagaattgtgtttatggttgattgcaagatgaactcgaatgtacgatatgacattgcgatgaacagcttcattatagtcctcaacattgcagcgatcttgtatatgaaattttaacaagatctccttaaacgaagttgctgaagcttgggaagttggattatcggaatcacggatgtgcgagatcgtgaaatagcttacgtctttgaacgcatttgtcataactttggcttcgttattttcctctacctcctttcttgtatctctacccgcttggctctattcgttggtctacactttggtctaccttattggctacggtacgtagctgccatgattggatcgtctctactagaagcaatggaggcagtacgagattgatggaaatttgtgaatcaacctcaatcaattgctgttaaataattttcattgaatttgaaagaattcgatcaattttaacgcctaagtcggagatataagttttaagttttttaggcttttctttttttcctttttccttaataattgatttattttaatcaataaataaacaaatattaataaagttttgctttttatcaaaaaaaaagttgcatgttcaaaggtgttaaacaacggttatcagattaactacactattaattttactaatatagcgcgcataaaagtatgagattgataaagtgtcgctagcgacaaatgaagctttaacccggtccctttcggatggagagattaaaaaagcacttttcgcgataaatcctgaaaaaaccccggtctgacgggatgtcaagttttttttatcaaaaattttggaatatcctagggaacgatctcatcaaaacagttaaagacttctttgaaacaggaacttttgatcccaggttgaaccaaaccaacatttgcctcatcccaaaaagtgagagaccaagagatatgaaggagttcagaccaataagtctttgtaatgtaagttataaagtcatctctaaagtgctttgtaaccgcttcaagaaggtactcccgcatctgatctcggagacccaatcggcctttgttgctagacgtcttatcacagataatatcctcctagctcaagaaaacttccacgcccttcgtactaacaaaagctgcaaatccaaatttgtggctatcaagacaaacatgagtaaagcctacgaccgagtagagtggagctttctcaaatctttaatggcaaaattgggatttgatgataggtggatttcatggattatgtattgtatatcctcggtctcttatcaggtcttgattaatggggaagcaaaaggtcaaatcctgccaacaagaggaatccgccaaggagatccgctcttccccttcctcttcattatctgcacggaagcgttgatagctcaaatcaacggagcggaaatcgagggacgattcaccggcatgaaaattgcacaaggtagccctacgatttctcaccttctttatgcagatgatagccttttcttttgtaaagccgatatcccgcaatgtgcggagcttcttaggataattaacacatacggacttgcttctggtcagcaattaaaccgagaaaaatctgctgtttttttttgaagagggatacaccagaattaaaaacatgctctgaacaagccataggtatcaataaagaaggaggtatgggtatgtatctaggcctactggagaagatttgtggatcaaaataagag

SEQ ID NO: 5325 - DNA, 4423 bp, Arabidopsis thaliana landsberg
  unsure (1)..(4423): unsure at all n locations
gaaagcaatgtccttgacatggtagtaagtgtgatggtttcccttaatcttcttctttggttctcggggaaatatacctttgacaatacatagtctcctgaaatacataatcggcaggtacaataataacaaattagtcacctactgataaccagagaatttctaagtaaaaacctagctaggaacataacacaatctcgatatcaattctaagataaattgacaaaacacgaagcatctgaaaaaaacctagtgcacacatatgcttgtccgaacaataactcgaagaaaaacagtgaaaagttgaaggataaagaagaaagagagtgaacctgaatagattcaagttaacttgaagatgtttaagagcttgcgacctggtcatatacctagccgcatttccttccttctttttcccctacaaatgacaaacataaccaaattcatctcagaaacaagaaagaaccagctccaaagtttttcgagcaaagggaaagacgaaaatagattacaacagttgttgaacaacgaatattggggagaatagagcttcaatcaaagagaaacactcaccgttggtcnnnnnnnnnnnnnnnnnnnnnnnacgccaccagagaaggaacgagagacgcggagaggaaaaagagagacagagaattagggttttagccaaaacgatttgttaaaagtttgggtacatgaggacgatataatgggcttcttatgacctatttgacttcttctcaggtttattataccatgggcttttaaggcccaatatgctcattgttgtttgttcttctgggttttttattaggatcatggttcgtgaaatcttttccagtttacgtgaacattgatgtatgtattcatccatatcttttttacgtaaaataagagtaaatagtcattaaagaaaacatattgtaaccatctagactcaaattcataaactctaaatttgattaacatactactgcttccaaatttttctaattgtcaacattaaaaaacgatacacaagtgcataatggaaacatatatgtcgtcactgttgttgatcggtaggaggatcggcgggggctggtgattcaccgtcgtttgggatccagaatgtgagaaccgtagaagcagcaacgaacatggctctacgtggtgcccatttcagacacgacactactcctatgttgttctcccacctcgccacctgctttttacacaaaatccccactaaaatttaaatactgtgaaagcataacgcaaaaatagtatctacaactttataaattattcatcacttttaagtgaatcagtgtcctagtggtgttgattattctgcactttacctcagatgggttctcgatgttccacgcatgtaaggttccatcacctgaacctgtatccgaaaaagaaaactaagctgattaaatttgaatattgtgtagatgagtcatgataaaagatcatctaggaacgcgtattacctgacagaacatacttgccatctggtgtgaaggtggcctctatgggtgtaccctgtgaaggctccaaactaaaaccacatttctgcaaaataacataccgtcttttaccaacttgaaacctaacgttctgtcttcttcaggtgaaagatagagaacgtgattaccttctctccacaatatgcatcaagaacgtagatattgttatttgtagtcgttaggagcatggatttcccatcgttgctgaattttatatcgttaacctcagcagtatccccacccaccagaaatgtgtcaaagggaccctacataagagatcaattgggtttagaagttagaactaacaagagcagtcatgcgtaaggctgtgtgaatcattgtaagaagctaaccttgtcataacacctggaatcaaataatttaacagcacctccttccattgcaattgcaaacacaaggccttgttggtcatacgcaactgcaggtctaccacgtagatgtagaattccctattgactaaaagggtaagcatagatcatgaaaccatataaattcacagagagagtattaaggtaaagagcctaaatattctcaatgtttcgtggttccagcatcttcatcaagtttaactttcaaggtgatatatcacgaggtttttgctaacaaaaagaaaaaggcacttttctcattaaaactctagcatattaagacttattccatctagccttctcagagtgtaaaactatagaaannnnnnnnnnnnnnnnnnnnnnnaagatcccagagtctaacacttcggtcgagagaaccagacatgaagctatcatttataggagacatacaaagtgatacaaccctgaaacagaagaacattttccatcatcaatgtacatactagtaaaatccaaattcacaattccagaggttataagcagacctgtctttatgccctttaaagtagcgtaggatccgattatcatacattgagagatatctcaaggattctggtacacaaaaacaagtatacaagtaagtaataatccaccaccgctttgattatccaatctcaagcaagagaaaaggaggactcaccaccagtggactccaaattgtatcgagaagagcaaattagagagctaggatgatgggtaaagcatacacgatcggtgccatgtttcttatggtatgtaatcttcagctgtctaacaaacatccatacaaattgaatatttcagtcttctttttgctccacaagaatttcaactaatcggttaatcaaaaagcttcttcttgattccttaagtaacctagtttctctagaacttgaccagataagtataaaacctaaaaacaggaaggaagaactgacttagcgttggcgatatcgaagaggcgaagtgaatcatcttcgctggatgtgaccaatagatcatcagtcctatggaaacccaccgaatgtatcttccctgcctgtgtaaaaccaacaccgagaaattgaacggattaatctcggaagctggattccaccaaagtttaatccgaaatcaaatgagattacaaaaagagaaaaattcgttcgtacaaaatcagagaagactgcgcccatggccatgctgcgaaccagtccgtcgtatagctccgtcaacgacatcgtcaagctggattatcagtgaagcacgagaaaaatccgaggacgagagagagagaggggcaagggaacgagagagagaactaaagagtttagtgggtttcgcgggttactaaacgccgccgtttagttttaagaattgggataacaaaagaaaaacatcttgtcgttcagttctagtcataaaaactacatgtcgttttggattaggaaagagagcctgtacactgcgactttgttacactcactggtctgtgattttctaagagtcaaataggcaaatgaatgaaacacagaaaaaaataaatgatcgaagcttcaagtttcaaacatacatggaaagctttgaaaaaatattgaagtcacaaatgaaacaccaaggtaatccaaaagatatgttcgaggaaatctgacatgagagataaaagactatacaatgtcagccaaaccggaattagagacaacacagctaacgaccaccaaaccaacctcttggcggttgctgctgctgctgctgcatcatagctcctctatctccattcatcagcttatctaaaacaacattgaggtcaacagcttgaccgttctctgtcaatgttctcactgttcctctcacttggtcccttgggaaccccatgctaaccactttgtcaatgacatcatcgactggggctctgtttcctgatcttggggaatctgagccaccaccacttccaccgctgctgatggctgatgccattggtaaaccttgtggtagtgggcgtgccattgggagctgtgggtaggcaccagatccacttccactctgatgtgtgggtttcacagatggggtgtttccatactgtgaaggtggcccggtatacgggtatgattcaggagaatatccggaaggaaaacctgaattggatctgccgcctggtccatcatacattgatggtggcgttggaggagcgttgtagtactgttgagatggggcagaacctggaggtggatgagaaggtggttgacgaggagggtttggcgggtaagattgctgagggtaaggtggttcctccgggttgtagcctgacgggtgttggagctgaggaggcggttgttgcgggtattgtggctgttgaggaggtggctggtaagggggttgatgcaatgactgggttggtggaggaggttgataaggaggctggattgttggaggtggctgggactgaccagacggagggaaataaggctcttgttggggagagaactggttaggaagctgaggcagttgtaatgaaggtggtgagagaccgtg

SEQ ID NO: 5326 - DNA, 617 bp, Arabidopsis thaliana landsberg
ttctagcttacaacagacatgctgtgtagtgttcctatggtaaaaatgatatctaaaccatagcatgtgaaatatagaatatgttttcttttaaattataaaacactataaacttttgattcaacacatctttactttgtttctcatcttatttagttcgtgggctttgttttaaacataacttgggcttaagtattttttattttttatttatctttttagaccatccccatcggacaaatttagagggtatcttcaaattttaacagaataaaaaaatagaaaaatgagaattaatgcgcttaacaggagagacacggtggctttgatgtctgtggaaagatattttttgatactggaagacacaaatatgtcaccatgttattggttggggctattggtttttatttttttcttttatttggccaacaaatttatttctcttcattttgccaacaaatttctctctcttcatttggccaataaactatagttaagacatctaaatgctcttagggtttattccttcttgtaattccttgtttaaacacttcttgtagtagttcttaggaacacagtttattattgagtaaaaaacagagttttttttttgtctc

SEQ ID NO: 5327 - DNA, 4746 bp, Arabidopsis thaliana landsberg
caactttccctacttttttttcaatcgctcttttcacaacctatatgacagagaattaactggttggaccatgagaagttgtgattaaacgcagcgaacagaggcggccacagacattcacatgcctttcatcaaaggactgccttgagaaggcaacgacatagctggtgaagacgacacaagtctggcaagcacactcagagaaacggcagaactgagatgcaaaacagacgcaggaggtgcagcctttgcaactaggtgaacgtgtgcaccctctggacaccttgctgctccctctctcttcttcctcctcacatgttatcctacgaccaccacaccattcattgatataatacatcatttgcatcaaacttaagtacatacaaggacaacaaaagacacctacttgtcgtatgggaaatctgagcatttccagtttggatcacccattgcattgtggtgcaagcggcattcgtctctgctcctcagcctgaacctcctctctttaccacaatcgttacacccaacaaactcatctctatggcaaactttggcaccttgtgatctgtttgatctactgcacttctttgatgattcattgtagtacttgagcaatactgtctttgacaatggaaccttttcgcccccaatgataacccacacattgtttttccacttccttgccgtttctcttccagaatgcttctcgaatgcagctggtgtcaacttgtctaccatcatacaatcaaaactgttcaagtcagtcacttttactttcaaagagagctctaaatgagcatctataccaaataagctagagatggaattgttagctacaagataccacaagaactaggttgcatcaaactttgacatacacgtacagctaagcgagacatatcatttgtcaataaagctaccacttggccagtaacaaagagacgcattaccatttacagataaacagacagcctaaaacattactgtggcaaatcaagtcatttcattttctacaagaacggatctagctagcatacactaagactcattgataaatatgtaatcatgctaaagaccctagctttaccagcccaatgtgatagtagctagacagagacaaacgtttaatctcacacacattcacatgtaacatgcacacaaatcaaaacccattttcccaaaagcatcagaaagacacgagaaagagacagtagagacaaaaaaagagagaccttcatcgcaaccaggtgtgcattcgcaggtgatttcaaggtcaccggtggggaaaaccctaagtctagcaacagcatcgccgtatcggtgactggtacaaccacacatgacctcaacgtaatcgccaccaacattgaccccactcatctcttgtagctcctcttgcttaaacaacatggacccacattgcatctctccctcattgttcgccatcactctctctctgagattttctccttatagcgtatgaggagaatgagaagagagagagaaggaagaggaagaggaagagggtagaattaggagatgagagaagaaggaaaggcctcgttttggggtataaaaggaaagccctaaaggagcacgcatctcaaaagccgtaagagagatctgatatcaaagcaaaagcttattaagggcttttcgggagaagagaagagagagaaataaattagaaagagagctcttttagtttagcctctctttggccttcttgtggtcttgtggttatagtaagtaacaaagaaactctcttatacaaacaaaacaaaaaggatgcgaattagctggccaacaaaacaaaactcgtgggggcatgggacctctccattatattaatgtttatatacaactatgttatagtatgtatcacctacataacattgtattgtatatagggaagagagagagaatttctatggttgataagaggagcaggaacagaggcggtgggtgagaggcttttgataagacataagagagaagaagttgaggaatagggttgtgtcaattgtttcaggttcctctttggttttataatgtcataactcctttttctatttcttgtacttacttcttttcaagaagttcttgattttgtaattttcaaaggtcctttttttttcctttgaggttctgcaaattcttggctcttccctttcaccaggattcattggttaccgagtcatttcaccaccacacctattggctatttttttatataaaataaaagttgaagaaatatataaaggttggtttgtttaattgttaaaagaaaaggtttaatcaactagttgtctataaaacaactagtaaccaagtacatgacgacgacgtcattgacatctatgcctgttaggtattctgcaatgcgctcaaaccccaaagtcatatctctatatttgtagctatatgtgttcgaggaactcatttttttaatacggatgaggatactagtgttgtatgtagaccatatgatttatatatggtatatttgttgttgttgttatcttaagtacatacacaatggatgggttgcaaaacaaaaacaaaaagtacataatggataaatgagaattaaagaaaatgtcgccagtttttttttttgaagaaagtgaaataattatgtcaacatctttacagagacatgaatatgaataagttgtcaacacaatttttgtataacaacatctttactttgaactttaaaaactctctttcctcctagttgttcccaagaaactgaaaaaaagagtagcggatgggagtgaacttatggattcaaaacatttattatgggcttggggtttagaagtttacgagccttggcccctttctgatttctactcaaagttttgtcatgtttttaaacttctcatattttgtttttgtttttaagatggtggttataaatattcgaatatcaagtttgcagcaacgatgttaggttctttccacttcaagttttatttaacacaaaaccaactaaagatgaaaaagtagcttgctcaacgcgttcttattcaacaatgaggtaaatgcaacatagtggatggatgatgagctaaaaaatgatggtcagttcttatcttcaactacatttttgacgaccaaaaggaagatgttggtagtataagtattaagcattttacttactgtcgttacatgtccggtgtccctgtccaaggcaatcggcagttgtgtgttgaaattatcccaacgatgatgggtcgctatctaacgagatatttgtccatccgcataattttcttttgaatattttaaagaaaatcaaacactagcgttttgtctttgaagatatgaatgaatgagacaaatatcagattctttatcaaagtggttaaaacaaaagagcataatcgagcccatagtgaatatgggccaacatgagaaagaggcccattaaagttgacaagtatatgactcgcgactctcgagagagcagagtgagagagagagaggaattagcaaaagtagaaagaaaatgggatgctgcttcagcgccggaaaagtcacagctccaccagtcgccgccgctcaaattcctccacccctcgaagaagaatccgtcaaagaagtcgttgttcaatcagtctctgtctccgtccccatacccatctccgtccctgtcccagtccccgacctcgttccttccgcaccaacagtctcagattcagaagctcaagttcctcttcctctctcacctccagctccggagatctctcacagcaagtccgacatttgcagcgtctctgtctctcacagctactccactgccacaactgctaccgctgcgtccatcctcgaagacgatgctctcagcaaacctcaccgtcctcctcctccttcttcttccacctctcgccgtaacaggcctgacagagtcctcagatctccggcagaacgacattctcctcaggggaagcagctccgtcctaggttagtccgagagagacagtctcgtcaaccaaaccctactcacaaccggcgaaatgtggattcgggtccactcccacggagcgggttatcggataatccgaggcgtcgctcacagtctccagccactcgtgccccgagttctgcaagaagaagccccatgaagaaacgagtaggagctccggagaaagacggagcaacagaggtgaagaagaaggaagaagtaacggagaaagtaactgctgaggtaaagaaggaagaagatgtaacagctgtgagagaccctgaagtgtccatggaatgcttcatctttctctgatgatctcttctcctttcatcattattaactctgatgtgattgattgttttttttctttccctttttttgatttgtaaattgcggaatgtataattattaaccaaatcttatgcggatcttcgtttttggtttgtttattgtggactcgtaaagtaaaaggcaagcctacgcaacaacgctcacaaattccatggctttttattttatggagattgctgctcttttgctatgggataagcagacacaaacagagaaacactgttctgtttaacaacacttgactacataaacacttgtctgataaaaagtcctacttaatgagatgaaagaaggtttcagaaagagcttgatgatgatgagggaggacatggctgagcaatgaacgttgggacatcttctccaggcatcaacaccgatatctctcttttacacacatccatctgcaaataaacaacaca

SEQ ID NO: 5328 - DNA, 2266 bp, Arabidopsis thaliana landsberg
  unsure (1)..(2266): unsure at all n locations
tatacttgagttcctttgtgattatcataagctgtcttacaatttaggatgagtatcaaacatgtcttcctcatttttctaatctgttataagcaatcaatacagagatatgatttgtttactcttagggtcaactatatggtgacttttatggttgtttatcaaaaaatttaattcctgtgatagcttggatcacgctctcaaatgatttcattcttataatcaaggtttagtcattgacttgctgataaatatacatatcagttgcaccaactttgtctcttgagctaattgttgtttctgcctgcaaatggccaactcaattctgttattttcctttgttttggttctcccttttgtctgttcagttcaatttaacatatctcgttttggatcagatgtttctgaaatagcataccaaggagatgcaagagcaaatggggctgttgagcttaccaacattgactacacatgccgtgccggttgggctacttatggtaagcaggttcctttatggaatccaggtaccagtaagccttcggattttagtacgcgtttctccttcagaattgatacccgtaatgttgggtatggtaattacggtcatgggtttgctttctttctagctccagcgagaatccaattgcctcccaactcagctggtggtttcttgggtctattcaatggaaccaataatcagtcttctgctttcccacttgtttatgtcgagttcgacacatttactaatccagaatgggatcctctcgatgtcaaatcccatgtaggaatcaacaacaactctcttgtttcttctaactacacttcttggaatgcaacgtcacacaaccaagatataggccgtgtcctgatattctatgattccgctagaagaaacttgagtgtctcttggacttacgacttaacatctgatcctctggagaattcaagcctatcttacatcattgatctctcaaaggtactgccatcagaagttacaattgggttttctgcgacatctggaggggtcaccgagggaaatagacttctgtcatgggagttcagttcaagcctggagctccgacaaggccagcatagccactgccacgagttccttgccacattgcgaggatatcttttaataaaaatggcatgcgccaaatgattaagatgatcaattacactcttcgtcttaacataactgccaacaaatttatcagaactgccttttaattctcccaagtatctttgaagtggttggcttcggatattttccccggagatacgctttattatcggttccacgatcttagcactggaagcatccaataaggagaggaaaaacatggaaaatccatcatataatgctttctgaaaaccaccaatagcttctgcttttatcgcatattctagcgcacggtatagagaccttaagctgtactgtggcttctgattagcaccatcctgcaagctttcttcagataaccttttagcttctttgtaaaaccaaacaatgttggctactaacttactgtcagatccacgtccacctaaaaatcgtctcacgaatatctccaggtcatcatcacatatgtcatcatccacagcatactctgtaaatctgcttcggaatgagaatggcaagtctcgcttaccagcatctgtggctggattcatacaagcaaacaaacggaaattcaaatgtctgggaatgcccattacatcccctctctcagctaaacaaagtgatcctctcactccttcaagaacaccaatcagcctgcccaatatctctggtggggctaagttcacttcatctagtaaaacccaatgcccctccctgagggcagtcacaaacgcaccttcaacaaaggtaaaaaccattccacctgaatggatctgttgtcgtatcttattcactttcgtcctcagacacgcacagtttttgagctcttcttctggtttcttcctctttctaccagatctagaccttgcttccccaattttaccttccatgcgttcagtaattctaccttcaatgcctttaataatgtccaataacccagtcaaaaatgtatgccacttcttggctctaaaattatcttgcagccatttcataatttttgaatcatcctgggtaccaaaaatgaagaggactcattactcaagcaacatgctaaatcattccataacatatctcngtaggaatgagtgtangaagaaattatgagtgactaagtntaaatgtaagctacctaatcttcaatct

SEQ ID NO: 5329 - DNA, 1056 bp, Arabidopsis thaliana landsberg
  unsure (1)..(1056): unsure at all n locations
ttgcctctgaacctttaccaatcaagatattcccaggatgtggatccgcatgaaagaaaccactcttcagtatcatttggccatatgcttgggacaaactgtgtagtatattgctagaaaacaaaatacattttccaatgcagcattagacaagatccaaatgctttaaaagccgccaatgccattggaaaaagtcaaaaacctatctgagataatggaggagcttacaattttgctgcctctgccattttaccatgaggatttatccctctttttgccatctcatcaccaaggctcaagatcgggattccgttcatgaattccataaccagaaccttcctgtgcgtattatgattattcctctgatcagcactcattagtgaatataaccgaaaattaaagaactttcgaatggaaagagactatgtcgaaaagacaggaaccataattcttgatcagtgaaacaggacaacctaaaaagccttaaaacattattgggataaccagaatgctaatataagaataagtacctggtcaccaaatttggaaacaccctgggaaccagaacaggactctttctattgttatcatatagaaaacgtcggatcttctccattgcattggcctcccttttaaagtcgaattcatacccaatctagtaaatgaaaacaaggactgatagtgnnnnnnnnnnnnnnnnnnnnnnnnnnnnnnnnnncaaaatatagaaagaatgatatatacctgcttctctatttcctttgtcatggagaacaagtcaaatttgatatcagttttctgcatgtataatgcaaatatttgcaagtttctgatatcaaccatcatcaacttctcaacgccaggatgttggacctaaacatgtcgtagcacattcagaaaccaattaaaagtagactaggaagatttcagttttctcctcattattcctcacctttacaacaacatccctcttgtcaccctttactcttgaacggtgtacctagatagaagcaaaaagaaagtgaaatacagtatatattagactttctaaccaaa

SEQ ID NO: 5330 - DNA, 1281 bp, Arabidopsis thaliana landsberg
aactctttgtcttaacttgctgctcaaacaaaatcgccttgtgcttcatcttttctatttcaacatagtattgagtctggaatgtgttttgaatatctctgttcaaacctccaagaaaccttgacatagttgcttctctatcctgggaaatatcagcccgcaacatcaaagtttacatttctttgtagtactcttcgacataacggttcccttgtgtaatattcctcaacttgagatgcagctcacggtggtagtgactagggacgaacctcttcctcataatagctttcattccggaccaagattccaatggaagttcttgcttacgcctccgtgaagtaactagttgatcccaccaactcaaagcatagtcataaaattcggtagcaacaactcttaccctattgatcgcggtgtagagttgaaggttgaaaaccaattcaatcttcttttcccattccaaataagcatctggatcattctttccatggaatggtggaattttaaacttaagacctccaagattgtcttgcaaaagatctctaccttctctagcacgtctatggtgtctcctttgactattgtgagatgaaatgctcctatgcccatagtactgacctgtagcttcatctctttgctcaagcggctcattaactctcctttgttctccaggacgagtctgccccaattctagtttctcatgaaactctcggcgaaaagcattaagtttggtgtccatcattttctcaaaggcttctaccaaaagtttgttgtttcgtttgttgctagtctcttcctccttagattcagccattctttctgcaatagagacaacaaaacaacaccagtaactagttcttttgaaacaaacacgaaatgaccacacgaaatgacccttcagatgccctagaaccctaattacgatagtttcacttgttcggatgctaacaattatcaaaacgttcccaaacattccagaaacaattttacaaaatactacactctgtttcaaacccgtgacagttgatttcgcaattttagcacgcacaaaataattatgaaaattaaatcaaggtgacagacggacatagatctgaagatgaaaagacacaaaatgatagagatagagaactcaactttcagagtgtgctctgataccacatgatgagatcctcccaggactcggcactcttaagttgagcaaaggatagtggtggttgtgaagccgtgatgatggatagatttgataaatcgatggagatcacagaagcttgcggaagg

SEQ ID NO: 5331 - DNA, 2384 bp, Arabidopsis thaliana landsberg
tgcccatagttctgaatctcgcatgattgctaaacatttacgagtacacgggtttttgacttgacaaggtacccgttcacctggcagtcttctgcgcattctcttatgatcagaggagctgaagggtggagcctcagagtttcccttaggacagctcggaggtaaggaaggttaggaacatctgattctttcaccagtcttttacttccaacaacgttattgatctcttctcgtaacttgttgaacgcttgtggatggtttattagttgccccattgcccactgcattgctgctgctgatgtatctgttcccgccatgaaaacatcctagagaagtttcacgcaacacacagttttatcacatcaaaataatcaaattgaaaattggattctgattgcaggtgggaggaaacataccagcaggaaagatttcatgtcattcctcgttatcttcatttcagcagtgggatctctgtaagtttccaacaatatatccaaaatatcctttctggtaccatctttcttctttgcctttgcctcacgttccttcataattctctctacaagcaggtcatatttctccattacagccactaacttcttcccgttcccagaaaagtccattactttcaatggccccaacacatctcctacactgatcttccccgcaagctccaaacttttcttcaccagctcccttatctcttctgcttcattatcagtacctgaacacctggtgctcatcgccatcctgcagattacattgttggtgtattttatgaactggctactcaagtcacaaggcaacccttctctgcaacacttagccacagaatcgaccagcttcagtttctcgctcctcacggatgtcagcgaatttctccagctgtggaacagcaagaagcttagtcatgcacagcttcttcatgaacctccagtaatctccatactgcgcaaggacaaacctggaccctctatacttgaaatactctgcagaaccaaactcaggtctcgaggagaaattaagctcttgctccttgaaaatctctctcgccaccgaagagcttgagaccacaacgcacttagaagcaccgagacgtatctctatgagtgggccatacttgtgagctaaactttggaatgagacaggcaatactttgcctatcaaatgaaggtggccaatgaatggtaaagctggagggctctgtggcagcttcgtagcagccaatgaaccttgctctttcaagaaccatttgaagagagcataaagcatgaaaggaaaagctaaggatgtgatgagaataattagtttagtgtttagttttaaatccattgcaggcaggtattgatacaatttttgaagtatgcttgtatttatatccagacacagacgaatcttgtttattagatgctcattgtaaagaaaacaaaacaacagatgtgaccttttaccaaatataaaatgtgtgacgtaacatatatgaaaattgtttgatgggaattaaaaaaaaaaaaagattagaagtttttattattcgaaggcacttcctagattgtgacaattacagatacacacatacaagaacatctgcaatttctaccaacaaaccaaacttctgtacaactgtttaactacaatatcctgaatcaagaagacatcctcatcatacaaaaagcctaaaagtaaaagggatccaacataaacccgtgaactatctaacagttatctcccatatgatatatcatcagaagatgaatttcttcttcttttttatcattagaaaaatgatagaatctccctactatatatcatcacagagatgattacctctttctagtgaatcaccagaggatgatgaatcatcatcgcatcgacattagcgtcctaactcttttctccctttctgctcttttagcactaggagtgctcttcattttctgaatctcttccatcacaaccttctccactttatcaatagagttgaggagcttcttctgtggagtgagggcatctttttcccctgtgttttctcttgtgatgtcgagcaaaatctgatggactttagcagttgagggtggccaaggacgcttgaatccaatagatggaccgggagtaaccatagaatagtcgtgctcgagatgagcacctgacaacggtactagagaatcaagaaccccaagttgttgtggagttggggtctcaatatctcggccaacaccttctcccatacgagctctccttctctcaatagcctgcatataagagtttgtaaatagccagactaagcaagccttttggtaacaggttatgacttatgatatagttaacaaagaggctaagcaagcctgttacagaagactaatctagcttataagcagcagatt

SEQ ID NO: 5332 - DNA, 2594 bp, Arabidopsis thaliana landsberg
  unsure (1)..(2594): unsure at all n locations
ctctgcatcagtaaaggcgacctggaaactctcccattctgaatcactttcagaccaaaaatcatccagaacaagtaaaaatctcttcccctttagtgttttttttagctgaatttgaagtgaaggtagatcctcagtattaactgcacttgaagtgatatcctgcagaactgcttttgtaaccgtaaagacattaaagtttatcccagcagagatccacattttaacctcaaaatgttcggtcaccctgtagacattaaaaactatctctgtcaaggtagtctttccaacccctggcataccaactacggagataacagctggtttcccaatgcttatttcatcatcagaaagcagcaaattgactaacgctagcttatcttccactcgcccgaccaatctgccttgtggaagatcatcaggtcttgaccgggatgcttgcctccattgtggttctcgagtctcgctatattctttcaatccaataacttcaatgtgtttcacatgatgttccagtagtctaactactttttccatctttggttctatctttttctgaatggcttctcgaccagccatgagattctggaatagtcctcctaagcctcctgcttcagctactactcttcttctcaaagcttctgtttgcaactcatcaaggatatcctctgcctggaagaaagcatctttgattcctgtaagccaatgtttaacttcccgaacatgttctgctctctgatcagcatccgcaagcaccgggtttgcagtcaccaaagcaaccttcaatctcttcagcaatgcactggaggactttcctttacatagttcgaccaattcttgagaagtattaatccgttcaaccatcacgtttgcacaacttgataaataggagttcgccatgttttccctcgtaacttgttggagccaaggagatgcaacaagtcacacaggaaaaacccaatccaattattggaataagcaagcagaaaatggttttttgacttgctgttctttatgcaatttgtcagctggcctgcagcaaatgatgataatgtcaagtttcttgagattctcttcttccatttgattatgatattcataagtttgcagacatttttcctaaaactactatttacattttctaaaagtgtaattacattgttttttgcagtgaccatggagcattcaacgagtcacatttaagaaaaagtagacaaactaagggggaagtaaggtgaatctgacctgttttttattttatttttctgctctgttttatgtttactctatctcgcttgtgttgtcttcttccttacccctgtttcacacatttgttaaaagaagaatttttctttcttcttcgtcttccttgtcctcttattatgttctgcgttgtgtctaaactttagaacctttgtgcagcatttagatcagacgaggaagccaaaaagggtttggctgcataatattgcgatcttctatgttcctaagaaggtccaggggaagaaatggtcctgccaatctctcggttcgaccaataagtaccacatgacgtgagttttcttatatatcacaccatcctttttttcttttctatcttctctaaattatctatattatctgtaaaaaagatttgacagatggtgttgaattcaccacaattctgcattccaatgaaaaaagaaattttgaattagaattatgtttccctatttacaaggtttgttgatttgttccttaaatttacgtctaatctgggtccacccccaccaccataaccactcccaccacatgcactgatctttccaattccagtcctgcacttcaaataacagcaaagcagaggatgctagctaaaatcaatttaccaagaatctaagaagacaaaaggctcactaccaaccttttaaaataagcaaagaaaatgagttgtttcatgtgtatcatacaacagcagacaacacattttggagagatatgagcaagatctaaattctntcgaaatatatattgtcataaataagattcatgcttaatcacatacttccaattgagaacagaaactcacatttctagaatattattatgaaacgaaagtgcaattttgtatcatttctagaaactcaacttgtcctaaggtaagattatgatcttaagaaaatatcaggaccaagcaagtactgtaaattttgcactccctgctgactataagtaatttaaaatatatgcatttaatctaattaacagctagtgaaagagagcatagaaacgaaagttgattacatcttgtatgccttgatgtagatgctgccaccagatccaccaccgcctttggctcctccatagcctccgtttgccaaaaggcttccgttaacatccagaagctgcagaatatccatcttcactttcccacctcctcctcctccataatcaatctctctactagttgaccctcctttactaccatagctccacggcttctgcagagtcgaccaagagtatgcatcacctccccacacatcttcaggtagcttcatagtgtcagtcaaacaacaagcgcctctaccacgatgtccaacaccagcaccatcaat

SEQ ID NO: 5333 - DNA, 656 bp, Arabidopsis thaliana landsberg
taccctccttgcagaatcaagaagagtcaagtcactgactatgggcagctgatctaactataaataactattctacggcataagaaaatacaaaactatgcttacaagttgaaccaaaagtaagtttatgtaaatatatttgatgttttttagcaaatcgcatgaaatatgttaaaatagcacgatatttataaataagatgacattttataacgtatattttacacaaatagcatgttatataaacaaatatcgattcatttgaaaagttgaaccaggagcaagcttatacgaagataaaatagtagatttgagaaagttttaacatttaaatcatgtttttagaagaaattacatgtgattttaataaataatgtgttatatgaaaaagtagcatgttgagagagagagagatttctagttatcacgtgtaattcgaaaaagtagcgtggtataaaagaaaataacatacaatttaaaaagaaaacataacgacggagattccaagaaagaatcaaaatcgaataaaaaaatgacaaatcttctgcaaattgaaggagagatgatctatcaatataaataacgtttaacagcctagatttatcgaaaaagagatcgggtggttgtgatggtggaagatgtggtggttgctgtat

SEQ ID NO: 5334 - DNA, 2451 bp, Arabidopsis thaliana landsberg
ccgagcagctgagtccaatagcacgttccaatgcgaaagagatcatgttgacagaaagatcgataccaacaacgtgaacatcaaacttctcagccatgtagaagtcacctccaccaatgccacacccaacatctaagactttctgtcctggtttcagattcattttctccacaaattctttggttgtctctgaatcaagaaacacgacagaacacacataagtactgctaaatgaagacacagaacatcacaacacaagcgaaatcgaattgagcttttaccaagtccaccagtgctcacaaacccttggccaaagacacgctcatagcgtaggattccactggatttgtattggacattgtccaagaaacgttggaagcctctgtcattttctgagctgaccttctgccatatccaacaaatctgcatcccataaaacaaagaatgatacccatcattaagatctaattacaataggaaacaagacaatcttgataggcagagttttggtttgcctgattctgattcttcttgttcttgacataagctccaatgcacttgcatccgatcatagagagctcaaatgaatttccagcagcatcccgagtctgacactcttgaaagaccttcattgtttcaccatcgatcttaatcaacttaagttctcaataatttgttaaggcagatttggaaactactaactacatatttgttgaccaatacagtaaatcgaaatccactgaaactttcataagtctcgacatattcttaagcataggcattctaactagtgttcttccactaaatggttgaaattctagtcctgaaaatgtaaatttttaattggatttaaaagaagtaggaaccttggaatagaaacggggttcacggtagtgagtggggttggatttccgcttactgtcccctgattggtggaagcaagattcacggaagaaaatgtatcctttttaccttgatccaaccgaccatcctttctgccaaaagctccacctgcatccaaacaaaaccgttaaaaaaattaattggttcctcattacaaaagattatttttgtcttggacaagagatcatattattatacctctttgtcagaaagatacatgagcagccagttggagaaaatcaagtcaagagatccatcagtgatcttgaggtcaggggatgtaacatcagcacacataaacttgacattcttgtaatgcccattgatactttcattctacaagaaagaagaaatttaacattcagttcaagattacaaatcatgtgcaatgaagcgaaataacatcgactcagaaggtgaataaagtagtaaaccttcttgataacgttatcaatgaagtcaagagcaatgagttcaccagccttttgagctaattcaccagtgaaacgaccaataccagctccaagttccaacactgatttgccttcatatggagggagcaaagagagtacctgaagaattataaatcaactcatcaaaaaccaaaattcaacagtcctgattcaagaaaccactagaccatctaaataaaaaaaacattcaaatcaaaacagtgtgtatcatccaaacaagagctaattctctaaaatcattcactgattcaaatgtcttatataaaaaatgtcaggggtacctcaggacgttcttccttgtcgagatcagaagctctcgagtcaagcatcatagcttcaacagtcagatcagcggaatgctctatccagtaattcttctgaatatcacgctcttcttctactcaccccaaaaataacaaaaaacaaatcaaatcaatttcacagtctcttctctttccataaatctccaatttctattaatataagcaatcaacgataatcgaagcatatgatcggtgatctcaccgtacgatgcagccatttcggaaatgtcgtttgtcgggaaaaaacgaagaagaagatctgccaagagaggggagagagtaattcagtggccttcgacggcgagtctggatctagagaagcttcgtgatctgcggttgacggatcgtcctctctgctgcatcaattcgcacaacgtagaatcggggaaatgtaattcagataaggtttcagatctgagagcgaaaagagtgtgagagtgtgatgttgcctgcgcgcccttttttataggtggaaaacggaggcgttaccttcgacttcggccatttttacagactgtaaaatcaaatcagtcggtgattaaacgaatatctccattttttttgttttggtcaaaaccgggaataataataagcgtattttagttaatgttgagctggccctcattttaaagtatggaatatatatttttaactacattgccattgcatttcttatgcaatatatatgttgacagattttattctaccaaataaatcgttgtttttggtaaaaaaaggttgactactttggg

SEQ ID NO: 5335 - DNA, 568 bp, Arabidopsis thaliana landsberg
  unsure (1)..(568): unsure at all n locations
tttttttatctaaaccttatgaaatctccactaccataaacaaatgtatcattgtaaaatttgtttgtttacaaggttaattagtctttttctcacccctatcataccataaaaagtatcatttacaagaaaaatctgacacatggttagtttttttactatgatgtcaaatttggctactccctaatatgaccctatgatctatgacctttttggattttttagtctgatttacaaaatttgaaaacaaaaatgaatgaattgtttttaagaaaaacatatctttcaaacattttttttaagaaaaaaatagctttcaaaaatgttttcaaagtaatcagtggggtttctctgnnnnnnnnnnnnnnnnnnnnnnnnnnnnnnnnnnnnnnnnnnnnnnnnnnnnnnnnnnnnnnnnnnnnnnnnnnnnnnnnnnnnnnnnnnnnnnnnnnnnnnnnnnnnnnnnnnnnnnnnnnnnnnnnnnnnnnnnnnnnnnnnnnnnnnnnnnnnnnnnnnnnnnnnnnnnnnnnnnnnnnnnnnnnttatcacttgcaatcacatttttcga

SEQ ID NO: 5336 - DNA, 4922 bp, Arabidopsis thaliana landsberg
aaaattttcgagtataaaaaagttacaacaacttcagagaactagaattaacaacaagaaaaggtcgatagcttttataatccattgaggaacagagacagaagcaatcaaacaacaagccacatgcgacctcatgatgtatcatagacactttcgcgaccaagtcatggagctttggtgtagtcacgatcaagaaaacttgatcttttgactttgaaaaggtgtcctttgccacatggcttgccggcacgaagcgcaataaggacgtaaggaccaatggtggagactcatgggaggtaaaggttttttcgggtttggtttggggctctaggtttaggattaacgggtaaaaatgattagagaagatttggtaaccaccgttccttggagacgggatcataatgccattcttcatcaagcttttactttcaagagtagtgcccaagatgtagctaattatctcaaggatgaagtcaataagcaaatgaatcggagatgaacacttaaagaagcttcggtaatcatcgctccttagagacgggatcataatgtcgatcatcttcaaacatttagcaacatgaataagacacctatgtgattctaaagacaaggttctcaagagatttttgtaccaacatagcagcaatgttcgattatgattcaagtgatgtccattagcaattggtatcatgaatcgacgcaaatacaagctaagagaagacaaaaaggagtttgggtcaaacctatgattttgcggagaccgtttggaggggtgggccaatccattagtggagatgggcaattgttttggggatgggcctaaatttggttaatgggctcgaagaacagtggcccattaagaggaaccctaacaaggcaacagtgtggcagaggatggtgatggtgcggcggatctgaggcggcagataagaactccgataaacgctaaatgatgctggtgggaataaggtcaacgtagatgagatactgataagtgtgtattttgcaaggtttgagcatccatttgtcaccattttagcatcatatcatcactgttttataccatttctcatcatttatcatcactttacatgtttaggataggtttgcatgcatgttgcatatttgtgttgatttcaggtgatttgtagctgttgacgagctatctggaagaagcggacctgatcatatcaaaccactcgaccccgaggtcgagtaggagcttcaagatctcaagagaccactcgacccccaggtcgagtagaagaaatcaccacttcacctcaccactcgaccccgtggtcgagtgtcctcatctccatcacctgaccatcactcgatcaaaccactcaacctggaagtcgagtgtcttctgacaccactcgatcacatcactcgacccccaagccgagtgacttcatcccattgccatacctctactcgacctgatcactctatctggatgtcgagtatcaccatcaccaccactcgactgcatactcgatgacaagcttcagagccatcttcattccgcactcaaccagacactcgagcacaaggaagaaaagaagactccagctattcactcgacctctcactcgaccacgtgggtcgagtacagttcttaacccgtcccaatacttcgtcgttttgagtattagggtttcggtatatttggctataagtagcatgtacttctcattttcgcagacaagaagtttttatctagttttatttccgcagaccttctgttctagactttttgtaatacggatttctctttatctattcagtattcagtattcagtttctgttcttgagttcgtttactgttgttcattctgttatcatcctgctgttacattgttgttatcatgttttcaatttgttcaacgtttatgctttctgttatgatgtctgagtagtgaatagatttctgaggatgggttagagtagtgtaaaattctcagtatgctaggtgattgagtattggttgatagatcccttctggattagttgttcttaatgcctattgctttctgatcaactggaatttgagcccagacatttccgcgcccaaaaggtgttcgatgaaatgtctgaaccactaattccagagattcgtgaccctgtaccaaggtattggttgcagggagcgttttggctttaacttgttgattcgtaatgcctgttaggttagctctcgtcaatggtgattgagtctgagactaggttaacttgagggtctctattgcggtggcacttagatttggttaatgaacttgttgtgtagggatagtttattgagcatgtcaatcacctgtaaactgaggaaacgaaactactcaattaccccatcctcgggaattctttatctgattgattttattatttactttaccgttgtttactgcatcttgtcatctgttgcttagtccctgcaattctttgctgttactcgacctgatactcgaccacccagttgtctggcaacaaactgtggagtcgagtatccctgttacattttatgtctgttactcgacctgtcactcgaccacaccctgtgttgagctgcatcgagctgtgttggtcgagtgttttcttgtttctacttgattttctgttttctgcatgctcacttatgactgctagaacacaccaaaatctggtattgcttggcttgatttagcgacttctgatcacaacttgattgttagcatcacacccatttggattgacaacctaaaatactacaacgacatgattggtgttttaggataattgattaaaaacctattatcaaaagttcgtgacctctttaactatatcacgtccgactatgtcccaacattatttgtagaatttagcagttagtctatctggccctggagcattgccatcacctattaaactcactgcattgtagatctcagtgtcactgaattccttagtaagctcatgatttatctctttggtcaccgttggcttgaaaccaacaaaatcaatcgttgaaacagggcgtttgttactctcatacactgttgtgaagaagtgttgtgcgtgtcgcccaattgctttatcacccttataaatcatccctgcatcatcttttatggttgttaatcttttcaccgcaaatctcgttttggtacaagcgtaaaaaaaaagccgtgtttcggtcaccttctttcattcacttgcttcaactcttttgttaccaatagttctcctcatcgttgtatgctctggtcagggacctctgaatactgggaatgagttgcctctccgagcgtaccatgctggatatggctttgttcaaagctgcttgtaactgctttatcctagagcgagagttcatattagatttgtgtttcagatatgccatttcttgtctgcaagtccgcacttggtccatgatttgttccctctggcctacgatctccttgttccatccgtttttgacatggttcttgaagtttggtatgtcaagtaatctcttatcgaatctgaaaggtctttgttttggggtttctgttttttctaatgtcagaagtaagggtttatggtctaaacctgtgtaaccgagaaactccagttcaggaaatggaaagttagtcgctccttcatagtatgacgatgtcgttctccaacccaactaaacctatcaccggttgattgtatatcttcaaggtcacaagtagcaaccatactccaaaaatcaatgaaagtctgatcatcatggggtggtcctctctcttttcagagtttgataatatctcattgaaatctccaatcaaaatccaagaatcattgcgtgtaagtgacagattttcacagtgtttccagagatggtgtctttcactttgacatggatggccatacacaccagacaagtagaaattgatattattagtagagatatgtacatcgatatggcgttcatcctagaatacattggataaacgcacattatccttccacaacaaggccaaaccaccactatgacctttagggggttgagttattacattgggaaatcctaatacataagctaaattacaaacaacatcacacttgtttagagtttcaatgaggaatataatgtcaaacttacataatttacatagactagtaagacgcgattgagtcagcggtgcaccgaggccctgacagttcgaggagccgatcctcatgggggctctgggggtaccgggcccccagcgcctccgtccattgagattggagatgtaccagatgtagcaaatccaaatttcctgtctttcttgcgaatgtgtcctagaaccgctgattcctctactgcttctccctgattgaaaagagcttcaaaactgactctctttcttttcacaaaagcgtattcatttatcgcattgtccgaaactgcttccaacaaacctggtctctttgttccatcaatgattcacgcaagtgcttagcatggagatacttgagtctttcagcagttaactctgtgtcttcaaagacacacgccaaatctgatggcttagattatgaaggttcatgtttcacccctgtggcaggatgtgcctgaagtcctggaatcagaatggctgggtcaatgctaggcagtaatcgtcactagacatgtactgctcttcatgttcataatcggggttgtcatctccattccctgcatcaccatccgcaggaatgtcgtcttcgaaggacaaagcacactctttcacatcatgcttgagaaagccacatttggtacagaagtttctgagtctctcgaatctgaatttgatgatggtgttttcgtttgcctgaaactgaaagttccgctaaaaacaaagcggatcatcaaagttccaagccaattgaaccctcacaaaacccaattggttcgcattctcatcaaagtcaacatccattacata

SEQ ID NO: 5337 - DNA, 2618 bp, Arabidopsis thaliana landsberg
agtgaatctttcagcttaatcttggaatgtcaataaaaccgagaaagcagagttgtcggtgttggttgatcgggctactgggggtgcaagtattaaggccggtgaaatagagttgatgcttcacaggttccaaatttcattagtgtcattagtctgtatttttaaaacatgaaacattattgtgtagttgacactgatgaaacatccatgggaacaggagaacgtccatggatgactcgagaggagtggaggagagccttgtagaaactgtgtgtgtgaatgacacctgcgcaggattgacggtatgaatgattaattgagaaattgtgtgtgttttgtccaggacaaaacttgatacatacttgtgtaaatgcagattcgtgggaattactatgtaagcataaataaggtaggagaaggagggcggtggagacgagagactggacaggaaatatactcacctcttctaatggcattcgcacacgagaacaaggagaaatggaaagcctcaaatactgtgaaaggttatgccatggatcatctctacaccttgcctcaaaacattgctctcatcactcttgaggagttggatctcgggaacgtccttcttcgcctggctcatctctacgaggtacgtacagttagatgttcttgaattgggatatacatgacagtaattgagtgttgagcgttgtttacaggcgggagaagacagtgattactctaaaatcgctaaagttgagttgaagaagttgttttccggcaaaatggtaagaaacacacttgctcatctacatgtggagagatactctaacatactagctagctaggtggtgaatgaatccatactatttttgcagatcaaagaagtgacggaaatgagtttgtcagcaaatcaagagaaagtaaagatgaaggagaagatgaagtggaaagtggagggtgaagcggaacaaccttcttccccgctaagaggcggacccgttgacaagtcgactttagtagtagagcttggtcccatggagattcgtacatttgtggttcagttttatcagaaacaacgaaaaagaaagttgtttgtgggatgattgcgccaatatgtttgtacaatgttttaaatcattcattcatcaacggtttggttagttagaaagcgcgggaggaaggttcatgtatttttcaatcgaccattatactgtgttaatgggcctgttatggaagttttgggtatataaggcccatttaaaggaaatgatgagtgcgcgatttgtctctcttctcaaaaacttgaagatctgagtagagtatttccttcttcttttttttttttgtttttctgttcttggcttgtcgcagaagttgggattcgtctttttataatttgccctgaaaacgaaaacgaaaataaaaagcggagagagagatggctagatacgatcgagcaattactgtcttctcccccgacggtcacctctttcaagtcgaatacgcccttgaagccgtccgcaagggtaacgccgccgtcggtgtccgcggtaccgacaccgttgtcctcgccgtcgagaagaagtccacccccaagcttcaggattctaggttttatttccatctcttcacttttatcatggcaccaattaacagacttgccctctctacttattggatcctgcttggtttactctcagttgctagttgactgaacaatgttgatacgactgctttattttggtcttgttccctatttaatggaatctgcagctgaaacccttgtttaaaattgaaccttgttcctaattgcgattgtctcagttgttactcttttctaacatgtatgatggctttggcccttccctgaaaagaaatctacttaattgttcaattctcttatactgctgcctaaccaatatattttggagaggtatttgtgtttctctatctagtttgttagatgaagctgatgtcctgtgcttgtttctgacagatcagccagaaaaattgtgagccttgacaatcacattgccttggcatgcgcggggctcaaggctgatgcccgagtcttgattaacaaagcaaggatcgagtgtcaaagccacaggcttacacttgaggaccctgtcactgttgagtacatcactcgctacattgctggcctttaacagaagtatacccaaagtggtggtgtcagacccttcggtctttctactcttatcgttggctttgacccttactctcgcctcccttccctatatcagactgatccttctgggactttctctgcttggaaagctaatgctaccggcagaaactccaactctattagggaattcctcgagaagaactacaaagtatcctctggccaagaaactattaaactcgctatccgtgctctgcttgaggttggtgccctctccgtcctagctgatattttgttatttcaggattttttgtcctttgagatcatagctgttttgatatcggctttgcattgcaggtagttgagagtggcggaaagaacattgaggttgccgtaatgacacgggaggaaactgggctgcgccagctagaagaaggtgaaagtgatgctttcgtgaccgagacaaaacatgttttggcggccg

SEQ ID NO: 5338 - DNA, 1474 bp, Arabidopsis thaliana landsberg
  unsure (1)..(1474): unsure at all n locations
ataaaagagtaagaatggaattaccaaatccaccagtgctcacatatccttccccaaagacacgctcatagcgcaagatcccactagacttgtattgaacattgtccaagaaacgctggaaatccttgtcattctccacgctgactttttgccatatccagcaaatctgccatcatagagaataaagtttaccccttgtcagtcagtgaaatcaaatgaatatgaaaagtaaacaatctgataaagaaattttttggtacctgattctgattcttcttgttcttcacataagccccaatgcatttgcagccaaccatagagagctcaaatgaattgccagaagcatcacgtgtctgacattcctggaaaacctgcattacatttacaccatacatttctaacttcagaagatttaggttatctggatttcacccacccatattgaagagaatgcactcaactaatcccaatacattagcttagagtggatcaaagtgacttcaaatctataaattgatgatatacacactttttaagccttatcgaacttggatctaaaccacattcaaaatgaaattaatccaactggagcagtcttttctagaagtcctcttaaattcttataaattactcccatgctatagcacaaaacaagagaatatcctcatagttttagatatccttcaaacgatatatatactcgaaagttcaggcataacccatgttttgcaagtagatcatttcagaaatatganagtcaagtcaaaagattgaacctttgtgtagaatctgggttcacggtagtgagtggggtttgactttcgcttgctgtccccagattgatggaagcaagattctctgaagaaaatgtatccccctggcttgacccatccaatcattctctctgccattagttccacctaccatcaccatcgactagattaagactttcatctctaaacattcgagaaactacaagaatcaagtaatgaaaaacagttacctctttatcagagagatacatgagcaaccagtttgagaaaatcaagtcgatagatccatctttgattttcaagtctggagatgttacatcagcacacataaacttgatgttcttgtaatgcccattaacactttcattctgcaaagaaaaaaatcatcaaagaaatcaaaagaagcaatggtaaaatagaaacttttaacacaacaacagctagctacctaagtagttttaccttctgaatcgcgctttcgatgaagtcaagagcgataacttcaccagccttttgagccaattcaccagtgaaacgaccaataccagctccaagttcaagcacagatttcccttcatatggtgggattaaagagagtacctatatagcatagcaacacatcagctcacatattcctaatctcaattcattagtaactaaagaagcaaccactgtttcacatacctcaggacgttcttctt

SEQ ID NO: 5339 - DNA, 1053 bp, Arabidopsis thaliana landsberg
tgaagtctatctgcaaaaataaaccaagtagcataacacaaatgcatttagaaatttcttcaaatcaaagagtataaactaagaccaaacataattcggtttacatatcacataagggaaacaagatttaacaccactcaacaagtccacataacacactacaggcatatatcatcacctagcggaaatgacatttttattgaacaaacaaagaaagaagaaaacatagaagtagtagatttcgatttgcttaattcttgttggcgatgaaaagtccccatttctgctcatccgatgcacacctctccagctttgacttccatcctccaacaatgtcatcgtaatcctcctgcgtttattcaagtttgtgagatacatcgaaacttcgaaaagagacagcttcagattaatgtaaacaacataaagatttgatttctttgacattgaaagacacttactttggagaagtcggagatgaatttttccttttctttctccaccctgtctaattcacgtttcaggacttgcataaactgtaaatacaaaacaataacaaaaagaaactctgttaaaaggactctagtccttggtttcaatattgttgtatatatgagattcatttacctgatcagtacggtcctctgcgatcacatcagtgaagccagcgtcttttagcatctacatttaggatcagtgttgaagggattagagaaatgggtttgagaatagaaaaaaatatctttgacaaacaagacaaacctgtccataagcttgaacgtcatggagatcatatcctctctgtttgatgtactctgaaaactcagcagatggagttttggggcttctacagtagtcgctgatgagaactttacctcccggtttaagccatttgaagaaagtcctaaacaaggctggtttgtcctgaagaaaagagagaatgagtaagcattcacaattataaacttccaagagagaactatgagatcatgttgagtacttggatgtgcagaatagtgtcacggctgtaaatgacatcaaacgaattatctgggt

SEQ ID NO: 5340 - DNA, 4178 bp, Arabidopsis thaliana landsberg
attatgaatctttattcgttggatttgttttatcaaaaactgcttatggaaaccttttattgtagggaatatgtgatttgcttttcgttttgcttgtaaataggatttctggaatgagaaactacaagatggttttcttcaaagaatacgttacgcaatgaaaccagatgaagcctatggacttattttctcttgggacaatgtcgtggtaataattgtttgacaccatctttatgttagcaagttaagttagatgaagtttcttgtagcttatatatattacctacaaaagcttcttcttctagtggggcttataaatattagtgttttcgtttgtttagatgatggctcccctgttattggtaaatctcaaaagttgttggatagaattgcgtggtccatgcatactagttttgggtctattttaggcgctagggcttggcggatttggcaaaagttgtagaataattgcttctttagaatgatgcctgcgtgttagctggtagatctcaagaggtctatagtggaattgcatggtccatgcctattaattttggattcaagagtcgtattttctcaatgttccacttatggtttaatctttgtaggctgatactcgaagtcttaagttggaagcttggaagcagctcgctgcagaagaaggtaagctttattgcgctgctctcctgctcctaaaggttttacccaaatatagtctagtttctttctgcatacgtgtttgtagagatagagatatcttgcaatacctgctcatatatgtttagtgcggcccatgcacccttttaaggaatgttgggagagtgtccagagatatcaatgaactcaaacgttacattaccttctttgaggcctcaattgtttgtttgacgtttcatcttacactgagatgttaacccacttgagcctaagctgatcctcaaaacacattaaccgtatcaaggacgttgccaaatctgtagcatccacggccacagtgcacgtcgttgccctcagcttcaaggcggctcctacaactcgcagcaatcaacaccagtctcaccatttacgccgtggcagccacgagcaaatgctgttatggcgtcgccatacaatgctaacaattggttactcgatagtggtgcgactcatcacatcacttctgatttaaccaatctatctctccatcaaccttacacgggaggtgaagatgtcactattgctgacggttcgggtttgtcaatttctcatactggttcagctttactttcaacaccattacgctctcttgccttgactgatgttttatatgtgcctaatatccacaaaaaccttatctcggtttaccgcatgtgtaacgctaacaaggtgtccgtggaattctttcctgcacattttcaggtgaaggatctcaaaacaggggtccaattgctccaaggcaggactaaagacgagctgtatgagtggccggtgaatccccctaaaccgtcatccttcctcactaccattacaccaaaaacagacctcacttcatggcattcacgtcttggccacccatctttatctactttaaaagctgttgttgctcaattttcccttcctgtttctcattctttaccaaaacaattcaattgttctgattgccttttgaataagacacacaaacttcctttccatacaaattccattctctctactcaaccacttgaatacctatacactgatctttggacatcaccaatagtgtccattgacaactttaaatattatctcgttattgtcgatcactatacgagatactcatggttctatccactcaagcagaagtctgatgttaaaaacgttttcatggccttcaaagcgttggttgaaaataaatttcaacgcaaaatcattcatctctactcggacaacggtggcgagttcattgccctacgctcttttctctccaccaatggcatcactcatttaacaacaccaccacacacgcccgagcacaacggtatatccgaacgaaagcatcgtcacatagttgagactggcctcaccctccttggccaagcctctatgccaaagtcgtattggagctatgcattcaccactgccatatacctcatcaatagaatgccaagcgaagtcattggtggcacatctccatataagcggctctttgaaaaactccgaattatctgaaactccgtgtgtttggttgtctctgcttcccgtggctccgaccgtataccacacacaagctggatgatcgttctgctccatgtgtgttcctcggctattcgctaacacagagtgcgtatctctgcttgaatagaaccactggccgtgtctacacatcccgacacgtccagtttgtcgagaatgcctatccgtttgccaatcccaaactagatcaaatcacaatctttgaagaaacagtcccacaaatcatcaataatcaacctgcagccattccactcccgtcgccaccgctcatacagcttccgtcgtcatcaaccccgaccggagatcctcacccaccgtcgttgccctcaacgccattgaatccgacatcaccaatcacgacatcgtcgaccaatcgtgaatcttgcacaacgtcacatgaagcaaattcacctacaagtccaacaagcctaaattcacctacaattccaacaggcccaaattcacctacaattccaacaggcccaaattcacctactaccacctccaaaagcccacctacgtccaccactagcccatctcactcaagtcagcccaacaacactccaccaacctcaccatcgtcttcttcctctgttccgaatccaactccctctccctcgccatcaccacccccaccactccaaaatcaacactccatgcgaacccgagccaaaaataacataaccaaacctatcaaaaagctaaccctagccgcctctctcaaagccaaatcaaaaatcccatccactgtggctaaagctcttcgtgatccaaactggagaaatgctatgtccgaagaatttaatgctgttcttcgtaatggcacatatgagctagtcccgtcagaaccacaccaaaatattgttggtagtcgctggatttttacaattaaatataatcctgatggctctattgataggtacaaagcacgtttcgttgcaaagggcttcaatcaacaacaaggcgttgattacacagagacattcagtcccgttgtcaaatccacgacggttcggacggtccttgacattgcggttaaccgttcatgggatataagacaacttgatatcaacaacgctttcttgcaaggtcgcctcacggacgatgtttacgttgcacaaccaccaggattcatagatccagacagacccaaccatgtgtgtcacctcaaaaaggcgctctatggtctcaaacaggctccgcgcgcctggtatcaagaattgcgtgggtttctcctcacatgtggcttcaagaactccgttgctgacacgtctctatttgttcgtcaacacaacaaagactacatctacatactagtgtatgttgatgattttctcatcacaggaagtaattccaaccttatcaatcaatttattaaatgcctggctgatcgcttctctttgaaagatttgggtcagctgagttattttcttggaatagaggccacaagaacaaaagtaggcctacacctgatgcaacgaagatatgttctcgacctactcaccaaaaccaacatgctggacgccaaaccggtgtctactccgatgtccacaactcccaagctgactctaacatctggcactcccattgacaacccgggcgaatatcgacaaatacttggcagcctacagtatctcggattcacacgaccagacattgcctttgcggtcaaccgtctctcacaattcatgcacaaaccaacagatcttcattggcaggctatgaaacgcgttcttcgttatctagctgggacaccatccgctggtatttttcttcgtgccaaaacccctttaacacttcatggttactccgatgcagactgggccggtgacaatgaggattatgtttccacaaatgcatacatcatataccttggcggcaatcccatttcatggacatccaagaaacaacgtggtgttgcgcgatcctccacagaagctgaataccgcgccgtcgccaatgct

SEQ ID NO: 5341 - DNA, 1196 bp, Arabidopsis thaliana landsberg
acgagtcctgtttgcttcaatccgcttaggtaccgtatagtgaaaacaatggatttgggattctttcgagtcatgcattttgtgtaactctttttgtttgtaatgtttctaggttatcgggtgatcgtcagcgaaccgctacggtatcaacgagggtggagaagcggcgaaagagaggatcgagtgtggtctgttatgctgctccgatttctgccaatagtctacaatggatctccaccatttcttgcctgtatgatctctctcatttactgtgattttcttaacacataatgctggtgaaattatgctaatgatgattgtgtaatttcctctgttttcatcataacgtcaataacataagttaattgctatactgaatggtgtttcatttctagtgcattgatgcttgcaaggggtactggtatacataagtcagttgttgttccactattcgctctccacgcaccatcgagcatcgtcgcctggattaagtaagcttttaacatggagatatattcattaacatggtgatatatatgggtctctcttcttctttttgcatgcttgagcagcctattgaagtcattaaacttaaacttgtgtatctttatttttgtaggggagagtatggtgtatgggcagcattcttggcgcttattgctcgacttttcttcacttttccaggttcgtaatcatcttcaatatgtaggttgattacaagttattaattaattaaagttatacattaataggtgaacttgagcttccattcatcgcattactcttggtgattgtggcgccatatcaagtcatgaacataaggttagaatcttaaagaatgtaatgttttaatatatatcaaggttttcttttctttagtcgccgagactcattgacttcattataaacttgcagagggaagcaagaaggggcaatcatagcaatagcaatatctggttttctggctttccaacatttctcacgagcagggagcttggagaaagcatatgagaagggttcagttcttgccactgtagccattattggctgcacagttgtatcgctccttttgttgctataactatatgctcctgaccaaaaatgttaatcagtgtaagaatgtgtgtgaaggaaaaacaagaaagatgtgcttgcatttatccgccgtttaagaatgctggtcatttttggcacta

SEQ ID NO: 5342 - DNA, 845 bp, Arabidopsis thaliana landsberg
  unsure (1)..(845): unsure at all n locations
tttcagtaccccttgcaaacatcaatgcactagagaggaaacaacagtcagtatagaaatgaacttatatgctgctgacattatgaatcagtggaaattatacaattatctatcacaaatcactttcacacatgaattgaagctaaactatttccctgtacaatcatttgctattatccgattaagctaaacttgtaagaaacttcatacattnnnnnnnnnnnnnnnnnnttctgcgttaaaattcacagctaatgagagtgagagatcatacacgcaagaaattgtcgagatccattgtagattatgaacagacaacattggagtagcataacagaccacactcgatcctctctttcgccgcttctcagccctcgccgacaccgtagcggttcgctgacgatcagccgataacctaccaaccaacattcatttagaaaaagccaaaatccactgattgagaatttatgaatcgggtgtttctgtgtcactataccttaacggattgaagcaaacaacactagtactgtgacctagaccggagatatttgaaggacgaggccggagtttaagagcgagaaagggtttctggtggtgaagagaaacgatccgggacgatgagagacagagactcgccatgaattgttaagattagttacggtggtggaaagatcactccgtcatctttccgttaaaattgaatcatttgcatcaatatcatgatcgctacgtggacggtgtagatttagcgggaatgcttttaaagtggggcccataaatacgtgtttggaaaacgacagtcgtttagttccaatcaatcacagaatcttgaatcccacagttgt

SEQ ID NO: 5343 - DNA, 1364 bp, Arabidopsis thaliana landsberg
gatttacttggcagcgttggttaagttgtggtaagtccttaaacccaaatgttgatttgataattttttaacgttcactcacaagcgccacgtcatcaccaaaatatctgaaatatctaataaaggcttcttctttcacaaatcccaaacctttttttttctctgctaacgaaaaaagccatcttctttgctactactaatctactattacactgaatcgtttgggttcttcttcttcttcagctgctactttgttcgagtgattgctgacatgccgtcagcgtcggagattgttgacaggtttgtttgtccgttttttttgtttttgttttcccgcttgtgtatgtgtgctaattgttcattgttaaagattttgtttttacaggattgttgttgtttttgagtggtatcaagttccttaaagtaacttcttttgtttgtttagtagttgaaagctagaaggttttcactttagggtttttggggtttttcgtagacagaaatttgttaattttgggcacaatttgtctcttttggattacgttctgtgcgatttgtggcttcgagttcgtgtggggttaagagacttggaaattagaggatctttagctggaataaacgttaaatgtggtacctttcctgagtttgctctgttctaattgtggtcgtgatggggtttctttttattcgctgtgatgctgcagattgtgaaaaattcttgtagctacttcggtgttggtagattctgtgatgcttaaaaattgtttctttgaaggtgctttgatcccaagtatagttgaacatgttgctttaaatcttgttaagagaaaaaatgggacttgcttctgtgcccaatagttcacgagcatgttgctaatcttgcttctatgcccaggaaacggaagtctcgtggaacacgagatgtagctgagattctaaggaaatggagagagtacaatgagcagaccgaggcagattcttgcatcgatggtggtggttcaaaaccaatccgaaaggctcctccaaaacgttcgaggaagggttgtatgaaaggtaaaggtggacctgaaaatgggagttgtgactatacaggagttagacagaggacatggggtaaatgggttgctgagatccgtgagccaggccgaggtgctaagttatggctcggtactttctctagttcatatgaagctgcattggcttatgatgaggcttccaaagctatttacggtcagtctgcccgactcaatcttcccgagatcatcacgaatcgctcttcttccactgctgccactgtgtcaggctcggttactgcattttctgatgaatctgaagtttgtgcacgtgaggatacaaatgcaaga

SEQ ID NO: 5344 - DNA, 1639 bp, Arabidopsis thaliana landsberg
ctggcgagctttcgcatgtaggatgttgtcatctctaatttatttttccttcatcactcgagccaacaaagaatttggattttgaatgattctccatacttgttttgcaagtaaagcatcattgcatttagccaaatctctaaaacctaaaccaccttccgatttagaatattgtaacctcttccaagctatctatggaattcctcttttttgcattcttttcccaccagaagttcatgagtcgagtttcgatttctgagatgataccaatcggtagtttgaaacaggacatggcatagaccggcattgccatagctaccaattttagcataatttcctttcctgctggtgataaatgtttcgcactccagctcgatgttcttttcttcactctttcaataatgtaattgaacatttcttttttttctgaccaaattgttccggtaaagcaagatatttccctccaccttcatggctttgaatttgtagtatgctttttagccgattttgaatgaccccatgcacctttgatccaaaagttatcatagacttgaccatatttattttttgacatgagtagtattcgtatatgtcaaagacatcctttaaagcttgacaattacgagcattagcttggcaaaagaataaggaatcatccgtaaactgtaaatgagtaactccaggaactccattccctatacgtagcccgtcattatctccatgtgataccctagaattaataagatggattaagatgtcagcacataatatgaaaagatagggagataaaggatctccttgtcttattcctcgttgtggtttaatagtgccgtgtggtatgccatttattaaaactgagtaattaactgatctcacagtgcccattatccaatttatccattgctcgctaaaaccaaatagcctcatcgttgtctcaaggaagttccactcaactcgatcgtaatctttgctcacatctgttttcaccgccatataggattgagaaaccctttttcttacttttaatgaatgcatcatttcatgcgctatcatcacattatcattgaccaatcttcccggtatgaaggcggcttgaggatcagacacaatcgcatcgagatgccgttttagtcgttctactaggcattttgagattattttgtataggaaattgcataaagctataggacggtaatcagagagtgttacaaggtttgttatctttggaatcatacagagatttgtgtggttcattgattgtttcatgtatgatgtcctaaaataattttttacctctttaattacatcttgtcctactatatcccaataagatttataaaacctagctgtaaggccatcaggtccaggtgctttgtcatctccaatttgacttattgcattgaaaatctcacaatcactgaattcctttgtgagatcatcattcattgccttggtcacagttgatttgaaacctgcaaaatcgatagtagaaacaagacggccattgctttcatagatatttgtaaagaagttttgtgcatgacgtcctatatctctatcccctctaaaaatcgttccagcatcatctttatgggaagttattatgttcactgaaaatctattcttggtgcaagcatgg

SEQ ID NO: 5345 - DNA, 3112 bp, Arabidopsis thaliana landsberg
  unsure (1)..(3112): unsure at all n locations
cagttctctcttatcttcggttgaatcgaaactaatggactgtccacacaatatatcctgttgtttctcatgcctcaccagaggtactcggcaaaagactagaacaaatcaacctttgtacttgcaaactagttttacccaacaataaaacaaattgcagtgttaccacaggatgagagcgaccaaaaggttctcaaagtcaagggtctactgaagataggaaaacaagtcgcctttgtttgagaatcagctctccaaaagaaggcaaataaactagttggttgattttaacaggcaagaggtttattagtattaaggctaaaaaggttaccaatatcttcttctaagaattactatcacagctagtgttaatggacaaagaactctaaaaactgtgtcaggggttagttttcttacactgtctaaagaagcgttgggagtgtgggtttcatgacttgcccacgcaccaatcttagtcaccaggcagacaaaagctccctaaggatgaaggctaaggcatgaaacgaacaacaaatgatcagttatacaaataacaaaagaagtttaatagctgaacactgcagcacacagagactcacaaagaaaactgaagcatttaggaaactgagaattctacatgnnnnnnnnnnnnnnnnnntgtaaatcaatatcaggtctcgctactgaagaaaaacatgaatggttaaaagttgagcctgcaaagagaaaacaagaactaaggtgtaatgtgctatgagcagagcttgatcatgaaaaacataagaaaattgatactctcaagcagaattctcttccttgctcaacgcattcacaactctcttcaagataacttcaataggctggtgagcattttcaaccgctttggagatggcttgccacttctcgccatgcttcggctcacaagctacacacttcgccacaacttccttcctgtcctcatcagagccatgttgaagttcaaatttgtagaacaacgcccagaaatcgccaatatctgggccaacggtaacagcacgttcaaaccatgctctggctttctccaccttcttgtcttgccaaaagagcttggcaacagctatggtgacatgagggtcgcgatcacacttcttcatagcatcaatactctttgttttccgtcgaggacgtggcgccatctcaatgtccgcagcccagaggataccactcttgggacagtcttgcagagcctttgacatcaagtgctctgcttctctcttgttgtcatgcctcagttcagcgcgaatagcagctaaccatagctcagcccccccaggattcttcttcctggccgtggtgagaatagcccgagctttgtttagcccattcactttctcttcaagatcagcgagtgagagccacagtggtatgcagtggggacagtgcttcaaaccagtgtcataagctttcctggcctgttctagatgcttgaaccgttcctcgagctgcccaagcattaaccaaagcttgaagaatgttgggaattgcttcaaaccttcattaagcaatctcctctcctcctctacgttgccaagttctctctcaacaatggctgatttcatccagaccctttcagtccctcctctttcccttgcttttgcaagcagcattcttgccctctccggctccttgttctcaaactcaagcttgaaagcagcaagccagatttcctcagagttgggaattgcagcataagcctcttgtagaatagcacgggctgctggaacatctccagcgagccacttctctttggcacccatgagccagagaacctcagcttgcgggacatatgttacagccttacgcaacaaggcatcaagggactcccgactcccatggctcttctcaagctgcgccgctttaagccagatacttttcttggtcaagaatacactaagagcatgggcgtatattgctcttgcggtctcaatggaacccctcttcttgcactcatctgcatcagcaacccaagttctctttctatcctcttcttccactccaatacctattgtgttcttaataatggcctggcatgtagcgacagatccaactctctcacatgcctcagcctcactcatccaattttctcggtcaataacaaccccttctctctggagagtctttatacccctatcaataatctttcccaccatagccgtgttatcattagcttcatctagcttcccattagcttcttctaacttagcagcggtgatccaaattgcaggctcctttgggagcttctctctcgctttgttcaacaccttctttgattcagcatatgtttcgagcctcgcaagtgccacccatagctccagatgcaaagggcagcactccacagccctgtgaagcaaaatccttgcatcctcctcattagccaactcaacaacagccttccatagtcttacagagtctggaatatgttccagtccctttctcaacaccctactcttgttctccacatcatgctccagctttgcagcctccaaccatagcttcactgaattgggtatcagcttaactcccttcgcaataacccccttggcatcttctggattagctaacctacaagcttcaagccaaacatcctcatttttcgggcactcttcgcagcccctctgaatctgaaacctagctgctttaatcttcccatccacctcctccactctagcagcagcaatccagccatttggattctttggattcgactgggtcagactcttgtataacaatctagctctattgcgatcgtatatctcttcatcagtggttcttttcatactcttcaggtcagttaagtagcctttaggatccactacagtttgccccgaaactgaatctgataggttatcaagcttcagagacaacaccgtacctcttccctcaccgacagcagtcaagtctgtcaccggcgtctgcccccatggtgtctccgacccaccagcggctctgctctttgggtctaaggccatgacaagctccttttctttcttcgccttctccaaaagcgtatcaggaataggcacaaagctctcaaacttcttcttcttgttcctcagcgagtaatccccaatct

SEQ ID NO: 5346 - DNA, 2992 bp, Arabidopsis thaliana landsberg
  unsure (1)..(2992): unsure at all n locations
caatttccgggtgcccaggctgtggagttcatatgcaaaactcaaacccaaaacatccaggtttctttatcaaaccatcaacagagaaacagaggaacgagttgaatcttcgtgatctcacacccatctctcaagagcctgaatttatagannnnnnnnnnnnnnnnnnnnnnnnnnnnnnnnnnnnnnnnnctgacttaaaccctagagatgatgaaccatcagattcaagaccattggtttgtgctaggtgtcattcacttagacattacgggagagtgaaagatccaacggttgagaatcttcttcctgattttgattttgatcatactgttggtaggagactaggttcagcttctggtgctagaactgttgtgttgatggttgttgatgcttcagatttcgatggttcttttcctaagagagtagctaagcttgtgtcgagaactattgatgagaataatatggcttggaaagaagggaagtctggtaatgtacctagagttgttgttgttgtgactaagattgatttgttaccgagttcgttgtctcctaataggtttgagcaatggcttagattaagagctcgtgaaggtggtttaagtaagagtactaagttgcattttgttagtcctgttaagaattgggggattaaggatttggttgaagatgtggctgctatggctgggaagagaggtcatgtttgggctgttggatcgcagaatgccggaaaaagtacgttgattaatgctgttgggaaggttgttggtgggaaagtttggcatttgacggaagctcctgtgccgggaactacgttggggataattaggattgaaggtgttttgccttttgaggctaagttgtttgatactccggggctgttgaatccgcatcagatcactacgaggcttacgagagaggagcagagacttgttcatattagcaaggagcttaaaccaaggacttataggatcaaggtttggttcaatataatagaatgtgttggctttttggatacaattgtgggattgttaattggattgtgttgttgttgcaggaaggttatacggttcacattggtgggctaatgagacttgacattgatgaagcatctgttgattctctatatgtgacagtttgggcgtctccttatgttccacttcacatggggaagaaggagaatgcttacaaaacactcgaggaccatttcggttgtcgattgcaggtaaagctctggccttttcagttgtgtaagacagaatatgatcaatttatgtattgaacattatttcgattacaaagttttgatgtaaaaagaaaatattacttgaggaccatttcgattgtagataaatatcatattgtaacgaacttgaagtatttaggatcaaagcttgatttgaacactgcccttgatactagtcctaaccttttgtacattttggtttttgatgaagccgccgattggagagaagcgggttgaagagttggggaaatgggttagaaaggaattccgagtgagtggaaccagttgggacacaagttcagtagatatagctgtttcaggtctcggttggtttgcgttaggactaaaaggagacgcgattttaggtgtatggactcacgaggggattgatgtcttctgccgtgactcattgctcccgcaacgagcacacacttttgaagactctggattcactgtctccaagatcgttgccaaagctgatagaaattttaaccaaattcacgaggaaacacagaagaaacgaaaacccaacaagtctttttcagattctgtatctgacagagacaatagccgcgaggtgtcacagccttcagatatcttaccaacaatgtgactcttataagttagttaccttttccttggtttgttgaaattacattgaaagcttattttcttcaaagcttatttcattcattgaaaggttcattacatagaccataacaagttggtaacatagatgatttgtattgaattatacatcaaacaaacacagagttgctctgtttcaccacaatagcttcatagagtgaaatcagtgagacttctaaactctctatcaactgcaaataggacatggaacaagaccattctcattacactcattacatctcacaaccaccgaagcactaccccatcctttcaccatcttacagcttccattacaccgaaaacacggcaagaaaaacaaaccgccgcaaccatcacacgcgccgctctcgcatcctcccgctttctttctcggaatcccgctgatcagctctccgaaagaaccttcctcaactagtctcaacacttcctctcctccaccaatgtaccttcccttcacaaaaacccgaggcggcaatgcagccactccctcatccccaactctcttcgccattagactcacaagctcttctctaaaccctctatccatcgacacatctctctcgcaaaccacaacaccaaaactctccaccgccgctctcacagcgttacacgcctcaaacgtttgacgaacacctcgcaacgacgtcgtgtacatcaccacacgattctctcctcctggtggacaaatcctctcaaatttctcatccaatttcaaatctaacggtttaaacgattttctagggcttctcgaattaggatccgaatcctctctgttcagatctagcggtttcaaaacctcgtcgttcaagttttttctagggtttctccgactaggatctgaattctctttgttctctccaccaaacactttatacttcaccggagtcttaggaagtggcgtgaatcggaaactctctccgtcgagaccagacattaactcccaagagttaataatctccggttccgactttatcacccttggctcagaccatattgacttagattttgtatcgactgtgaatttctccggcggcgtcataggaggagaaggaggcggaggcaggatcgcgtgtgagaagaccatcagcggcggaggct

SEQ ID NO: 5347 - DNA, 2612 bp, Arabidopsis thaliana landsberg
tactaatgcataaatcctcatgaggtaagtatcactaatccaacagtattaatcaacagcaaaaagatcgaagtagacgttgggaaccacctccaacgggctgggtaaaatgcaactttgatagcggttttgttcaaggaagaatgattactatatctcgaaaaatgattataatgatgcaatctgaaggttaagaaaaaggaaataactcaatgtctcaatctactcacaatttggatgatcaagtcgatcttaaggttaacaaaaacaataatactcaaatatgaaatatgtagtaaacaccacaacagataaggacacaaacttttattttacaagatgagatgaaattctcgtccagaacaaacgatagtccaaagagctcaactgtcctataggaaaatcccatccgatgaacattcgacacacgattcagtactttcgacttagacaagagaatctattagataatttaatagaatcatcggtctttcctcgcgttgtaggttaagttccctttcgtgttgaatgttggtttcttgaggatccacccgcttttgaggtttcataggatgtcgtctgactgcttgattttgtgtattgagagggattcaacgtattggttaagcccgtaagccatgatgagtcggtccacgaactttgtgtctgtgtttgtgacgtttcgccttctgcattagatggtttaacacaaatctttaaggttaatagaaacaaaagaatatgccaatgtgtgataaagccccacaacaaataatgagacaaactttatcttagaagatgagagatgacatttctagtccatggagctcaaaccaatcaccacctcaaattcttccatttaaaacatacttcaaactagaaaaggcatgtttacacaagcacatgagttcagtgttgtaccttttctcgatgttcgctgaggttttgggatttcactgacgactttttccttctgaggttgttgctttttcttaccaaagaatccaaagaatcctccttcttgttcattctgcttaacttcaggtggttgcttcttcttatcaggggcctgtgcattcaagcctcctttatgattctgctgcttgacttcaggttgtgccttcttccttccaaggatctctgcattatgttgccccaacatagacttattcgcgtttgctttaggtaataagtcacgaacttgcgcagcaatagcattgaaaattggctgcttatatgttggaaactcatttccttggttaaatttttttccacgcccagcagcatacacaggggaagctggacgcacaggtggaggcggaggcacacgcacacgcgcaggcacacggaaagcggatagcacgtttttcatattaaaatttgtcccatttgagcttccaatattaggtgtatgtacatctagtccctccttgatgataacggtaacggattcatctatgtcctttagttttgccgacattgcgattttattaaattctcctcccttcacctctagtttatcaactcccttgacctctaccgaagtaactcctaacaacaaacatcgtacaatgcaaaatgatgtaaactgaatatttcctacaatcattgatttatttggtttaatataaacataagtttgtgttggtgtatacgtacctgaaaactcccatataacttccatagcatcctgtatgatgtgttcattaagaacttcaaacttgaatataagtatctcctgtaaaatagcaattcatggtataagtaataattttaatgtatatctacataatgcataatgcatatgcatagtgtaaaaaaaaattaattgctaaaaatggtgcacaaaaacaaaattgcttaaaaataatctgaaaattagaaaaaacgaacctgcatttttggagtggtgacataattgtagactgtgtttaaacccggcatgtaacttttccctggttttcccgttgggttgattatatcaacagatttatctatctcatagagtttgccccccatttgaatcttttgaaattttcccttcacctttagtatacctttttccttgatatctacgaaagtaactcctaataaaaaacaaatattattacttcatttttatagccaaaatagattaacttacttattgatttatttggtttcactaacataaagatagatttgtgttggtgtacctgaatacatccagacaattttcatagcttcccgtttgatgttttcatcagaaacatccatcttgaattgaactgtctcctcctgaaaattagcagttcattttacaagcaataactatattagacaatcatataaatatttgttctgaaaattgcaaaaaacgaacctgcattttggaaatgttaaaaagattggagagtgattagagataaacgcaaaggaatatgattgcaacctcacagcttgcacaacaataaccctttgcttccccgtatatttatactatattttgtttgtaactagtaactagtaactagctacacaagaaaaataaaataaatataaaactagtgagtatagtaatgattaggtccaaatatttggaaataaaaggaaatagtcaattttgtacatca

SEQ ID NO: 5348 - DNA, 722 bp, Arabidopsis thaliana landsberg
atacaggttcggtttttcaaattatcaaattatttttatagcaattaagcattaaatggttcatattgggatttgataaaattattacttgtaccatgaattgctattttgcaggagatagttgtattcaagtttaacgttcttgatgaaaaaatcaaacgtgatgttatggaagttatctgggagttttcaggtacacaccaacacaaacctatggttatattaaaccaaatgaatcaaactatggctggttctttttacttaattttaatctatttagtctttaaaacaaagcactattgttttttggttgttaggaattacttcggtagagttgaagagagatcatcaactagaggtgaagggaggagaatttaataaaatcgcaatgtcgacaaagctaaagcgcatagatgaatctgttagccttatcatcaacgatacgcgaacaaagaaattgggctttagtttatacgatctatatcgatgagaatctgagcaacacaagtatttgagcaaaaatatatatgactccattttattttctgatgttttaattttcttgggaattcttttccacctcccttaattttttttttgaatgaatgtaattttttttacctgtattacattaagtgcatcttttttgaaactatgctacgattgtatttgatggttctacagatcaaatcctagtggaaagccaatatatgaagaggtct

SEQ ID NO: 5349 - DNA, 571 bp, Arabidopsis thaliana landsberg
atgttcaacacagttgctattggatatatcaatgatccttatacttggaaaccttaaatttgcggaggggttatagacgggaccataaaatgcatttgatccgagcataagaacttttaaatatggtagagatcccaaccaaaatggaaacgtgtccatgattttgtttcctttcacattcaaaaattcaatcctctcgcagttgatcaacgattttggaagtttacccaccaaattattgctgctaacgtcaagtgatcgcaactgagagtccttaatgaataaatctggtagaaccccacttagactgttgtttctcagatttaacgtatgaaaataagtggaatacttcaaacattgaggaatggaaccattaaaatggttgttggacaaatccaaggcgtataaatctttaaccttgcatatccatttggggaatggtccgtcgactgaatttgaaccaagatttaacatagttaatgatgctccatcgataacttccactgatttggcgaagcagttgaaagaattataagaaagatccacataatccaactttgaggatctccat

SEQ ID NO: 5350 - DNA, 587 bp, Arabidopsis thaliana landsberg
agacggccttaagtttctaacccacatgaatcaatctctattgatttcttagatttgaactgatgatggtaacgtagaggagctagcgttgttgctacaagcgcctccacataaccaaacatctgctcctaggaacgtgtcaaactgccgaaaggagtccaattattatactaaaaggagcatgattttccatcacctactatacatgaaagaaaagtttttgccaatgatcttagctttatttttttgaataaaatgttaaaattcaaaataaaaaataattgttttacaacttgtgcaaccgctttttaatttaaataacaacaaacacatctgaataatttggaaactaaagagtattaagaccgaaaggcgaaccacatttgaagtcctttgtcgtatttttatctcccttctttttaatagctgaaaatgtgtttcagatatgtttatctatccactgaatgagtctagctactgggtttggggtttcaccatgcattctccggccatttcgttttctccaaattgtatataccgatgcttctataacactttgagccgaaaatccagcgaccatgtcatgg

SEQ ID NO: 5351 - DNA, 582 bp, Arabidopsis thaliana landsberg
ttcccgtttgatgctttcatcagaaacatccatcttgttttcaattgtctcctcctggaaattagaagttcattgtataagtgataactatattagaattcctacagtagataataataaccattgaaaattaatgacttgaaactaaacagaaaactgaaaaaaaaaaaaaaaacgaacctgcatttttggaatgttaaaaagactggagatgaaggaatatgattgtaacttcgcaggttgcacagtagtaaccctttgcttccccgtttatttatgcaatgttttgtttgtaactagtgctcaatatagtaatgattaattaggtccaatcataagaactataaaacaaaatagtcatttttatacatcaagaccaatacaaaaagttttgagtctctttgtataacaagagaggtagaaagtgaaacaaatgaatcaagttaagtctttctaaatgaatattatcaaaaaaaaagaataatgaaatatttaatggaaggtggcatggtctcttactttagtggtgcgcttcaactaataccgtgtcatagaaaatatacgaaatttggttttcgtaac

SEQ ID NO: 5352 - DNA, 783 bp, Arabidopsis thaliana landsberg
gaagtgggcttgccatcattaacataaggcccagtttaatgccaacaccgactatcttataataggtgacggggttacccttgggtccactgcaaaactgtgtcgttttaggtggtgcgcatttattactccatccgagtaatccttttggtgtaggacacgcgttgcacatcccacgatcgcagtaaccgtaatcgccgcaaaacgagggtaagccacattgacggacgaagtaagtggagaagaatgagaaactctcttcccatttgagatacgtagctgctgggaaatacgagtaagccttgagactcccgtcagatccgagtctaagatacgaaatcgttccgttgtaattgattttgttcagatttaaagttcctcctccgcttccgattggtctgacttggagtaaccggcggttattacccggttgtggtgccggttctaagagaagctcgtaagctgacggctccgttaaattatcgaattctcttgtaacggcgaaagtgacggtgccgcggaaatcgtgatctggccatccgccgtaaactaacggcgtaccggttttgttaacgtacatggttaaacctttggtgttcaacaccatgctgtacggaccatctgagccgttcgaatcagatgtacggctaacgagtttgttaactccgttaacttttaacgattggcccgtgaagagtgtatcggtggggtgatcgaaactctgccatacgaatttgccgtttttgtcgtgtaggacgatgttttccgtgggttagatttgga

SEQ ID NO: 5353 - DNA, 931 bp, Arabidopsis thaliana landsberg
gtacggcatatttactagtcccttttcagaaaggtaatcaatcaaaacaaacaaaacttctcccaatctctttctctggatcatcgtcgccttcacttccaccattgaatctttgttcctcgggtcatccttcttcctttcgtggtcacccctagcctttgatttaccctttcctcgtactgtttcaataacccagacattttcctttataaatcccgtctttacaagttgaatttgcaagtcttaaaagtaggattaagtaacattcagtcacctttgttacttcctcgttttgtttcttaaacaatatcaacaaatttcaaaataaatgagaatccacgtagcaagactaagaaacagtaccaaaatgaccatacgagtatcacaatataactactttaaaagacgctattaagagattgcacatgacatgagtatccaaaaccaacatgtatctaaactcgtcgttagtgttcagattttccaacgggcctttcttatttgggcctctgatttgggtccatcaattctcgttgtatctttttgggctatacgaaatacattaaccattccattctgaatctctgattacgtcatttgtttaagtgatcgatcgatgagtaataattcaactttggtcaatttcaacttgaattgtgtagaacgcaaacgtgaattgtgtgtcagctccgatcactccttttatcacaagcggctctagtggagctccggccaatctgatcttttgaattttacaccaaaaaaaataataatggtgtctttggtcaattcttctctaacatgctcaagccttactctgaatctccttcccattctgcgtacggaaacaccttcactctacacgaagcgtcgagcagcttatgtggcggctacatcttctagagatgttaacgataccgccgctgattct

SEQ ID NO: 5354 - DNA, 2738 bp, Arabidopsis thaliana landsberg
cttcttagacatgacaaaaagctccaactttgacagggggggcgtaaaaacttagcaatacgaagcaaatgatgaacaaaaaaagtcaccatctttgtgaacaattccccaagcttttccatgtctaccatcctgcatttgaatccaaaatcaaacaaatacccaaataagataaacaaacccaaaatgatttcgtaatagaaacattctcttagcatgagataaacaaacccaaaatgatttcgtaatagaaacattctcttagcatgcgaaaaatgtaaacttttcaattttcagagatgaaagagaaggagaagaagaaccttatagagattgatcttagtgatttcataagagattccgttccaatgagctttagccatatggtatccgattccccaattaggtaagaactgagcaacttcgattaagttcttcttctttcttcgtttcggtttactcgaatcggagctagggttttcactcgccggcgccgcagagaaatttcttaagagattaagcgagagtctgaaagcaccaacggtttcggttctagagattgctctgttaataagtgtcatcgccatagtgtcgctctcttcctctctctctctctctcaagtgtcagccactgttgaagatcggcgactgaggttgaggaggagaagcacaacttttggtttattcacaaacagactatatgttataattaatttggttctaggtgggttttgttcggtttagaagattatctgaaacagaattggctgtatggttccattacatagcattgttctgaataactaggatttttttgttcttacacaagactaaaagggagattagaaaacaaaacttttgatatatcctacaaaattgatgacccttttcgatcctcttgtgatcatccaacgaaattgacaatctttggaccttgtttctttttcttcacctcgacactattctgagctgaatcatcagaggtattgatcttcttgctgcttttgggctcttcagtgaaatcgtcttcaagatcgtccccactaaacttagtgagctttcctcttggtgtagcatcaaatcctgtcatttcagtcagggagatacaattatggtctttataagataaatgagatcgcattcactgttccgaatcacttgaaagagaaactacttgactaggatcacataattagaagctcaagaattggaagagtgagacaaaagaaaatgttacttgaagtcttctttggttgggctgactcttggttgaatttatcaggacagtctttgacgagatgcgccacactcccgcacactttacaacacccgccctgcaaaagaaggcccaccaaatccattgttcaacatatcaaaactcatcttctatgaggaaaagaaaaggctcgaaacaagatttgagcattgtaccattgggtagattccatgcttgttttcgggacagttcttgcttatgtgcccttgtcccttgcatatgaaacaacttgcaaatttggtccctcctacaaaagaatcaatacagcaaccaaatctaatcttagtgactactcttaacaaacaaacaaacaagtgacagtatagcctcaaatacgttttcagagaatataatgttaaactctctaaataacatgaactacacttcagatcataagtcaaatatctgtgtacagaggtaaaaaaaaatacaaatttcgatgctaggtttcctgaaatcttgtaatatgagaaaagataaatattccggatccagagaagagaaaaattaccatcttccatagggtaaggacaatgggaaagtgaatgaccagtatctccacaattgtaacagagcttcttctcggagctctcattgttcttttcagggcagtttttaagactatgccctctcctcctacattgcaagcatatctacaaacaacaaaaccaaaaacattcattttctagtaaccaacaagtctaatgatcatcaaagtaccaacatttcatgaaaaaattcatctttgagttcataaagattaaaccctcaactgattctaacaagagctgccaaaaccctactgaaatctaaaactaaattgaactaaaaccctaatcccaaaaccaatgattaaagaagaaaagaacaaaccttgtttctctcccactcagatttttcaggacaaagcttagcaatatgggttttggaatgacatataaaacagccttctccaggtttcataccaggaactcgaagaggatgtcttgtggaagagcctgttctctgaggtctatcagtggaagatccaggtttctttttcttgaacaagcttttcttcttcttcttcttattagggtcctttggtggcgttggttctgcttttggaaacagctctggattagcttccttgtatcgcttctgcgcaagtcttctcctttggttcaccattgttgactactgtaattagagaaagacacgattgatttcgccggcggcggtggaggcagtgagacgaggaagacacacgtttgtttggtcgttgaagaagctcttgctaggggatgttgtgatttaaatgggcttcaatcatctggcccactgttaatagacccaaatattcatatacctaatcttgctaagggatattgtgtttaaatgggcctatttaaaattttagaacaaccagagtcagagtcaaagttttgttggagccggtcatgcctaactttttttttttttt

SEQ ID NO: 5355 - DNA, 1632 bp, Arabidopsis thaliana landsberg
gagaaccttataggattgtcttagtgtttcataagagttccattccagtgagtttagccatatggtacccgattccccaattaggtaagaactgagcgacttcgattaagtttttcttctttcttcgtttaggtttattcgaatcggagctagggttttcactcgccggagtagatgccgccgccggcgccgcagagaaattccttaggagattaagcgagattctgaaagcaccaacggtttcggtactagagattgctctgttcataagtgtcatcgccattgtatcgctctctctctattgtttcagccactgttgaagatcggcgactgaggttgagacagagaagaaccacaagttttggtttattcacaaacagacccaatacaattttataaattacattatacccccgttacgtatgcattttaactaactttaccccaaaaatccaaactttgaaattagaaatcgaataagaagtgaaaaccgaattgagaaggacagatacgctaaaacagctgaaattgggtagctttctttctccgcaaccttaaaaataagaactttcctcacactttactcttacttacatactcttatcgttgttaccagaaaaaaaaaacgaaactttattgagtatttgtctatttgaatttctctcaacttctttttttttgcttcacatcgttcacatcaattagtttctatcagctccagcaaatggttagtgtgttcatcagctaaaatcattaaggattgcgttacttcttcttcaggttggattatattttgggtttaataattttagattcatgaaatatgtgtgtttgtttgtgttgcttacgtttgtattattctctaggaaggactagaaatgagaaagaattgattactccgtattgagtgtgaagatgacgaggtggtctatgtctatgcactgcacattgttcttgctatttctgttgaggattaaatgtgtattctcagattccgattatttgatcggtcttggaagctatgacataacgggacctgcagctgatgttaacatgatgggatatgctaacatggaacaagtagcatctggtgttcacttcaggctcagagctcgtgcgttcatcgtggctgagccatacaagaaaaggattgcttttgttaatcttgatgctggtatggcctcacagcttgtgaccatcaaagtgattgaaagattgaaacagaggtacggtgagctttatacggaggaaaatgttgcaattagtggaactcatactcatgctggtccaggaggttatctccaatacattttgtacttagttacatctctcgggtttgttcatcaatctttcaatgctcttgtggatggtatagagcaaagtattatacaagctcatgaaaatcttcgtcccggttccattttaatcaacaaaggtgagtgatttagcttgtgggacacttttttatatgattcaattatttgttgctttctctaaagatatttcttttggagctgagcttgcaggggagctcttggatgctggtgtgaaccgtagtcccagtgcttaccataaacaatccggcacatgaacgtagtaaatatgaatatgatgtagataaagagatgacac

SEQ ID NO: 5356 - DNA, 1613 bp, Arabidopsis thaliana landsberg
  unsure (1)..(1613): unsure at all n locations
ctttgaattcgttgatagctttgtaggaaatctacggatgatgatctgttgttccttcttcttgttaagactttacatttcctgagttatgattttgtgaggttagctactattacgtatgaacttgatttgtaggaggtcttctggttttaaacatgtaataaacgacctcaattacgagtggcaggttttagtttctatcttccagaatttggtgaatcctaaaccaaaattccaaattttcaatatttgaaagtctccatgttatatgcaatggaagatagtcttgttggaccaatttaacatttcttccaaccataacgaaaaaagcatagttgtacccctttttccttggactgaattgcatcacagactccaaaaccatcgttttgattcacctttaatgaaagcagtttttggttgaaccaatgttagtaaagtattattaggaatccacatatgaaccaatccagtatcatatatatctaagtccttgctttaatggatatatcttcatgtaaccaaagatctccaagtatatgagatgggttttattcaatagctttgtggttaacaaagaaccaattttaaaatctctattgaaccagtttgaatccattaagcagcaagaagatcaatacctctgatgtttcagctcagaagagtgtcgaggtgaagaaaaagaaacaaggtccaaagattgtcaatttcgttggatgatcacaagaggatcgaaaagggtcatcaatttttgtaggatatatcagaagttttgttttctaatctcccttttagagttgtgtaagaacaaaaaaatgctattttattaagaacaatgctatgtaatggaaccacggccaattctgttacagataatcttctaaaccgaataaaacccacctagaaccaaattataacatatagtccttgataaggatgtaagaaatgctaaaattagtgtgaaaaacgtccggaaagaaaggatatggttaggcgaatttgaaggatagagagtaaaaaaaggtgtggtttgatgttattagatggagaggtattaatggttgtccgagttcgtctccattggcctcttcaaatcaaattaagaatctcttattcccccaaatttttcatttctctttttcttcattcttcatctctcctcccacaaaagaggacaaaaaaccaaataacgagaagtcccatttctctttgttgtcttaggtgttaccttcatcaaccaaacgcaatggtatgttttctattatctttcttcttcttcttctttgtaatgaagttgtgtgtttagaaatctcagctttgtttcttgttctgcttcgattgtttggctggcttgttttctttctttacgttgacatgttattactgctgtttcttttttgtccaaataaaacaaaggattcaaatggcaaatgcaagaataataaatggaatgtgaatatgatagagatggatagaatatgaaatttagagaaatatattcattttcttgcaaataatacattntgttgtggaactagtgtatttttttttttagtttttttcctagaggagtgattggaatttcttttccatgaactttattgtaaatgtta

SEQ ID NO: 5357 - DNA, 4097 bp, Arabidopsis thaliana landsberg
tattcttactttttctctatcagtatcgtgaccattgtatacagtaaagtgacagtcacattttaaatctgttatttattagcggatcgttgttttgcctaatttttaatcctgaaattaatgcttacactgattttttttttaaatggtcaacttgcatatgcacaagactagtctgattcaaaactgtccatatgtcatttaaattttaaaaccttaattttagccacaatttattataacaaagcgtattaaaatgcttatattgctatgggttttttaaggaagaaaaagaacacacatgataaagctgaaaggctgtaagatatggcagccttttgcttttatttatttctaccttactttttccgataaattgaaaacataaatattaccaaactgaaaaaccaagaaaataataataataataagaatagcttagaaggttgggtctgtggaggagtgggcctaggccactatttctggcacgcgatgggtacactttacccagcaccatcaccatcatcttcaacatgcatacattttatcatgattcttagtaaatttttatcattgcttttggtgttttgttgttaattacgagcgttttaattttgtttttacatatgcgtgggaggatatcatttccatgttttagtaacagagaagagacagaaagttatgcagaaaagatccttctaattgaaatgtagctagaaattaggagtttgatctatttttttttgtcaaacgcgtattaatggtctacaattgtttcccttaagttgtagaaacattagactttgactacatatataattacaaactataaataaaatgaaaatgactctttgcatttatataaatgataagttatatattgatgtatcaaattcccgaaggataaaagtttcatgagaaaagaactttacaccgcgagtcaagacaatattgtcacatacaaaataaaaggtagaatggatttgaaatcatatgatacgtctagatcgaaattgtataattataaaagattttgacttaaaaagcaaaaatagagagggtggtaccaaaaatagttgaaacttgcggtgcaaatcaaaacaagaaaatgtttttgtcaactttttatttattaagatgatggccactattgttcattgcttgtgactcatgcgtcgcttatgccattgttttgttttgtatgattaaagggccgcaagaaacgacgtatcatattgtcgtttatactttttctttatacacatcttctaatctcataatcgcattattttttcacttattggtggtacttaataagtgatacttttcaatcacttcctgttaatctgcattgggacgttatcacgtaaatgatacctttaacacactttttgttttgttaattttggtttggcgtctaattttgtataataaattcaaaatatcgaactgcacatattacacatactaaacgttaacgaatgcacacacatgtgtatataactacataatgcgtatttaattttcgcatgtggatatcgttaatcgtgcgcctaatatttggcttcgaagtctaaagatgtttagaatcatgcaacgtgaaaaaacattggccatggaaggcatgatacaaattagacttgtggagtgtgtgtaatcactatcatctctgacaatcgttaacttagacattaaataaatccaccatttagtttaagaaaaatacatttattgaagtctgaaaacatatattatacaattcgattttcttgaagtggagagaaatttacaggaagaatagttccagaagtgcttgggaaaatattggaaactgataataaggccaaatgagcccattatattatacggtccttgtaaagcccataaattgaccgaaatctatcatgcttttctattagttttttttttgtgtgacagaaaagagttttctcaccagcaaatctaatcattgataatctatggatgcctatggtaaagtttcataattcagaaactctactttggttatttacggtatatacacttttatagcttagttgatagaaacatcttaatactatctcaagtatatggtgtggtaattaatcgttgactttttgtattaacttttttatttttcaaacattttctcttcattaactatctcaagtcacatgataaaacacctagagagacccagctacagttgtagccggagaatatatttctttttaaaatgaaaaacagcaagacatcccaaaaacaaactaggcaagtcttaacagactgcatgtcgtttttgctaaacagaggtttcttcttatctaaaaacggcattacaataaatctgtgaacaccttttcttttccataaaacccctttcatttgccataatttacgactatgtccagctaatcgccacgggacttcccaccacgtgtttcccatccgaccattcaatactcccaaagctgttagatccagacggcttcgaggagtccacagtaaacgtcaccgtgtacgattttttctcgttagcttccttgaaattcaaaaccgccggttcaaccgaaatcttgactcctgtcgtctccgaagttactttaaccgagtaagtcccagctcctcccacgctcgtcaccgtgcgcgtgtacttatacgcaccggctccatcaacgttaacggcgaacgacgggtagttcaaatcagcgaccaagtacgatttactcggatcgcaagtgtaattacgtctcgagacacttcgaatttgcggcgatgtgtaattcaatgcgcagaggaagcctaagtaatcctccgtcgttagatcgtagatgagtcctggattagtggcggttgttggtgacacgtgtcctgcaccgtgatcgaacggcgtcgaaggcttccctgtcgcgatgtcgagtaacggtttaccgtctttgtaagttttgtaagcggtggtcataagcgccgatctaatcgccgccgggctccattcaggatgcaccgacttgagaagcgccgctaaaccactaacgtgagggcaagacatcgacgtcccagagatgatattgaactccacgcggcgagaatcggaggcgagtccggttggtccagcagcaccggtccacgcggcgaggatgtttactccaggagcgatcagatccggtttaagaatattcggtgtaatcgaattcggtcctcgtgagctaaacgctgcaacaaccggagatggtttaacaccgacgactgttcctaagattgaaatcgaagcggtgggattaggatcggttgtcacgtaatgccggattatatcaccggctttttcaccaacggtggtcgccggtaacaaatgagcatccgcaacaagctcttcaccattcgccgcagtgttagccagaatcattccaactccacctgctgctttcaccacatcacctttctgaactctagcattaattcctctatcacacatcacaatcttcccctttactttctctggaatcaaagttccggtcatacagagattaccattagtagcattactagcattcccagcgtagataaacggcaacaatttatcaggtaaagcttctcctttaaacaaagaaactccggtgaaatttttgccgttaccgagaatcgcaagcgccggaaaatcacgatctaaagtaccagcaccaacagttgtgatccatggagctacgtttgataaactaaaactactcggaccagcattaccagctgagcaagatactaaaatccctctttccatggcggcgaatgctccgatcgcaacaccgtctctataataatccgacattccaccgccgagtgacatcgacaggacattgacgttatcggcgatggctttatcgattgcagctaaaatatctgagctgaaacaaccaccgagccaacagactttgtaaacagcgacacgagcgcgtggagccataccacgagctgttcctgaagcgtagcctaataagctagctccttcaacgacggatccagcggcggtcgatgaggtgtgagttccgtgaccggcgtcgtctctaggagaacttgattctttagattcatcgattgggcccatc

SEQ ID NO: 5358 - DNA, 4201 bp, Arabidopsis thaliana landsberg
gtagggactatggggttttcggattccggtgtaagtgagttgggaggcagtgtcggaggtaagggagttcaagattctgggaactgaagatttggggttttgcttttgaatgtttgtgtttttgtatgatgcctctgtttgtgaactttgatgtattttatctttgtgtgaaaaagagattgggttaataaaatatttgcttttttggataagaaactcttttagcggcccattaataaaggttacaaatgcaaaatcatgttagcgtcagatatttaattattcgaagatgattgtgatagatttaaaattatcctagtcaaaaagaaagagtaggttgagcagaaacagtgacatctgttgtttgtaccatacaaattagtttagattattggttaacatgttaaatggctatgcatgtgacatttagaccttatcggaattaatttgtagaattattaattaagatgttgattagttcaaacaaaaattttatattaaaaaatgtaaacgaatattttgtatgttcagtgaaagtaaaacaaattaaattaacaagaaacttatagaagaaaatttttactatttagagaaagaaaaaaatctatcatttaatctgagtcctaaaaactgttatacttaacagttaacgcatgatttgatggaggagccatagatgcaattcaatcaaactgaaatttctgcaagaatctcaaacacggagatctcaaagtttgaaagaaaatttatttcttcgactcaaaacaaacttacgaaatttaggtagaacttatatacattatatgtgtaattttttgtaacaaaatgtttttattattattatagaattttactggttaaattaaaaatgaatagaaaaggtgaattaagaggagagaggaggtaaacattttcttctattttttcatattttcaggataaattattgtagaagtttaaaagatttccatttgactagtgtaaatgaggaatattctctagtaagatcattatttcatctacttcttttatcttctaccagtagaggaataaacaatatttagctcctttgtaaatacaaattaattttcgttcttgacatcattcaattttaattttacgtataaaataaaagatcatacctattagaacgattaaggagaaatacaattcgaatgagaaggatgtgccgtttgttataataaacagccacacgacgtaaacgtaaaatgaccacatgatgggccaatagacatggaccgactactaataatagtaagttacattttaggatggaataaatatcataccgacatcagtttgaaagaaaagggaaaaaaagaaaaaataaataaaagatatactaccgacatgagttccaaaaagcaaaaaaaaagatcaagccgacacagacacgcgtagaagagcaaaatgactttgacgtcacaccacgaaaacagacgcttcatacgtgtccctttatctctctcagtctctctataaacttagtgagaccctcctctgttttactcacaaatatgcaaactagaaaacaatcatcaggaataaagggttcgattacttctattggaaagaaaaaaatctttggaaaatggatcaaacagaggaaccaccactcaacacacaccagcagcacccaggtagattctaatttcagaaacttattttttttttaagtgacaatcctctgaatttacttaaacttattgtgatttatggatacagaagaagttgaacatcatgagaatggtgcgactaagatgtttaggaaagtaaaggctagagctaagaagttcaagaacagtctcactaaacatggacaaagcaatgagcatgagcaagatcatgatttggttgaagaagatgatgatgatgacgagctagaacctgaagtgatcgatgcaccaggttactttcttttgtagtttcattcaacttatgatctaaaaactattggttattcaattttgcgtgacattaacggtttggtatctgtatatgcaggcgtaacaggtaaacctagagaaactaatgttccagcatcggaggaaattattccaccagggacaaaggtgtttcctgtcgtgtcttccgattacaccaaacccactgaatctgtaccattacaagaggcctcttacggacacgatgcaccggctcattctgtaaggacgacgtttacatcggacaaggaagagaaaagggatgtaccgattcatcatcctctgtccgaattgtcagacagagaagagagtagagagactcatcatgagtcattgaacactccggtctctctgctttctggaacagaggatgtaacgagtacgtttgctccaagtggtgatgatgaatatcttgatggtcaacggaaggtcaacgtcgagaccccgataacgttggaggaagagtcggctgtttcagactatcttagtggtgtatctaattatcagtccaaagttactgatcccaccaaagaaggtaagaactttgaccttttaagattgtgtttttctttagtgattatgaatatgtaataactctgttacgttgtgtttggtttagaaactggaggagtaccggagattgctgagtcttttggtaatatggaagtgactgatgagtctcctgatcagaagccaggacaatttgaaagagacttgtcgacgagaagcaaagaattcaaagagtttgatcaggactttgactctgttctcggtaaggattcgccggcgaaatttccaggtgaatcaggagttgttttcccggtgggctttggtgacgagtcaggagctgagctggaaaaagattttccgacgagaagtcatgattttgatatgaagactgaaactggaatggacacgaattctccatcaagaagccatgaatttgatctgaagactgaatctggaaacgacaagaattctccgatgggctttggtagtgaatcaggagctgagctggaaaaagaatttgatcagaagaacgattctggaagaaacgagtattcgccggaatctgacggcggtttaggagctccgttgggaggaaattttccggtgagaagtcatgagttggatctgaagaacgaatctgatatcgacaaggatgtgccgacgggatttgacggagaaccagattttctggcgaagggaagacctggatacggtgaggcatcagaagaggataaatttccggcgagaagtgatgatgtggaagtagagactgagctgggaagagacccaaagacggagactcttgatcaattctcaccggaactttctcatcctaaagaaagagatgagtttaaggagtccagagatgattttgaggagacgagagatgagaaaacagaggagccaaaacagagcacttacacagagaagtttgcttcaatgctaggttactccggagaaattccggtgggagatcaaactcaagtggcgggaactgttgatgagaagttgactccggtcaatgagaaggatcaagaaacagagtctgccgtgacgacgaagttacctatctccggaggtggaagtggagtagaggagcaacgaggggaagataaaagtgtgtcgggtagagattatgtggcggagaaactgacaactgaagaagaagacaaagccttttctgatatggttgccgagaaacttcagattggaggagaagaagagaagaaggaaacgacgacaaaggaagtggagaagatctctaccgagaaggcagcatcggaggagggtgaggcggtggaagaggaagtgaaaggaggaggaggaatggttgggaggattaaaggatggttcggtggtggtgcgactgatgaggtgaagccagaatcgccacattctgttgaagaggctccaaaatcatctggctggtttggtggtggtgcgacggaggaggtgaagccaaaatcgcctcattccgttgaagagtctccacaatcacttggctccactgttgttccggtgcagaaggagctttaagaatatgagaactgaaattttcaagtttcactttggatgtttatgtgtgttttgtttgacgtctttgatgtattatggtataattccttgtttgtgtgaaaaaaggacatttggttaataaattgttcggctttggattaagaagttcctccataccagctactaggtctaaagtgggtaaaatcattgga

SEQ ID NO: 5359 - DNA, 249 bp, Arabidopsis thaliana landsberg
cagggaatatcatattcggcaagcacattcttacaccaactctgatgaatgaggaaaagggaccctcttagtggggatctatcgaagcggaacgggcaaggcatatagaactcttgagtcagaacaaaaatacaggttaatcgactcatacatcctcgcttgcttgttgtggtagacgtctaccctgaagatgaattgatttcttatgttcagtgcactcactacttaatagttccatgtttctatcac

SEQ ID NO: 5360 - DNA, 1478 bp, Arabidopsis thaliana landsberg
aatcgaggatgaactacagttgaatgaagcttggactgatccatcccctgaaactaaaccaaatggtgatcatatatcctctgtttttttcagatggagcatggaagcaaagtaagaactgcagtggagcttcccgttactggcagaacaagtgttgtatatagctttatgttattgcattgtaacatttgtatgtgtttctgtctcaatcttctctcgtttcatattagggatctgatgtgattatttgggaacagtagttaactaatgtattaatcttctctgggttcatttcatattcatgctacaaatcaatggaaaattgcaagtactgaaatttcaaaaaaaattattattaaagtgacacattgcttacaaaacattatatcaaatgccaatacaacacaacaagaaggaagacttacgttacatatgaataccacaagaaatcaaacgaatttcaaaatctttacctaaacattagaatataccctaactctagttagcctaatcttagagtctctgttcataaacattgcctgcgaaacgtatatcattagaacaaaacctctaaaaccctaaccctaatcttgatcctcttcgaacggaactcgcctacacaatggacacgaattttgacgagcaatccacttaaaaatacatttttgatgaaacgaatgcaaacacttgggcatctgaatgatgctgttatgataagtctccgataacgaatcagacaacttctcaaaacagattgaacaagactcatcggaatcaatggccggtaccacagtttgttcctcaagcaatctctgaaacacatccaccggagcaccactcgacggagcagaaacaggggatatgataaaccgaacctctttgatgacactcactttcaccgacataagaaaaggtctttggtaaagagtgtaattagcacgcgaaaaccgaaaagaagagatcttctcagccacagattcacagaaagaagtctcacggtgaagttgacgacgaaggagacgagagaggtcttctggtaggaagctacgtggcttcaggagaacatgagagattggcgacagtgatgccaccacgggtgttgttccagtaacatcctcgagcatctcatggattacttcgtgtagttcgatttggacagcactcttgaaccctagattcgaaggtagcttcgacatcctcgtatccacttgtagcctcaaagtttcggtttccatggtgaagaagaaatagaatgatcaaaaccctagtttcgttcgtttgcgacaagaaagagagaacacaaaataaaaaaagatagagatcgattgtgtaaagaagagagagaccacagagagtgagagagtaaattgttttcttcagatgattccttgattatatttacacagagatttaatatacagaatccaagttaatcttaaccgttaattcattggttccttttttctgttgtaatctca

SEQ ID NO: 5361 - DNA, 597 bp, Arabidopsis thaliana landsberg
ctctttcctttgcaaatccttctcaagggacagcgagaaactggtgggaactgtgccatggccggctcctctttggcctccatcaccagccatttgtctccgcctctttctccaagtccatagcttatcacaaataacaccaacaaagaagaagaatgcgaatagaccaattgcattacgactaatcggtggagacgggattgggtggattacacctagctgagtcctgagcttatccactataggatcttctctaaagttagtgaaattgtttctatcaccttgaattgcagactcctgtgaagatgaagatgcttcttcatcctcaaattcattcgaaaaccgagtaaccacaagacttctggcagctcttctcgccgaatccgctaatccaatgttcttggaatccgtacgaattccgctggaaacaaacctagaattcgaattcgccgcatgaactcgacggagaattctccgcctctttgtgaatccatcggagaacacaatcagaccgtgctcattggagcaaggacagagcagacgacgtgacacaaaagaagggaaatcgaaactagaacaagaagaagaagcctgtag

SEQ ID NO: 5362 - DNA, 3343 bp, Arabidopsis thaliana landsberg
  unsure (1)..(3343): unsure at all n locations
tctgggatataccaggagaaacctccgctacctttcattcctggctctgattactccggaatcgtcgacgcgattggtcctgccgtcaccaaattccgcgttggagatcgtgtctgttctttcgccgatctcggttccttcgctcagtttatcgtcgctgatcaatctcgtttgttccttgtaccggaaagatgtgacatggttgctgcagctgcgcttcctgttgcgtttgggacttctcatgtagcacttgttcatagagctcgtttaacatctggtcaggtaaaaaaatctcatcttttttattcagtttttttgcttgatgtgaatttgagtttataaaggttgagacttgatagatttttcattggttttgatgcaggtcttattggttctaggtgctgctggtggcgttggccttgcagctgttcaaatcggtaaggtttgtggagccattgtcattgcagttgctaggtaatatacttgtttagactcatttcacttttggcttccatgatatcggttctggtttttgaatctcttacttttttggtagaggaactgagaagattcaactgttgaagtcaatgggagtggatcatgttgttgatctaggcactgagaatgttatttcaagtgtgaaagagtttatcaagacaagaaagcttaaaggagttgatgttctgtatgatcctgttggagggaaactaaccaaggagtccatgaaagttctgaaatggggagcccagattctggtgataggtttcgccagcggcgaaatacctgtcattcctgctaatatagcacttgttaaggtaaacaaatggtttgtgttgtattatagagaagaagaagcttttcacttgagagaatcaaatcttcataagttgtagtaaccaattggtgcagaactggacggttcatggtctttactggggtagctacaggatccatcagcccaatgtccttgaagattccatcaaagagttattgtcatggctttcccgaggattgatcactattcacatctctaaaacctatagcctctcccaggtgaaaacattaactcatcttcatgacatcaaaactcaaaacatgtaattaaacacttaccgttttgattacaggccaatcttgcattcggggacctcaaagacaggaaggcaattggaaaagtgatgattgctctcgaccacaagactgccctgtcttcaaaactatagactctttatggccgtaggagaaaacagcttatgtattctagaaataaggttattgcaatggccatgtaagctgaaccatcttgcatttatatctggcatataatcgacattctgatttgaaatttcaataaacgttatcgaattgcagtttgattctctctagaaattagtgtagttataaatcctttttgtatatacattgttccaatcaagaatacattttccttcaatcaagtaaagcttgcatcctcctccagctccctggccttgaacttcacttttaccctcaacaacattgttgtcatgatcaagaaccagacagagtttacatccaaatagttgcatgtggtttactgcccataccagtggactcacgctatcaaattccttggaaacgtctgtgaactttgcaatgtcttcttcatcgatagcagaagcaaggtcctgttcatgagaataaatgtacaacacttaacatactntatgtaagctactccccaatttcttacaacaccagagtttaaactttaccgctaagaacttgcattcccgtgttccagtaaaagttggatccagatcttgcaaaaaagtagaagttagaaaacatgtcatagttgctcaaaggaccacaccagaatgtttatgttacgggtgtttgttgtggaagaagaagaacctgatacttctccagagcgttagtgatggaaacaacatcggctttgcataagtggcacatgccagcagtgagaagatggcccttaactccatacttgagcaagttattgttgagtgaatggcgtgctatgtcttcataaatcttgattgccttctcatacctaccaaagatacaacaacaagcctattatcaatcaatcggtcccaaagtagagaaaaggctataattgctgtgctcatgcatactgcatagagaacatcacaattccatacaatgacaagtttgtggattgacaattcgattttaacagggttccatctgagtactataagcacttcaatgctaagggatgagaaagcaaaaagaaaggtaatgtgccgaaaatcttactgctccagctgggcggcatattgcgcaacctttagattgcactggtttgcagaagtggtcacttcttcattctgaaagaattcagctgccttttcaaagtaagcaatagcctgctcgaacttctgatcagattcataatactcagcaatttcctgtcaaaagtaaaaaaccattaatgtacaaattagtccaaatacagcaagtcagcaccatgcttactttagtttagaaaagaaaaaagacaatctgaatccgactgaacatgcataaagaaacaggaaccatggaggaaatacagaagaagtgccccaataaaactatcttctcagtatccgtactaaaagaataatatctaattcatgctcaaaagagacaagtggtaccttgtaatatcttgcagccatgttgagccttcctatctcacaaaatatattcaccgctcgctctaggcaagacgcagcctctgcatataatattaggacgcatgaaaacacataagaattgataatcactcttgcattacagagatgacaattacaaaagtagctttatacataccattagtgtcaactttcttgtagcatttagcagcctcagcataggcgttagcagcatcatgtttgctatctgactgcagatgcaatcatgcaaatcaatgttatcaaacaatccacacattagtccagtatcatatatatgtgttgccaaagaattaacctttaagtgacagtcggcaagttttagataagcttttccagcttgatcccctgaacaatcacaaatccaacacataagtaagaagatagcgttggagaattaaacaaatatcagaaaagaacatgaaacctattaaactcagccaaatagaacccaaattaggtactataattgtgccacttatcaatgacttgctagaaggccagaaaccaatatcaaggaatcagaatgatgaatctccgatttaaaatgttttcgtgtgaaattatcaaccataaatttcttacagatcaaaatagacctaatataaacccagatactaattctacttctcaca

SEQ ID NO: 5363 - DNA, 1913 bp, Arabidopsis thaliana landsberg
attaatatgccaaatcagtcattagttttattttaataccgttgaaaaaatgcaataactcataggtgtgccgcagcagattttaacccatcaattttataggaacagagtgtgtcgtctctctacaacagtcgtaggcacattaatactataattgccttaaaaactccgttgagtagacaaaaagagtgcaattccaaagcatttcttattcttatagattttaaaaataggaaaaaggtgtaaatctgcgaacattttggattcttcacgtttgtttatattttgggttggctctacacctactctcagaagtcataagccaagcaaagggggttttagggtttttgaccgcgagccagatctctttctcttgtttctcccacttccgaatcaatggccttctcttctctcctcagatctgccgcctcctatacggttgccgctcctcgccctgactttttctcgtcgccggcgtctgatcattctaaggtcagagacgacgttttacctttaatcgatgttatgttggatatgtttagcttcgtttctgattctcttgcgtttctgttcgatttgattcgcttttagcttaggtcgtgctttgatctgcttgaatttcctttttacgcgcctttggttactttgaagaagttgtttgatgtgataaatattacttggaagttgttctgagtttcttagcgtaagcttgtgacgtttaatcctatttttgtcttcgttcttgcgttttttgtatctagtctcgtttaacgatgaatttcaacttgtgaggtttcaaatcttatttgttgctcttttagaatgtctaatggcaatacatttggagttgtttattttttatttaagtttttccaggaactttgcaagaaaacaatcgtatttattatcttttgtcacaaatttctcaggtgttgtcaagtcttggatttagtcgcaacctgaagccatcaagattttcttctgggatatcttcatctctacagttcagtgacaaattctgtaacatgtgtaaaagttattgatgtatgatgcacttttcgattctcagagtgtttgttttgtttatgtttaaatgtacagaaatggcaatgcaagaagtgtgcaacccatcaaggccacggctacagaagtgccatctgcagttcgaagtaagtaagaaaattaatagttttattggatgtgttttcctgttgtgtgcttattggtgaatttgatttgcttgagtagggtcaagtagcagtggaaagacaaaggttgggatcaacggtatgtgcttttattgattgatgccatttgtttgaagtcccagatcatcatttactttcttaagaattttcttttaggcccccaactttttccttttcttatggaagctcatttatttttgctgtgagtgctgcaggttttggtcggattggaaggttggtcctccgcattgcaacatcaagggatgatattgaggttgtagcagtgaatgacccattcattgatgccaagtacatggtaaggatgccttacaatctgagtcatgttcttgcttgcttgaacctggtatagtttgagaaaacattgaaaatgcatcatatgttagtcctctttttcactgaacaaatgtctggttttctatccccctattccacaggcttacatgttgaagtatgattctactcatggaaatttttctaattaagactaatattcgccgaagtaatttaaactgttcgttttgcaaatttgaggctagagacgatgatagcttattcattagataccattataccaatagcatagagaaaaacttaagtgactagaaagcacaagagtccatctagtgaataattcggtattattaatgaatatgacggtgatcagtaattaactacagcataaat

SEQ ID NO: 5364 - DNA, 1793 bp, Arabidopsis thaliana landsberg
gtcgactctagaggatcccccaaatagagcataagaatgaacttggaattaaatacactaataccggagtgtagtggaagtctttgcattgtccaagtccattttctctttcaatgtacctttgagactacaacaagtgttctcaaccaaacagattagtctcaaagggatcaagttgtagcacactccccctaaatatgtgcaccatttgcatatggacttgtgaggtccggggattacttgtacaacttgagcaccataaatagataacaaatgatgtaaatgcatgaagtaacatgatcaaaggcatagaacacatgtatgctatagatcaatccaagttacgcgaatctaagacatttagctcactatgcaacctgcaaaaccttttctcatctaaaggcttagtgaagatatcagctagctggttctcggtgctaatatggtacacctcgatatctcccttttgctggcggtctcttaggaagtgatgccggatgtctatgtgcttagtgcggctgtgttcacaggattatccgccaagcgattgcactctcattgtcacataggagtgggactttgctcagattgtagccaaagacccagagggtttgcctcatctaaagtagttgcgtgcaacactgtcctgcgacaacatactcggcctcaatggtggatagggcaacggaggtttgtttctttaaactccaagataccatggaccttcctaggaattggcacgtccctgatgtactcttcctatcaaccttgcatccaacataattggagtctgaatatccaattaagtcaaaggttgacccctttggataccagatcctgaagcaaggcgtagaaactaaatatcttagaatccgcttaacggccacaaggtgacattcccttgggtcagattgatatctagcacacatgcatacgctaagcataatatccggtctactagcacataaataaagtaatgaccctatcatagaccggtatgctttttgatcaacggacttacctcctttgttgaggtctgtgtgtccgtcggttcccatcggcgtctttgcgggcttggcgtccttcatcccaaatctctttagcaagtcttgcgtgtactttgtttgggagatgaaagtgtcgtccttgagttgcttcacttggaacccaaggaagtagttcaactcgcccatcatcgacatctcgaatttctgcgtcatcaccctgctaaactcttcacaagacttttggttagtagaaccaaatattatgtcatcgacataaatttggcacacaaacaaatcaccattacaagtcttagtaaaaagagttggatcggctttcccaaccttgaaagcattagcaattaagaaatctctaaggcattcataccatgctcttggggcttgcttaagtccatagagcgccttagagagcttaaacacatggtcggggtacctgtcatcctcaaagccagggggttgttccacgtatacctcctccttgatgggcccgttgaggaaagcgctctttacgtccatttgaaacaacctgaaagagtggtgagcggcataggctaataaaattcgaatagactctagcctagccacaggagcaaaagtctcctcgaaatccaaacctgtgacttgggcataaccttttgccacaagtcgagccttgtttcttgtcaccaccccatgctcgtcttgcttgttgcggaacacccacttgttcccacaacattttgctttggacatggcaccaggctccaaacttcattcctcttgaagttg

SEQ ID NO: 5365 - DNA, 1785 bp, Arabidopsis thaliana landsberg
cgagtttgcctgaaggtccgattgagcctgcaactccattatctgaggttaagcaagagccgtacaaccttccttctgtttacgagtggacgacatgtgatatgaactctgatgatatgtgttcagaggtatacaacctactcaagaacaactatgttgaggatgatgagaatatgttcaggttcaattactccaaggagtttctaaggtgggcactacgtccaccgggttattaccagagctggcatattggagttcgagccaagacttcgaagaaactcgttgctttcatcagcggcgtgccagcaagaatcagggtgcgtgatgaggttgttaaaatggcagagatcaatttcttgtgtgttcacaagaagctcaggtctaagaggctcgctcctgtcatgatcaaggaggtgactagaagggttcacttggagaacatatggcaagcagcttatactgcaggagttatccttcctacaccaatcaccacctgtcaatactggcacaggtcattgaacccgaagaagctaattgatgttgggttttcaaggcttggtgcgagaatgacaatgagcagaaccatcaaactctacaagttaccagatgcaccgatcactcctggattcaggaaaatggaaccacgcgatgtccctgctgttacacggttgcttaggaactacctcagccagtttggagtcgcgactgactttgatgagaatgatgtcgagcattggctactcccaagagaagatgtcgtggacagttacctagtagaaagccctgaaactcacgatgtcactgacttctgcagcttctacactctcccttcaaccatcctcggtaacccgaactacactacattgaaagctgcgtattcttactacaatgtggccacacagacctcgtttcttcagctgatgaatgatgcgctaattgtctcaaagcaaaagggtttcgatgtgttcaacgcgttggatgtgatgcacaatgagagtttcttgaaagaactgaagtttgggccaggagatggacaacttcattactatctctacaattaccgtttgaaaagtgccttgaagccagcggaactcgggcttgttctcttataagctcaacaacttgatttgatggtatcaacaaacttgaaatttgtctctctttttttttcttcagtctgaactacttctcccatggtttactgaaactgagtttaattattttggcaatgcaattttggattttgcttttagtttcacttgtgttctctgagagagttgaccctgagaagtaaagtcaacactagacgtgtgcgagtttcaatggactgcatttttaggtccaagaagtagctacggcccatctatcgtagaagttgttttttgtactaaagcctgttatagccgaacaaggtcgctacgtttcctaacttgtcctttattaggctacttttaaatcgcacgcaccaatccagttcttacacgcgttttcacaaaaaggaccttacatgggttgttcccccaataagaaaattacacgttgcagaatcgaagcagtggtctatccttgttatcgtcctctcgtctttatggctcttccaagtcattttgagaaattttcgattttgagatttttttccaaatattacaaaaggaaataattagattcctctttctgcttgctataccttgatagaactatataacaatggtgaaggttctcgctgtattcgaaattatttggaggaagaaaatggagtgtgttgggctaggaatttccagcaat

SEQ ID NO: 5366 - DNA, 1411 bp, Arabidopsis thaliana landsberg
cttgccaacacacaaggaattgaccttcgccattttaacaacctcatcacgcaccctgattcttgttggcctgccacagatgaaagcaatgagtttcttggaggtcttgacgcggactccaatatgccagctctggtaataaccaggtggacacagtgcccaccttagatactctttggagtactcatacttgatctgttggtcatcaggactgttttccttgagaaagttgtacatctctaaacacatatcgtcagagttcatatcgcatatggtccattcgaattgaccaagaaggttgtacggctcttgcttgacctcagacaccaaagttgcgggctcaattgggccttcaggcaaactcgtgtcctggatatctttaaactgctcaacaggttgagtctcccagaacttatgggtctttgaatactggcactgcagtaaccttccaactatggttccacctgaagtatcatccttggctaattgaatttgtgagctcttggcaacagtaactagtgcatcctccactggcttcagttttggatctgacattgttgatcgtctgcacaaaaaaattgattgctcaatcatgaatacacagcaagcaacagccatgaaacaaaactgaaaacgaataagaaagccgagctagcttacagtatgaagcattatcaagatttttaaccctagacatagcgatcccaaaatttctagcaacaacacacaaatactttccgattttgtagcaaaatcgctatgaagaatccgatacaaggtcatgaatcgaaacaaaaaccaagaaaactgagcgacactatagtatcaacaatggcgaagtactaaccaaaagcttcgggttgaagtgcgacagcaagaatcggaagaagatcgccggaaaatagttgagctacgatcggaaaaaacgaatcgggacaaaaatcgcaaacaaagtttcgccaagtcaatacaaagccattaatcgaaacaaataccaagaaaactaagcgatagtatcaacaatcacgaattacttaccaaaagctccgggttgaagaatcggaagaagatcgccggaaaatagctgagctacgatcggagaaaagtgagagaaaacataaattcgaaatttctggagacacagagacgaatccagaccctgagatttcttcaaaagttaccgtcagattgaggcgaatccacgtgtcatcatctgcttttcagatatttggcgccataattccttcttcctcgtcgtcgcaatctgttaaaacaaatctgacggaccgttataattgacggacgaaaacaaactgcaagtggcacaacacaactttcatatttacattactaagccccttccctcacgttcacaaatatataccttattgggcatattatttaaggcccg

SEQ ID NO: 5367 - DNA, 1041 bp, Arabidopsis thaliana landsberg
gttttgactgggtcaccctcgctctccacccgaagaagctaatcgatgttgggttaacaaggcttcgtgacagaatgacaatgagcaggaccgtcaaactctacaagttaccagatgcaccgatcactcctggatttagggaaatggagcgacgtgatgtccctgctgttacagcgttgctcaggaactaccttagccagtttgcagttgcgactgactttgatgacaacgatgtcaagcactggcttctcccgagggaaaatattgtctacagttacgtagtagtaagccctgaaactcatgatgtcactgacttctgcagcttctgcaattcctctataactatccccggtaaccggaaatacacgaccctggaatgtgcttatgcttgctgcaatgtagcgacactgacctcgttatcccagctggtgaatgatgccctaatagtctctaagcaaaaaggtttcgatgtgttttatgcctcggatgtgatgcagaatgagagtttcttgaaagagctgaggttttatccactatgtcgacagtcgcactactatctctacaattaccgtttgagaaatgcattgaagccatcagaacttgggcttattctttagttttgttaaaaccactgttcccgctccccaatgtgaacaaactatgatcattaaaccaatgtgtagcctaagattcctcttcctggatatcatttgcaagtattataaacaaaagtttaaagcctttttatctttttgcgtgtctttttgtagttttcctctgaactatcaacacaaacaaaatttgccgaagaattgtttggttttggatctttaaggtagtgaaactgatgcctttttatcaataacattacttgcacatcaatactgttatggtagacagatgtaaaaaccaaaatcccaatattttagagaaagtacaaaagcaaatcttgaaagcagtaggaaaccgatatactgtagttgtctcttgattttctcaaagatcagcaaagaccgcgaatatgtcaccattgatgtaatc

SEQ ID NO: 5368 - DNA, 1169 bp, Arabidopsis thaliana landsberg
cgtgctgtgccattcggcttctgatttgcattgactgatgtatgaattctttccccagtagcaccaagttctccgataccatttcctgtgaatattggctctcaagtcagtccgagaatttccacacatagaaaaacgtaaccaaacttttctaatattttatgtactcactggcatggtttgctgcatcagtggccatgtcgggactcttccctgaaattttacgattaatattgtcaaaaagagacaggaatggtttacccaagtacctagcacctcattagcgtaatcatttcgcatagtccttctcacacgcagagtaatcaagtttcaaaataaaaaccacgcatgaacaagaaaaggtgctctgatgagagtaaaaaagggtaggtattgaaaattccaacttaaaagtgctagtctaagatttgaatgctgccatctctatggaaataaattgtaggagagagactcaaaaagctttatctatattgaaaacttaaagaaccactgcaagccatgcaataagcaaagaatagaaaaaaggaagcttaccattgtcatgtaatggagcagtcgggcgttgttcctttggaagtattgatttatcccttgaagaccactgttgaactgggcgtataactagagctctagggttctcccttggaatgaaaagagcatccgcctttggtgtacttgagctctcttcgtcatcagtgaaaaatggaacctacaaagaacattttaagatttaaacatatagaacgaacctcagcaccaagagtttagattgagtaaaataaatgtgattatatattcacaagaacgaagcattgcctttggaccattctcgccaggacggtactttcttgccggcagcctgacccgcctgtgtaataggtgtcgagaagtcaggagagatgatattctaacaggagcaggtttgtcaacaacctgacaggaaaaagaaaatgatttagaaccaattaataatcaagtaatcaactacttctatttattatgaatagtaacaagcttcaagatgcatgtgggagaactgaatgtctaacatagggtattattagagggaacagctatacggagactatatctaaatctggataaaaagaaccatgccccgtatgggagttgcaaaaagaagaacaggc

SEQ ID NO: 5369 - DNA, 4734 bp, Arabidopsis thaliana landsberg
  unsure (1)..(4734): unsure at all n locations
aatcttgtttcttctagttggcatctttttgaaagtcaggttcttagaattctcctccaagatcatcgcaggcctggtcacggaaaaccctgtttccaagtccaaaaatcacaaaactcatagatgaaaaatcaagctaaggaaagggtttcaaaaaatgtgaaaaacacttacgttttggggctgttatactcttcgcattctctgtcaacgggctctgaagccacgggacgtgagacgggctttgtatcgagnnnnnnnnnnnnnnnnnnnnnagcagaacaagcgtatccactgattacttcgcatgcttcagctggaaaaacactgagtatagagatgttattgagtaagtcaatgagaagagaaacaagaggggatgatgaactgaggaagtgatcaaaaggacttacgaaaggatggaggagttatagtcgacggtgttagggtcagatgttaaggatgatgatgatgatgatgagttgtttgatctgagagatgagagtcttgaagctttggttgcgtgaggaagaagaaaagtgagttttggagaagaaactgaagaaggaagaggaagaagaatagttggtttgataaacagagctccctgcatttttgtaatctattgatcttttggttaagaagataggtttagtgattttagatattttttggttctgtttttggaacagtttatgctttatttatagccagagaagaagcagatttattttctttttatcaaaaatctctatttactaatttagaaaaatgagtgaaagacttatcaaacaaaagaacccaatcttattttcattgaagtaaattttaatattattgagttcaataattgataatccaacggactaaaatcagtggtccaaacttgattcctacttttatttgacaaagaagataaaagtttgaacaaaaggaagaagatatttttcaaaggataaggttcatgctttgttgtaacatgtgagaatgaaaatcactcttggaagaaattttatccaatttgttttttctttcaagttctctgagtcaacagaatcatatgattgagtctcaataattgtcctaaatggtatagtagtaatgagagacaccttcattatcagtcacatgggttgcaaaaagaaacaaagcccaagtttgagttttacacttactcttactcactcaccacaatctctggttctttctttattcagtttttcttagatgaaaagattattatacatacacaaatccataggcattttcagtaacggcgtacactagttgtcgatagaagtactcggctctgtttcttccctctcttaccgggctctttgacggttggtgcgattggtgttgttgttcttgaagctacactcgcgaatgatgttacatttgtgtttcttgcacctgaaaccatgtttagaggtcatccgagaatcttatttagaatttgcagagctaaaaacagtggttacctgtggttgcgtttgcaacttcactgctgctgctgctttgaacgtttgttggctcgttattcaggtttggggagtcgtgaccagctgcgaaaccgagccttgtcacatgtgagaaggaacttctctctccaatgtttggagggcttgatgatattggggcagagtttcccagagcttaagagagtcacaacaaaatcttcttattagatcaataaacctaaaatccaattatgagacgagagattcctcttgtttaccttcaaagtcatccaaggaaaatgggggaaagtcatcactagaagactgcccaaaactggccatcaatggtacaagctcggcagctgcagctacttcagctttgattttattttttcgatcctgaaatatgaacatcatatgatcttaagtcctgaatttttcttaaacaatggaatacataggagaataagacacaaggcaaacaaaggcaataggaggttggaatccgaaagatattagatgatgtagaccgtgggttgtgtttcatggttagaacgaggaataccttccaagcacgttctttcctctgcttctcacgcttcttaatttcatgtataaatggagcaaaggcatcatgaggcaaggattccttcatatcaatctcacatatctgaaaagattaccaaaccaaggataacctcatgagaaaatttcaagatatagcaacatatgcagaagataggagcaacaaagagaaaatatacctgaagtgtagttgctaaagaaaaatgacttaaaaagcggtagcgtctccttatcgcttctgattgggtaatggtctccatttccagtatctttccactcaatctgccgtttcatggatcaaaatcagaagtctattagaacaacaaaccagagatgataacatcttgtacagaacaatttttacttgaatgtcttgtccgttctgattttcatactaaataagagttgaatctttatacgaacggttcttgattaataaacgaaaggtgccatatatcacacactttgaatcagcaaaatacatgcagaaatgattaggtaacgacgaggattccattggaacttattccctagtctttgaaaaatgagaatagtgatgcataaaagacctggaatcttaccttggtggaagaaagtcatagctgccatagtgatgcagaaggcacttcacattcaaagtgtgaaggataatgtgctgaccatcaacagactgtataggtacacaacaagagcacaaacgtaagacaaattaagcatatacggatagaaccaccataattatttaataaacccacctagattatcgaaagcagataataacatttattacagattatagagactgaccagcccatagcaataaaacaatcatcatgcagttcattagtactttatgaaaacacaacagtatgcatcagaaactgattacctgataaaagttgtacgcgtcgttgtccttcaggtctttggtgtcattttggtgagacaggaaacctttacttccattgcaagaggaagacgacggtgcgtcttgatcttctagaggatgaccaagatcattatcacaacccttttccaagcttgattgagattctccatctgacttatccgctgaagaatcttcagttgatttatcttgatcattggagccgctatctggcgctccatggccccagctgggtgcttgataaccaactcgagaaacatcaggaggtgacagtgattgagtctgatttctagccgttgtgcacactttgctgtaaatagagagcttatgctcattccagtacaattttctctgccccagacgctctaaagcggcatttacatagagatgcttctccaagtcttcaacgagctgaggatctgctcttgcaatccaactgtctaactctgaaactgcttgtctgacaaagagatcaacatcttgggtgaaagtgaactttgagaacggatcatatatctcattttcaccattaggaacagccaagtcatgctcatttttccgggtaggagcaaaagaatctttcttgcgagtcaaaagtacaaactcgatgggatctccaacagaatactgcttgacgttctcaatataaacagtgtataactctcttggagaaatcatcacaaagcacaaaggacacctcttgaagcagtccaccttgtggttatcaacaccagtcaacaggtactgtagaatacacgggaaacagaaaatatgcccacaggaagtaatctgcggacatagaggatactccaagcaaatcggacactggacaggagacggagtagaataccttacacaaataatatcatcccactgcagcattttatcaggatccatagaatcaggagaattatctccagtgtccaacacaacaaacttataattggccttgagaaacaaatccttgttaaaaggcctccccttatattgttgccttctttgaggcggaggaggccccctagattgcggtagcgaaagaggatcatactgaaaattcagtaaatgattcccacttatcatattagctcttctaccagttggattatgatgcgaaacaccacctctaggggaattaaaaggtccggtattttgctgcacttgagaagaagaagaagaagaaccagcaggtccagtacctctccctctagacctattccttcgaccatcatatcggaaatggtcacgcttatctgcattaggtggggaaaaactctccttccctgctccattttgtgtcatctgcagcgtagaaacaacagtaacggatcattcaacaaaaatagacttaaagtctcatcatttactgagaagcatctaaagtttacctctttggaagatccacggctatgtccctcctcagctgcaacactcggttctacagtttaacagaaagaatcaaaaattagacaaaaagctaagatttttcaaagagaccctaaaaaccgaaatcaaaactcaaccaaattaacgaactttcaatgtaaaaaccctaaaatttagggcaaaatcgagcagctgagttaatcaatcaatttcattacccctagagccaccggagaaattgtgagaggattcagaatgtccggagaatcgagttccggtggaagaagagatccgggaaggaggagaggagggaagaggagagagagaagaagaagagttgttgccatgctcagagctagggtttagagaggaatctgaagaaggagaagacgaattgtg

SEQ ID NO: 5370 - DNA, 1624 bp, Arabidopsis thaliana landsberg
aagctctctacttcatattttgatatctttccctctcttagttttgatctgaacctttttgtagctgttgaaaaatggcgaatccggtgggttttagattccgtccgactgacggggagatcgtcgacatttacctccgaccgaaaaatctcgaaagtaacacgagccatgtcgatgaagtcattagcacagttgatatttgtagcttcgacccttgggacttaccttgtaagtctttctaacgcgagtgtttgtttttctttggttcccaactgttgtatcatcccggtaatttctgatcatgttctgtctttcccagcccattctaggatgaaaacaagagatcaggtttggtatttcttcggccgtaagtagaacaaatatggtaaaggtgatcgacagataagaaaaaccaagtctggtttttggaagaaaactggcgttaccatggatataatgcgcaaaacgggagatcgtgagaagatcggtgagaaaagggttttggtgtttaagaatcacggtggttccaagtccgattgggctatgcatgagtatcacgctacgttctcgtctcctaatcaggtcatttttcgattctcttgtttaggcttctttaacttgttgttgttgttttcttaccgtgattttatttctcgtaaacgggaaaaatctgagtttatggtaatcatttatgctgagttgatctgtagataatgacatacacactctgcaaagttaagtttaagggtgaaaggagagaattttcagttgctactggtagtggaattaagcatactcactctttaatccctcctaccaacaattctggagttttgagtgtagagacagaggtgagtcaatctcaaaaactttccctgtttctcttttaaatcttcaaaatcatatctcgtacacatagttttttcatctgtgttacgttgttccttttttcagggatcgttgtttcacagccaagaatcacagaatccaagtcagttttctggctttcttgatgtggatgcactagatagggacttctgcaatattttgagtgatgatttcaaaggcttctttaatgatgacgatgagcagagtaagattgtttctatgcaagatgatcgcaacaaccacacacctcaaaagccattgaccggtgtcttcagtgatcatagcaccgatggtagtgattctgatccgatttctgcaacaactgtaagcaaaattttcctattttacctttactatctcctctgttttcagttttttctcacaaagctatagttttgtttaatacgacagatttccattcaaactttaagcacttgtcctagttttggtagctcaaatcctctataccaaatcactgacttgcaggaatctcctaactcaatcaagttagtgtcattagctcaagaggtgagctttatcatctccttttcttaaagaccaaccattctaaactgctaattaaccaagctactttgtgccagtactcacagcattttgggttctatgatgtgatttaaggtgagcaaaacaccgggaaccggtattgataatgatgcacaagggactgagattggtgagcataaattgggtcaagagacgatcaagagcaaaagag

SEQ ID NO: 5371 - DNA, 1678 bp, Arabidopsis thaliana landsberg
gagatatcaaatgagaatcattactttcactgcttttttttctgcagacaccagttaacgccgtgggaggtgggatatcgctgcgatgatcttgcataaacatgatattcctctgctcatcaccatcattattcaaccatgttttacattgctcctcaatcggtggaggtgcatcatcgatttgggattctccctgcacattagcaaagacaccagactgacttgaattctgtaaattaattggcttgcgaaaccgacgaacccctgaaaaaggggaggaacactaaatgtcagataattcaaagtttctaaagacaaaacagagaaagtttgagattctcccacctcagatcctccagaactgttcacaagagggattaaagagtgaatctgttcaatttcactaccagtagaagaagaagagatctctgtctcttcacccttaaactcaactttgcagactgtatacgtgatcatctgtacaaataatcaaatcaaaacacgatcaccaccacaaaacaccagaattaggtcaattaacaagagagatagaaaaaaccctaggaatctggaattaggtcaatcaacaacaaaaaaccctaaaagtttggaattgaaaaattacctgattaggaaacaaggacgtagcgtgatactcgtgcataacccagtcggtctttgaaccatctcgattcttaaaaaccaaaacccttttctcaccgatcttctcacgatttcctcttttgcgcatgacagtcattgtttttccagttttcttccaaaacccagagtttgttcttcttctctgttgatcacctctgttatacttcatctccttaacactaaagaaataccaaaccccatctctcgatttgatcatcgacttggctgtgaaaaaagagggagaggaaatcagagcaaatgatttcgaattcgatacaacagtttgggaaaaaataactcgacttacaaggtaaatcccaaggctcgaagctacagatatcgactgtgctaatgacttcatcgacatggctagtgtcactatcgagattttttggccggaggtaatggtcgacgatctcctcgtcgtttggacggaatctgaaacccaccggattcatcattgtccgagagcgactaaagtttcagataaaagacaaaattggtgagaaaaagtcaaaatatgtagcagagaggtttcgccattaacgatgctctgcaagttatgtgtgagtttttttgtttttaggaggaagacgaagtgtgtgtttataattttttataaaaaggctgtgacgggagtaagtgacgtcaactatgaccagatgatgggacccactaagtggatgacgtcatgtatgatgaaagcaggacacatcacaccaagttcacatggcggcggctggcacttatcctaatgaccccaccatgatttttccaatccccacacacttgttttatttgtttacactttctgacaaattctctaaatactctttttcattccgttttattttaccggattaatgacattttcacattccgatttagtataatttttaacacgttttatagtaaatacatagtaaaatcactttttttaaaagtcggtaacgtggaaaataataaaacaactggtaaagaaagataaaatttatcaaattgaatgatgacgacc

SEQ ID NO: 5372 - DNA, 514 bp, Arabidopsis thaliana landsberg
gtggcgacaatacttctgatccctctttttctctccatttttttttaaactgaaactttattcactctcgaaaaatggtgaatccggtgggtttcagattccgtccgaccaaagaggagatcgtcgaccattacctccggccaacaaatttcgatggtgacacgagccatgtcgatgtaagtcattagcatagtcgagaatgctataccaagttggtttagtgggtttcttgatgtgcgtcaagatgctcaaatcgagaggatgctataccaagagaggaatgggaaacatggttgaatgatgatgataaacagaggaatatcatgtttatgcaagataatcgcaatgattacagacctccaaactcattaactggtgtcttcagtgattgtagcagtgatgataatgattctgatttactatctccaaaaacagtaagctaaattctactatgttcacctttataatcctctgtttcagatttcacctcacaaagctataatttcggttgata

SEQ ID NO: 5373 - DNA, 4118 bp, Arabidopsis thaliana landsberg
gttatcaaggccagaaaatctgcctacgtcgaaatgtcagataagctctcggaaaccaccaagtctgccttgaaacgaattggtctcaacacattatacagccatcaggctgaagcaatttcagcagccttggctggaaagaatgttgcggttgcaactatgacttccagtggaaaatctctttgctataacgtgccagtctttgaggaattgtgcaaagatacaaattcttgtgccttgtacttatttccgaccaaggttactcagcttgtctctttttcttttgagtttttttactcagagatctcaaaactttttaaaattgctataactaaaagagatttgctgtttgtttgaataggccttagctcaggatcaattaagagcattgtctgatttgataaaaggattcgaagcaagcataaacatgggtgtatacgatggtgatactccttacaaggatagaacaaggctgaggagtaatgctagactggtaatttcttactgtccttttcaccccaatagaatagtaattcattccctcagtctcatctgaattcccgaatacgtatttctcttactaacattattggaatttatgcatgtagctgatcacaaatcctgatatgttacatatatcaattttgcgtcgccataaagaacaattcagccggattttatctaaccttaggtaacacatctttctcctctcattttaagattgactaatatcactagaatcattgcaagacatgaattggtttttaaagaggaacaaggccaccttataattcatgaattaagtggagtctaagttaaaaattgcaggtacattgtgattgatgaagcccatatttacaaaggaccatttggctgccacatggcccttatattgagaagacttcgccgcctgtgctctcatggtgcagtactgatcccatggtcaaaccagtagtattcattatgaatttcgtccatttatactttgaataaccgaacatatcttacttttcagtatatggtgtcaatccttctttcatattttgcactgcaacttctgctaatcctcgagaacattgcatggtaggcttacgttaccgattatcttgataaaatattatcttatccaattctatcatactggatcaaaacatgatttgctgttggtgtaggagcttgcaaacctatctgagctcgagctggtaacaatagatggaagtccttcctctgaaaagctttttgtcttgtggaatccatcagctcctccaacaagtgtatggttcagtttcctagatttatttttgaaccaatttggaatctttatttactccttgtttcaactgttgtattacagaaatctgaaaaaagttcaaaagtcgtgagtagtagtgaagctgctgcagataaaccatctggagctgctgccgatacactatcagggtaatttagttatttgccttacaagaaatcaaaatttattttcatcaatctttagctaacattaaatatcatttcatttctttacagcccagcttctgaagtttcacaccttttcgcagagatggttcagcatggattacgttgtattgctttttgtccatctcgcaaactctgtgaacttgttctgtgtttgacgtaagttctcttgttaatcgttgatagaaacaaaaaaatcacgcaagagtgtatgattaaataatgtttatggagtttaagatccataaaatatgccgcagacgtgaaattctagctgagactgcccctcatctggttgaagccataacctcatatcgtggaggctacattgctgaggtacattttctgtatttatgtgtctgaactttggtgttgtttgtagatgaattgtatttactagattggtatttttaatattttgcaggaccggaggaaaatagagagtgatttatttggtggaaagctttgtggcattgctgcaacaaacgcacttgagttggggattgatgttggtcacatcgatgtaactcttcatttaggttttcccgggagtattgccaggtaaatgagtgtgatttactcttttcttttccctcttagaactgaaattctataagctgccgctgacaatgactgatcaattttgagtttcagtctttggcagcaagccggtcggtctggaaggcgacaaaagccctctcttgctgtatatgttgcctttctcggcccgcttgaccaatactacatgagcttccggacaaactcttggtagcccaattgagtgttgccatattgattctcaaaataagcatgttagtagtatatactgtttgggttcttgtgccaactgttaatacttaatactctagctgagattataccaacttgctttgatactttttcttcttgtaggtccttatgcaacatttggcttgtgctgctcttgagcatccgttgagcttacaatatgatcaacagcactttggttctggcttaagcgaccctcttgctgagctcaggaacaaaggattcttgagttttgatccatcccgtgattcttcttctagaatatggaactatattggtcgagaggtatatatccgagcagttactttgaaaaatacaacccgaaaccgagtttccttgctctaaatacctttgctggtcaacattttctcagaaaaatcctgcgaggatagtctctatacgggccatagagacagtaagatacagagtcatggaaaaaaaaagtaaagatgttctcgatgaaatcgaggaaagcaaagcgtttttccacgtatatgaaggagctatttatatgaaccaaggaaggaactacctggtcacgagtctggatataaaagaaaaggtagctctgtgtgaactagtaaacgtggattactacaccaggactcgggattacactgatatcaaagtaactggtggtgacactgtaagtataactgtggctctcttgtttgatagttgtgcatctttgtgtaaaattcattaccaagttcatgtttcaggcttacccggtcaaggctccaaagaagccaacaccacaaactcatgcatgtagagtgacaacaaagtggtttggatttcttcgtatccgaagaagaaacaatgaagtaattgatgatgttgagctttcactcccaagttacacttaccaatcacaggttatattcttaaacatgcagcctcacacaacacacatacagtcttttctgtttccgctgtaattttaagtctggttttattgtggataataggctgtttggattcaagtgccgatgtcggtaaaactagcagtggagacggcaaacttgccattccgtgctggtttacacgcagcttgtcacgcccttgtcaacgttgttccaacaagagtgacatgcaactattcagacatagctccagaatgtccaaatccgcaagagcaacggtatttcccagcaagaatcttagtatatgatcgtcatcctggaggaactggcatatccgccaaggtaagtggaagtaaaactgtgaaagtaaattctcaagtttcaattgttgaatatggatgactaattcttgaacattttgttctgcagatctgtccgctcttctttgagcttctaaaagatgctcgtgatctcttaaggtcttgcgaaaaatgcccacctgaaactggttgccccaagtgcgctcagacttttggttgccgagggtacaatgaactcctacataagaaagcagccatcatgatcatgcaggtaaccaaaaaaaatactaaatgatttcttactttttttctatattactacaaaaacttttaaaaagagattggctataaagcctgatcattgttatctaatattgcgtttagggcgttttggacgcgaaggaagattgaatcatcagacatctcaagattacaatttttttcattttttgtaaatctaattcattcaaaaggttaaaatagatttgattgactgactagttaacaacacatttttgttactaataaaaatcttgtaattgacacacacacaaaaaaaaaaaaaacttgcaattcaataataatataaagtttgaatctgaaaagatctgtaactaaaaggctttaaaatagtctgggaaaagtgagc

SEQ ID NO: 5374 - DNA, 646 bp, Arabidopsis thaliana landsberg
  unsure (1)..(646): unsure at all n locations
agtcgtccttattaacatataccgatccaagattcgaataacattaaacattaaatctcatacttaaatgctagtgtaagtgcttgtcaaaattcaaaacaccacaaaattttatgggtaccaagatctacaaagagatacacacattcaaacgagtcaagatgtaaaggacctgtaaatatgttgaagttgagatacttaaatgtcattacaaaacctctagtagatttttctatctactcatataggtatgtatatcatgtatccaatcattagtcatagtaaaattagaccctaagagatcacgagcatcttttagaagctcaatgaagaacggcgggataagtcttatgtagtgttccccttcattgtatggtcaaccttggtatcatgggcgtccacagcctctcacttcgtatgtataacctcgtgtatgtgaacatgttattaagactagggttggcaaattatatgttagatatatgctttgatttggtatttcatgtgattcgatcctaaaaaaaatagatgttcgatatgatttaaagcaacacaaatggtaaaatatatagtatgttttcaacgaaacaaatcacanatacttacttcanaaaaatctgatgttctttagcatgttcaaatagag

SEQ ID NO: 5375 - DNA, 1158 bp, Arabidopsis thaliana landsberg
tttttttttgtgtgaaaacagactatgtgtatgcatatgagatttgaaagcttaaaatcagattgtgaagttttcatgttgacacagtgagtcacttattgctgcttcttgcagtatcttgatgagaacaagaagctgataatggcgatcttggaaaatcagaacctcggtaaacttgcagaatgtgctcagtaagtgtgggattctcgataccaagaccgagctatgttagctttactgatggtaaatagaatattaataataaaacatggttcttgcttgattcttttaggtatcaagctcttctccagaagaatttgatgtatctcgctgcaattgcggatgctcaacctcagccaccagcagctacactaacatcaggagccatgactccccaagcagtaagtttctgttttgatcagttgaaaaacaaaacattttggttcttatagtttgtgtgtgtttggtttctgtagatggctcctaatccgtcatcaatgcagccaccaccaagctacttcatgcagcaacatcaagctgtgggaatggctcaacaaatacctcctgggattttccctcctagaggtccattgcaatttggtagcccgcatcagtttcaggatccgcagcaacagttacatcaacaagctatgcaagggcacatggggattagaccaatgggtttgaataataacaacggactgcaacatcaaatgcaccaccatgaaactgctcttgccgcaaacaatggtaatatttggttttacagcagtttggaacttattatcacattactgattttcaccttctttctctaccaaaagcgggtcctaacgatgctagtggaggaggtaaaccggatgggaccaatatgagccagagtggagctgatgggcaaggtggctcagccgctagacatggcggtggtgatgcaaaaactgaaggaaaatgaaatagaggaagaataagtgatgcttcttgttgatatcaattaggttctacctttcatttttactttcttcacgatgatataaaaaaaaggttttgtcattttatgagttagtctctgttaaaagggttctgagacagttgagtttcagttcctagatggatgtggaatggttcaccttcacatgtacaatgttaaatgttgttgta

SEQ ID NO: 5376 - DNA, 1529 bp, Arabidopsis thaliana landsberg
tgaaactactctccgccgcgagtcgtggtctcaatggacagttctctcgcttatctattcgcgccgtcgctacacaatccgcaccttcttcttatcccggtgagattatcaaactctttagctggatttgaaactgtactctttatctgtaaaatttcaaatgtttctattttccgagtagtttatagattcaaattgtttctcgttggtgacatttgtgtttagttgatgttactctactccacaaacactctcttgtagagaaatttcctggggcatttgatcaaattgacactatagctgcgttaggataaagtggaacattttcttctcatatttgatttatgtttttggttaaacagtgttctgatgagagtcaaatgtaggtcaagatgaggctgagaagcttggatttgagaaagtctctgaagagtttatctcagagtgtaaatctaaggctgttctcttcaaacacaagaagactggttgcgaggtgatgtctgtttcgaacgatgatgagaacaaggtgtttggcattgttttcaggactcctccgtaagtgtgtactagaatacatgaatctgtcctactagtttatctttagtataggtgacttggaaagttttgttgatctcggtgatttcttaatggtgtgtaagagatttgtggtatatgaggcttcgttcttgaattgtagtcgagtgagtgaaattctagcatatcaagggcaaaaattagccaatggtgaatagttttgcactttcagttggaataggtaccacgagcaagcgaaaattgtaactggaagtgcttgactgtggttttgataatagtttggttcttgatgcaggaaggattccactggcattcctcacatactggaacatagtgtattatgtgggtcaagaaagtacccgatgaaagaaccatttgtcgaattattaaagggaagtttgcatactttccttaacgcattcacatatcctgataggacttgctacccagttgcttccacaaataaaaaggtaataatacataaatactcttttcttccccaaccactgtcatatattcaagtttggtctcatcacatttcatcactatctatgctaggatttctacaatcttgtcgatgtatacttggacgctgtattcttccccaagtgtgtggatgatgttcacacttttcagcaggagggttggcattatgagcttaacgatccttcagaggacatatcttacaaaggttctatgtgttacatatgcctagtttaaaagcttgtttgtttttatctttccgtttgttgaacctctaatctattaacttactctccctgtctctttgttgatgtttctcatatcaggcgttgtttttaatgagatgaaaggtgtctattcacagcctgataatatactagggcgggtgactcaacagacaaattttgattgttccttgattttcttgcataattggtccgcaatctctttctaagaattaaaatcacaaaaagttttgagtggatgtgcag

SEQ ID NO: 5377 - DNA, 1821 bp, Arabidopsis thaliana landsberg
atacactcaacaagagcaacaatacagcagttcaccacatattcctccaatggagagtatactagtaaacaaaagcaacttatgctataaccagcaaaaggatcagaagaatcagacattcatagctcgaaaacaagacaaaagaagatcacattcatgattttgaagaaagaaagccagttcctttaaacttctcttccatcaaaccatcaatacgagccaccatctccggagtcagataattctgccaatccccaactttccctttcctgaaatacgcactgttggcataaacagcaggacgatcttctctatctttctcacctttgttagcttcaagattcttcaaagtctcaaagctacaaagcttcactactttctcaacaacatttccctcctcttcctccttcgtgaacccataacccataaactcagctaatctcttcacataaggcaatggatcagctctcattgtctcatacttgagaaacaaaatctgatccgggtttgcttggtaagctttccaataccctaaaacatgatcaagataaggaccgtaagctgataaaccttgacagtacttatcaaaagcttcctcaatgctaaccactggtccttgttgtgatctctccttgtgagcaaaagtccacatcgacacaaacgtgtcctttgggtctctccatatgtaaacaatcttgcaaccagatttcacaactgattcaggtaagagatcataagggatatgagtcgagaaaagcgtgtttccttcgtctttaagaacatcaacgcttgggaaaaacgggaagtcgatttcgatgtaaggcacaaactcgtgtggattacgtttagaagagggtttgttgaaacgtcgaacttggagcgatttgcgattgcgaaagttaaggctttgagccaagtcgtgccggtttttgggtagctgcagacgaagaaatcattgggacgtgccttgaagaacttctgggcgtgaagtaaaccttcaagaagaggttgtagccaccagtgaccaccgtactcaacgaacggatcttttggtctccagccatctttgtgaggaagagttgcgatgatttcttggtaatgtttctggttcttctcaaattctgatggcgacgaagatgctaactcgtgatttgactctgatacgacgacgtcgtttatggttttggattccattatagagagtgttttctttttggctatgtaatgaagagattaatactcgttgataccaaaatacgtttgttgtttgttataatatatagtttgtagtcagagaatagataagtaggttggtggtgactggtgaggctattatttgacccacaaacgtgttttatgtgattttttcagttgttggtttggtaactatgcaatttctttctaaaaattcacaatgtatttgcaataataaacaaaaaaaagttaatgatatcgtgtatgtatgttgaattgaaatttcgttactcgagtgtagtatttaaaattatttaattttcatataataaaattatctttcaagtgtagtagtatataaaagttttgtcgtttgcaagtgatagaaccaacctatttatcaacgtagaacagaggtccccaattatccctgtaagtaatatattcaacctccaatgtgggtgtgacaataagttttctcatccgacccaaaaaaaacaaaacacagtcttcagaaggaaatctgaatttgatcaacaacaagccaaaaaaaaaagaatcttcgaagtgtatacaaaataaaggatcttctgatattgattagcctcaactctcaacgtctggggc

SEQ ID NO: 5378 - DNA, 1783 bp, Arabidopsis thaliana landsberg
ttttttaaaccgttttttttttatcagtcttttctgtaagtgttaaataaaataaccgccttatttaaacgatattaccaattggtttaattttaggttgttcatcttttctaaccgtttttttctacccgcctttttttgtaactgctaaaaaacataaccgtctcatttaaacgatgtttaccaattgcaaaccattttgcttaaacaagcggacaatatttaaattgcaatgaaagcgagttatgagttcttttggcctaaacttcccaattttatctctttttttcccactaattttctaacaattttaattaacagtgacaacttacaagtacttaggtaaccaagtatatttccctattctaaaacctaattatgagttgtgatgatcaccttttctccttttgacgaacgcttaggacctaacttattgcaacaatggcctaactaaaacttaaatgcgatttgcattcaattctcaaatgggcctctttagttaacatgttatctccgttcatctgacgtgtcatagctcagatcaaaggttaatctactcgtaaatccaacgaccaaagaaacgaagcgtacgttactaacatacacgtgcacgcactgtaaccatctctctctctgctcttctccttcaatgaaatgattcgtcacccaaagaaagatctgcaacttcaccaccggaccagtctctctctatctcttctgtctctctacctcgcgcgacgaatcaatcatgactgaagaacaagacctcatcgaccaatcaccaccaccttcagcacccgaccctgaaccaaactcgagcacgaatccgaattcagtaatccatccaaggcgtgtgtctttcgagcacggactcctcccgatccagaaactcgttttcaccgacccgatccaaaccttagcccctgtcaagcagaagctagccgatgcggcttcgaataaccgcgttggatcggctgcaatcgccgacgttctccagatctccggcgaccatgcgcgtctcgttctcgagactctcggttcggtgcttcattccgagtctgaccctctggttcgggcgaaacctgaggaagttgattccgtcggagctgatttgcgggatcttattttgttcctgtacattcaatcgtataagaagttgcttcctaggacgcataaggactccgcagcggtggctgatgtttggccatcgacttcagcttttgatggatacttgtctggcgttatcgccaattcaggcaagtttcttactttttttggccctcttattataatgtgcctcaatcccagcgcctgcgatttgtttggtattgaaatggaactgttgtactcgagtatggaattggaacgtggtagagaataacttatttccatttcgcattgtatttaactaaaatttgcaatgcaagtttaagttttctgagtcatttgatttacctgaaacttagagttaagcaatgtcggaaatttgggtgattaattgaattgatggtggctatagtttcgtaacaattctcaatgaggaagatgcttacttgtatttaattgccagtcccctttctctgatgactctggggcaatggtaattggttagtttactaactaaagtcaaacagtcgccagcttgctttgttttgtggttcggaatctgattctttttccgttgtaccttattttgtttggtcctttcacgtggtttatttggtgataatgcttggtgtgttcttgaattttgactcgggtctccagtcctgtaatattctgt

SEQ ID NO: 5379 - DNA, 518 bp, Arabidopsis thaliana landsberg
tacttgctaagatatcccgcgtcaagcccaatcctcgtagccccttgacactatgttgtgttttcttagatttctgaaagaacacacagaaacagaccaagataatgtaaacatagtatcatatgctgtcacatcatggctgcttcatttcaggaaaagatttatacctgttcaccaacaacattaagcacaggcacgaggctgacatggaccagacagaaattccctgggcctgaactcaaccaccaaccaaaagatgcagtagttaatttcatcatatccacaaaatccacttttcttttcttttggattcaatggtatgaggaaaaagaatcttacctacacggtaagagaattgaccaagcgcctcgataaaaggcgcggattcaatatcacctgcaaacacaaacaatctctgtttacacaggagaagcaaaaacaatagaccaaaaaaaacgattccagttttttttgataccctttgttcccctaattcaataacgaaacattagcaggat

SEQ ID NO: 5380 - DNA, 398 bp, Arabidopsis thaliana landsberg
  unsure (1)..(398): unsure at all n locations
ttatgcacggggagccgtcatgcccatataaacacacgcacactctcaaaccttcaaagcaacaggtaaagaggtnnnnnnnnnnnnnnnnnnnnnnnnnnngaagaggaacaaaggctttggcttagccatagcagcggccagggtccttgcagatctacgcaggtgattgagcgtttccatgctatcccacctttgacaagggactgctgatgggattcttcagcgttcgtagaacttctttgccggtcagatctcagtcacaatcgtatactccaggttattctgctctttccttagagactcccgtgctagttgctcttgctccggggtgtagaagtatatacctgatcgggattgtgcttccatgagctctccctgcaccagtctatagatcg

SEQ ID NO: 5381 - DNA, 1452 bp, Arabidopsis thaliana landsberg
acctaaatctagtaaaacgtctagccactcaattttttttaccttaatatcagaaaggtaaataagagcaacatgacataaaacttgtaaattaaaccacaatcttaaagagaagcttcacctgcagtttgtggttatcaccaacaataagtggccgctgattgactcccaagaagaatacacattcacgacaattggcaatgcacactcgtttggcagctacaatcacatgaactctttcacagtgctcaacttttattgcctgcagaaataaatacggaattatgtttgatacatcttttaataaaagttggcagatattataacttgttaaatgttgctttgactatcttcagaaaagataaagaaggaagaagcattgtttccataccttgccaacagctcccaaaactatagtagtatcagaacatccgtgcacagttgcatatcgcaatggtgctaaaagataaattacagaatcatggcaattgacaacctgaaaaatacacaaaacaaggagttgacatgcttgcacagagattccatgactggaagaaaaacggaacaaggaacagtcagaccttcacagatctaccccttagatcggaggcttgcttaacaagtgaagtcttggagactccctcgattaaacacgggcctctagtactaggtgcaaccttgttcggagcagcacaaacatctgacatcgcatcatcttgatcgttagaaggtccgttctcttttccagaaattctctcagtaatgctttctaaagcggaagctatgttttgcagaagccagtcatgcacttgggaagcggggactggaacagcgggcatatccggatcagaatttgcaaaaaaaggagtagcttggctcaatggagatacatcagatcccttatcaccaaactgaacaagaaaacgcagatgctcgaacgcctccatagagaaaacctgaacgatattggacaagaaaaaaaaaaattaacttgtgttctctttcatttcctaaaaaattcttattccaacatcagaattttatattcttgtagcttagaacagtgacaccccctgagaatataagaaagattagaacttaccaatgattcatctccttctccctccacaggctctgcaaggagagaaatgatgtttgctaaatgtttttgcagatatgacaactgatgagcttcatcatctgcctgtgatggcataaatcgacggctgttgctgcgaacaagctgcagaaatgatgaaaaggagatataaataacaattttagctccaataaagttggttcgacccatgtgatgagaaacgatagaataccaaagaacagtgactgtagaaaacactgaaaagcttaagattatatgactgttttctaaaagactcaatagaacatccataccacacaggaaacagaatattacaggactggagacccgag

SEQ ID NO: 5382 - DNA, 7479 bp, Arabidopsis thaliana landsberg
gcaggtcgactctagaggatccccaattttcaatttttttttggtttttctatgccttagatgaatgcagactcaaaaatatacacaatgcaacacacacttcctgagccctcccccaaacttaaatcacacagtccactgtgcgaataaacatggaagagagtactcaggacaaatccaatcacagaaacaaaaaaaatgaagaaacaaatcacaatagatggtataatacaatggtaaagtgaggcgcttacctcagtcaaagaatgaacgtagttgctcgtcaatggctgcctgtgattgctcctaggccatagacgaacctccttgttctgtatcagctccagcaggtgggtactcgacctcatcagctctgtggcggccagcaccgctctgaggaaactcgacctctctccttctgctgcggccagcaccgcgttcgcataaacttacgagattgcagaagtcgtccgctcctactgctagatcgagtgagtgtgagaggaaggggaggagcggtcgagtgaacttgagctcgcggaagagaagaaacggtggtgttgtcgagtgatggctggatggagagatgagagaacgatggcaccttggtcgagtgatgagagacggtggtgaagaggcgagtgagaagcggtcgagtgcgtggggaagaaagatggtgaggtcgagtgacggagaagaaaggataaggtgaagagtgttggtcgagtgtttgagagaagagtgtttgaggataagaagtggcgaggtcgagtatttgtggagagaggggcgatgggatagagtgaattgataagatgaggtcgagtggtggggataaggtgcgttgaggtcgagtggtgaggagaagaagaagatagattcttgtcttctgctcagttgcgtggaggacatgggcgtcaaaggagggtcccataatgtcttcttgtctcttctctgtattctctgttcactaggaaaactccaggaaatcccgtaattttcagtagacttgatgaactctctgtaagactctgtagctcctgttggtcgagtaaaatgatgatttaaaattttttgggttttaaacatcacacatactataccaatgtactcgagtgcaaggtctccaggtgcaacagaagattttcaaaattttgtactccaacgtgctgtacactcgatctccaggtcttctgtagagtaaaagttttgaatttttactctatctccacattgttcctttgttcctgagaaccacaaacataaccaagataaatcaaaaataacgagaaaataaaaatttatttacagagatagtcatgggacttcctcccaagtgagcttatttaaagtcattagcttgactcctttactcctttaatcattaagaagttcctggagatgaaccgatgtcacctctggaaggatttggtctgctaagtatttcttgagcctttgaccatttactgtgaagtctctactcttaccagctagagtgactgctccataaggacggacctcagtgatgcagaaggggccagaccatctggatttaagttttcctggaaagagtttcaagcgagagttgaatagcaacacctgatcaccaacctggaaatccttagtgatgatcttcttgtcatggaaaagcttggttctctccatgtagattttagaactctcataaggttctagacggatctcatcgaggtcactgagttggatcaatcgcttctcctcagcggtttttatgtcatagttcagcagttttaccgcccacatagttttgtactcgagctcaacaggtaggttacatgattttccatagaggagattaaaaggagttgtaccaatgggtgtcttgaaagctgtcctgtaagcccatagtgcgtcatcaagctttggagaccagtctttccttgtaatcccaacagtcttttccagaattgtttttatctccctattagagatctcaacctgcccgcttgtctgtggatgataaagggtggcgactttgtgctttactccatgcttcttcaggaggttctcaaagaccttgttgatgaaatgcttcccaccatcactgattactaccttgagaactccaaatctcgagaaaattatggtcttgaacaacttcagcacaacttttgcatcgttggtaggactagcaatagcttcgacccactttgatacgtaatctacggcgaccagtatatacttgttaccgtatgaagatgggaataaacccataaaatcaattccccatacatcaaagatctccacttccaagattgggttttgaggcatctcaattcttctgctgatgttgccctttctctggcatgaatcatattttcaaacaaactcctgagcgtccttaaacattgttggccaccaaaagcccgtttgcagaatctttgacaccgtcttgaaagtcgcgaagtgaccaccatatgcggagccatggcaatgcagtaggatacctcatactttatcttctgagacgcatctcctgtaaatctcatctttacagagagtgtaaagataagggctcatcccagtagtaatggtgtatgtctctgaaaaacttcttcctttcataattggtcaggttgggaggctctactccgcatgccaagtaattgacgtgatcagcataccatggagatcctccttcaacagcattcagttggtggaactctttcccactgtagctccttccgaagaactctacaaccatgagctgctcttctggcattgaattgtctatcggaaggggttcctcaattctcatccttgacagatggtcagctgcaccattttcaatgcctttcttatctactatctccatgtcaaattcttgcaataagagtatccatctcaacagtcttggtttagtatccttcttggcatacagatgcctcaaagctgcatggtctgtatagacagtgacctttgatccaaccaaatagattctgaaattctcaaatgcgaatacaacatctagaagctccttctcagttgttgcatatcttccctgagcttcatccaacgttcggttgacgtaatatatgacatgaagcttcttgtctattttctggcctaaaacagctcctactgcgtagtttgatgcatcacacatgatctcaaatggatagtcccaattaggcgctcgaacaacaggagcagacaccaaagcatccttgatggtgtgaaaggatttgaggcagtcctcatcgaattcaaactcggtctccttgcacaatagtctggttaaaggcctggctatcttagagaagtctttaataaatcttctgtagaacccaacatgaccaaggaaacttctgatgtccttcaccgtttttggtggttgcaactgcatcatcacttcaatttttcctttgtcaacctctatacccttttctgatatcttgtgacccaacactatgccttccttcaccatgaaatgacacttttcccaattgagaacaagattcgtctcctcgcacctggtcaatacgctgccaagattcaacaaacatgaggagaaagaggggccatagaccgaaaaattgtccatgaaaacctccaccatctcatcgattaaatctgaaaatatagaggtcatgcacctctgaaatattgtaggagcattgcataaagcaaatgacattctcttataagcaaaagttccataaggacatgtgaaagtggttttctcctaatcattagggtgaattggtatttgaaagaaaccactatatccatcaagaaattaatagtatgggtgattagctaagcgttcaagcatttgatcaatgaatggtaaaggaaaataatctttcctagatgcagtatttagctttctataatcaatacacatctatacccagttatagttctagtcgggatcaattcatccttttcatttttaacaacagtcattccaccttttttagggacacatgcactggagaaacccaagtactatcagaaatatggtatatggcaccaacatcaagcagtttcaaattttcttttttcactacttctttcaaattaggatttaacctcctttgtggttcaatgctagaataggattcgttttcaagatggatcctataattgcataaactagctgaaattcccttaatgtcagataatgaataaccaattgttcttctatactttttaagttcagacaacatcaggttcacttcatcatcatttaactcagcattaacgatcattcaattcataaccattacctctgttgctgccccattcaatttaacttagcattaactattcttcattcataaccattacctctgttgctgccccattcaattcttcaaagggttctgattcttccatcactttatgtgaatctaacagcttctggtagcccaaagtctccaaatgcagaaatccatcttcaccattcttggtcaaagcactattaaggtgatcttcttctacaagctcttccagtaactcttcagctaactgatccatctcttcgatccaaaagagttgcccttctatagtaggcttcttcattgcatctttgacgtcaaaggtcatcctaaaatctttgccaaggtttagatcgatcttccctttcttgacatcaataatagctcctgcagttgctaagaatgatcttcccaaaatcaaagggtctttgggctcttcatccatttctaggactacaaattctgtggtatctctacagctccaatcgtgattggtatgttttcaagtaaaccatgagggatccttactgatctgtcagctaggataagggatatgttgcaagatttgtattgagtgagccccaatcttttggcaacggagagtggcatgagactgactgatgctcttaaatcacataggcatctgttgaaagccaatggacctaaagagcatggtagagtgaatgaaccaggatcactaagcttctttagaatgatcttcttttgtataatagcactgcattcgtgactcaattctaccatgccttgcacttcttgaattctctccacgatcaagtctttcagaaacttgtgggaatccatgattagtgctagagcgtcaacaagaggtatctgcaactctaccttcttgatgttcttggcaaacataactctatacttatgtgccaatgctttcttgtgacggccaggaaatgaagggtgtggtttgtgaggaggaggaacaaagaccttttctttgtttttgacaacaactggtttcagagcagttggtgctgttattgggaagggtggtcgagtgaaatggtcgagtggttgctccagtgacaggtcaagtggctgctcgagttgtttgtcagcttgatctttagtgagactgaaatcctccccatcatgatctacactgtcctcagtgactagcttaggttcctgtctagttggaagtgcttttccactgcgtagagtgatagcatgagcatattcttttggattttgaattacctttcctggaagttggcttatctgtttttgagcggaagtaaatgcagaatgtccctccaagtaacggactttggtatttagtgttttcactttgacatttagatcattctagctacagtccaacttattgtgtaactcagatatcttcttggccatctccatggagccagaggcttgcccttgaagcagctgttgtagcatttgtttcatatcagcgtcaggagctgcaggactttggtgttgctgaggtgcaaacccaggtggtggttgctgctggtagttcccctgaaattgttgcttgggaacaaaaccttgattattcagaccttgttgttgctgtggaggatacacttgatcctgaggattagcaacgttgatgctgcggtaagagaggttgggattgttggtcttgaagttgttgtatgctttgtagccaccttgattgttgatgtagctaacttcttctaactagtttcccttcccatcttggacttgatactgcttgtcatcaacaaggaagtgcacacgtttctgctggctaagaagaattttgtgtttgtcatccgagtcagttgtgcccctgatggtcttgtcgcagtcctcgttgtaattaccatctgattgagctaggttctcaaccaattcccacctttcttcaacatctttgttctggaaattctcattgctggcggtatctagaagcattctgatgtgtggtaaaacgcctctgtatagagtgctgagcagagaggctttcgtgaagccatgatgaaggcattggttggtataactcttgaaacgctcccatgcttcaaagaagctttcaccagtcttctgtgaaaatccagagatctcatttctcagtcttgcagttctggcgtaggagaagaaatttgctagaaaagccttcttgcaatgcatcccaggtggtgattgagtcatggagcagattcttctcccagatgtgtgctttgtctcccaaagagaatggaaacaactggagcttgaatccgtcttcactgacaccattgatttttgttaggttgcagagcctatcaaattcatccaagtggtcgagtggatcctccatttgcagaccatggaatttgttcccccgaatcatcgagatgagaccactcttaatctcgaagttgttgttcaggaaagcaggaggtgcaattcctttcctttgacgatggtcccgtggtgcatctctagcaccaatgtttgcagggccattctgttgattttgttcgtcaaccatttcgagtggttgctgaggtacaaggttgactgtgtttctcctttctctgagttcgcgagctatacggtcgatgttatcgttgaaaaggaggttctggttacctgttgatcgagtttgtatacagcagaggtgtacctggatcaagaagacaacaagaaaaacatacggtcagtaaccgaaaagaaaattgaaaaagaacttgatctaagcaaatatgaaatctcaaatgtaacaaacaaacacccaattggcaacggcgccaaattgataatagattttttagtcaattaaacctaaagcactatcatgtcgttgtagtactgaaggttgtcaatccaaatgggtgtgatgctagcaatcaagatgcaatcagagttcagagactcaagccaagcaataacaggttttggtgtgttctagcattcctaagtgaacatgcagaaaacaaaaaatcaggcagaagcaataaaacactccaccaacacagctggttgcagagcactgtgtgtggtcgagtgactcgtcaagtaacaggcagtaaatgaaacaaagatactcgtctgcacagtctgttgccagacaactgggtggtcgagtatcacgtcgagaaaaaggaaagaattgcaaaaagtaagcaacatgtgacaagatgcagtaaacaacaacacagtacccaaagaaatcaattagataaagaaaaaaacgaggatgggg

SEQ ID NO: 5383 - DNA, 1391 bp, Arabidopsis thaliana landsberg
cttggcgacaagtggcgacaggtgtcactccaccgccccataagctttggctccaagactcagccgacttcggctccaagattgattacttgagccgcaaggcaccgcgagtgatgtgtcctaccatggtcagttccgcggccggtagggcaaacttggccgcggcacgtccaacttttcccatctttgccccattcgtgcccattcatgctcatctttgcccgttgaagttttggcaacgtttgggcatatgcagtcaattggctttgcattcaggcaaaagtttctcattcggtcctttagccgtgcccgatgcccttatgcgggtcactacattctccgctccttaatagaattcgtccccaaattctaacctttggtcattcccaacttcaatgaattctcccatcattttcacaaaggttttgaatctccttgtgcggattatacaactgtatgttctttggaccgaacttcccttcttttgcatgtttccctgaagtatgtccgttttagacttatctcgatccctcctgatttcttttctctgattcctcattcggtcgggcgttgctgatgtacttccgatggtgtttcaaactcaaacacaatcatccaatttttatacaagtgatttctcactcatataattgtcggccacacacaaacaagcaaatacttaacttattatacattcaaaagttcatacaagtcataagtaccggattctaaacttagtcttacatactattcaacaagttctaagccttagcatatttacacacaaaattcgctatgacctagctgattctatacttagccgaaaatgatctcacgaatcattggtcaagggttcctacacttgggacactcacaccttacccacaaaaacgagggcatcccttcattcaaacacttctcctccgctaccgtagtcattaatggcctgactcctctcgaagatccttcgctcgcattcggtgcaacgtacgggcagtacatggacatatgtcccacccctccgcaacaagaacacttagcacaatcatccatatatggcatagtatgtggtggatacaagcattctttggtcggatgatcggtatggctgcatatctcacacgggcgcttagccgaagtggccaacttcttcccaactgacttcctcgctgttgcctgtattctgggcttaaccttggtgttaatcccatattccatcccaagtggaagcgggtttactccaacgatccgttggtccttggccttctccgattccattcccatttctgccgctctctttcccttccatctctcgttttcttccgccttgtcaaccaacttccctttcgacttttcttcatcaagccttagacgattcatcaaggcttgtg

SEQ ID NO: 5384 - DNA, 338 bp, Arabidopsis thaliana landsberg
taactgtaaaacatacgtttctctgctgagctgccatataagcatctggcaatggaaatggattgtctttcgtcgaaccaagctccgcgccgctaaaccagtttgggatctgtgccattgtcattgataccaccgaaaaacacgtcattagatgcttcatgacactgaaaagcattcaccaattattgacgtaaatgttagacccaaatagaaaatgtaccaaaaagtttacgaactggtcagggtctacagaagcagctgattcagcctgtgcatcagcaacaccggcaggatgtgacagggagtcatgtggattcacaactcccatggtcaatggt

SEQ ID NO: 5385 - DNA, 2392 bp, Arabidopsis thaliana landsberg
gtattcaaacatgtctggcagctattgcacacggtcaaaatcaaaatctaagcctttactctactttcaattgcacagcacatagacaacacctttaaccaacatcaatgcttttactttaaatagtgcagtgtagtactattgatccaataccgatgcctatgatattagcggttcaaaaacctattgatccaaatcattattagaagttttcaagctaagaaaagaaataaaaaaagaatgatgtatcagtctcttacctttatagcaaagagaagtgtctccattactgtaaatccaagtttcataagatcaaaataaaataaaactatcaatgacacacaaaataaaaaatagagatatagagttctaagtcctcatgtcttacttatcattttcgcatttgtcataggttacttgaaaagcctctatgcttcgagagtagagtttgcatttcttgttgtcatcaccttgttaaaaagcctctatgcttcgtttgcatctcctctagcagcaggtgaagcattagcaggaacaaactcttcttgtgacgactctctatcttgtgcttcatttgcggtatcagatgttgaagttgtagaagaagaagaagcatcacttgtgcttttgcttgttggttgaaatttagcagtaaagctgtagactggcctcccatatttcatctctggaattacctctgtcgcaacgaattcttgacggcagtttggacaatgcaaggtcttgttcagataaccagccttccctaatttacaatgtgtgttgcacttattgtttttgcacactgtccaaaaggtaatgtcttcctcctgtttccgtggtttcttctgtttccatgaagaatcaggttcagggtcagactcagactcagactcagaagagtcagaatcacactcgtatgcgaactcgtgtggcttatgcattctgctccttttccggaactcgtacttatatttgtacttgtgtggctttggtggatcctgcgttctgctcctcttccgtttaactgggttcgatcttctcttttgatcataagcagttctcttagcattgtcagataataaatccctagcgtgtcgcacaagcttaaacgcgccttccgcgccattaaacctgttcttgtctggatgaagcaaaagagccaacttcttgtattgtttcttcactgcttcctcatcagctaaaggatctataccgagaatcccataccaatcagcttctccgttgattttgtttgatgcagagatataaacatcgatcatcatcaccacttgttccaaaccatcaagctttggatacaaagcctgagccttgctgatgaatgttttagctccatcgtaatcattcttcgaaagtttcttctcggcaatatccattgcttttttggcttcttccttcttacagtccatgtcgttgaaagagtttcttcctctacataaacaatcaaagaagcaaaagacaaaataacagagtttcaaaaaaaagccacgaaatatcacacaaaatcagaaacagatttgcaacaatacggtgaatataacaatacccattaaagtaactttttgcaaaatctcgagttaagcggaagaaccctagagccgccgcgagagaggcgagagaagaggaagatattaaaagacgtaaatggtttggtattaactattaagtaatttataggtatattttgttttactaaaagaagatttgatttttatttaatatagattatataaaaaccactagggcgtgtcaagagcgtgtatgacacgtaacgcttattttcttgatggatggaaaaaaagaaactttatcagctcggtgaatatgtatgtaatcattcagtattaaaacttactatttcaagtgaagacatgcaatcacaactaaagtatggtaattaagccacttcattctctaactataaaatctcaagtaaaatgtgttgacattctcacatcctaacctctgttttactctttagaggttagttctctgttctctctatctctaacactctgttttgttcgtttaatggagatagaaaacaagataaacactttactttaatcttctacattgataaatgataatattggatcgcaaggatagatatagattgttacaagtcctcacgcacatacatatagtttgtctttcaccacttgatacacattcacacacttaatattctagctttaactacttcttatcttttcttcatctcttctcacccaagtttaattttctttgtgcagattcagtcaaggaattcaacttcaacaaaatgttataatcccacctctgtgtcgttcattatatggattatgagagaaaacataaaagaaagagcctttatgataagtggagaatgagc

SEQ ID NO: 5386 - DNA, 411 bp, Arabidopsis thaliana landsberg
caacaaaacagacaaaattatacaaatgaatgttctaacagaaacggtacacaatttctggggaaaaataaaccagttcttttcatgaccccattccatttctgatcagttcaagaacctgcacaacctctgcaatgctcggtctctttaatggattctctgctgtgcaaatcaaacctaatttcatcacttgaatcagctcattcccttcaaaccctctcaatcttctgtcaaaacaatcagaagccgaacctgtctccaacaaattcctcacatgatcccttaagatcacaacctcgttttcagacggtgactccaccggttttctacccgccacaagctaaagaacaaccacaccatagccttcaacataacatttggcacttactttaaaaccttttgagctagccc

SEQ ID NO: 5387 - DNA, 999 bp, Arabidopsis thaliana landsberg
ccgaaagagttaaaagatggtttgaccctatgcctgagattgattcttcaacgaaacaacttggtacgttttggacagtgtgcagtagatgcaagacacattgtaagttggtgagggctaatcatcttaacaagaccttcccttgtcctaactgcagtcaggaatttgttgcggccgagatgattatagaggtaatcaatgggggtccagtcatcaaattgagtccctctgtgcagtcaaataacaaacggacacgtgatgcttcttccacaacctcagcatctgataaggcacagaggcctgcatatcaaaaagaagaagttttgaaaagagaaaagattgatcctgatgttgcgtctgctgctactggagaaaatgtaaaagaagcagagacccttttcaaggagccgatgacaacaggaaacgaaaactctactactgaagaaggaattgtaaaagaagcagagaccctttgcaaggagccgatgacaacaggaaatgaaaactctactactgaagaaggaaatgtaaaagaagcagagacctttttcgaggagccgatgacaacaggcaatgtaaaagaagtagagacccttttcgaggagccgatgacaacagacaatgaaaactctactcctgaagcagagaggcttttcaagaagccgatgtctacaggagacgaaaactctactcatgaagctcaaaggcttttcaagaagccgatgacaacagtaaatgcaaactctaatcttgaagcgcagagatgctttttgaggatatggcaacgggaaatgcaatctctactcttaaagtagagagaacacatgatagatgtgatataagaagtaagacatttggatgtagaagttaatatatattctgctttggttttttgggatgcatcagtaataggtttttatttgatttttggaaacatggaatttaccaacttaaacctttttggattgaaaatctattttctttttttcaattggaaaa

SEQ ID NO: 5388 - DNA, 653 bp, Arabidopsis thaliana landsberg
tcaggcttagacttaggtttatgcctagtaggcataggcataggaatatcaggctcaggcataggctcaggcatgttaggtctaggccaacgcttaggcttagactcaggcttattattaggcctaggctcaggtgtaggcgtaggtccataagaagaagctggcttgtctggctctgttggtttaggcttaggctcaggtttaggcgtagaacttctcttagtcttctgcattccactcgttctctgtttaacttgatttgatttcctcttctgatcataagaacttctctgagatttatcagacaatagatcccaagcttctagaaccaacttaaacgcaccttcagcaccagtaaacctgttcttgtcaggatgaagcaaaagagctaacttcctgtgacgtttcttcacagcttcatcatcagctacaggatctacaccgagaactctgtaccaatcagcttctccggtgatcttgattgatgcagagatataaacatcgatcattatcaacacttgttccaaaccaacgagatttggatacatacgatgagccttcttagcatatcttttcgctctgatgtaatcattctttgatagccccttctcagcaatatgccatgctcttttcgcttcttccttgttagattc

SEQ ID NO: 5389 - DNA, 2401 bp, Arabidopsis thaliana landsberg
ctgtcgatctctttccagaggccaagtcagttaattgcgcacagacaggaaggatactgataatagttactgaatcaggagaaacatcccccttatgcaccaagttgtgaaataactgaaatgctttaaaccactcacaatttgatgcataaccagctatgacaacattccatgaaactagatctttagaacccatcctggtaaacaatgaggctgcttcttctatccttccgactctcaaatagaaactaacaagtgaattacatacaaaaacatgggtttgcagccaagacctctgcacaacataactgtgaatctgtctaccacttcgacatgcaatgttcttgtccatagaagcgcaaacaggcaaaacatttgcaattgttgcataatttggctctgtaggttccttcagcattagacaaaacgatctaaatgcatcagccatcatattattctcagaaaacccagcaataatcgcattccaagagacaacatctttatcagctataccatcaaatgcagtataagcatcgggaaaaataaaaccaaatttggcatacatggaaaccaaagcattccccacaagtgtatctttctctaaaccggctttaataatataagaatgcgtactcttcccattgtatgaatccccaaggcgaacacacaaaggaagaacaatcgcaaaggtaacagagctcggcttaggttcatctgcaaagtgcattgctttgaaaaacctcatcgtttcacgaccgcaagaaacagaaagtccagtcagaacaatattccaaacaacaggatcaagactgtccatttgcctaaacatcttctggcaatcatccattctcctgcatttcgcatacatgttaagaactgacttcgaaacctcagagcaggctatatgaccaagcttgaacacgcaaccgtgcagagccctccctgatgtgagatcagacactgaagcacaagctttgacaacatccagaaaaaccctgtgatcagttccaaaaccagacaaaagtctgaaattctgaacaaattgccgtaaagggcccatctttcccctgaatatcccaacaacggccctttattagcaaaaaatctacgttacattgggtcagacattttcacaaacacctgatatgcaagaacagtttctctagatataagcgttgtcgagatgtaacagacatagagaaactgaaaaagcaatatctttatcaagctcctcaatttatcaagcaatgaaggtgtctctcagtctccatctcctccacatacaagcgacagtttttgtcttgagtgaattgaaaattatgaatatatatggactattccgatttaattaaaactgaagggctaaaaaagaatatattaatttacttaggtccttacatgaaaatttactatttctattcttattcgaataattagaagaaaaaaaacaaattccataaatatatatatctttcgtcgactctgcttttacacatctctcacacggtaaagttacaataatctcagcttgaatcacactgacgaaggcatcttcctgcgattatggcgtcgccggcaggtgaaacagcagcggttgttgagggcggagatgggcagcagcaacgacaagctggtgggtttgggcagacaattaccggaatcataagaatcgccgtcttctgttactttgcttctaagttcttttctcccaaacaaaaacctgcggatccttccaagcctactcatctcatgtccaatctatttcagaggggcgagcccatagtaatcttctggttaattgtgttgattacttgcttattcgttaatatatgcaatttcattcgtttctctcttcttccaaaacaaaaaaaaaaacgtttctttttggttcgaaacttcgaatcagagtttttcaacttctgggtggtttagggtttttccgttttgtgtttttgtttgtcaggatatgtggttttatctttcggagcatgagaaattcaatgacttcggcaatgaaggtgcgcttatttggcatgagacaaacataccttatgctgtgtggaaaccagagagcactaggaccttgtcaatgacgtactatccttccgaggtaatagaagtttggttttttttcatatgcttccttcgagattaatatatttgctgcattgaattaaagatgtttgttgttccaggcactgaagaataatggaagtctgtatgctcatgtcttctttgctcgatctggttatcctatagatcttagtgatcctgaataccagcctctcaactgctttggcaggactcaccgtaagacttccctttccttagacaaacaacctttttgatagttgttggtagtgaaattcttgtatccgctaaaattgtatgactcttttca

SEQ ID NO: 5390 - DNA, 503 bp, Arabidopsis thaliana landsberg
agaaccttggaagcctttgcttctgtctcacttatcatagcctcagtttctttcttgctctcaccaggtgggctggcatgggcctggaccgggtcatccaagagtcgggtttcgattccaggaccatctggttctctttccgtcttctccggctccaatccccaccgtgttctcgccgctcttgctaaacgcttcaaggcctctccgttgatggcgttctcagttgggttttcgcgtttcgttatctctagtgaaccggagacggctaaagagattttgagcagctctgcttttgctgaccggccggttaaggagtcagcttacgagcttttgtttcaccgtgccatgggattcgcaccgtatggtgagtattggaggaatctgaggagaatctcctccactcatcttttcagtccaagaagaatcgcgagttttgagggtgttagagttggcatcggtatgaagatggtcaagaagattaaaagccctgttacgtctgatgc

SEQ ID NO: 5391 - DNA, 2658 bp, Arabidopsis thaliana landsberg
tttttttctgctttggaaagtaagtcgccacagctgaaatagtgaaaagaccagtccaaatcagctattacagaaaccgaataattaattgttgtccaaaagagccttaccatgcgtcctactaaaactattaagaggttgatattcaggatcagtggggtcaatgggaaatccagatcgagcaaaaaagatatgagcatacagacttccattattctgtagtgtctgcgaacaaaaacaacatagtaactcaatgcagcttagtaatagaataatattggaggaagcaatatatgatagaaaccaaaatatattaaaaagtcaagcaagtgattttatacctcagatggataatacgtaagtgacttggtcctaatactctctggtgtccatacagcataaggtatattcgtctcatgccaatatagcgcacgatcattgccaaagtcattgaacttctcctgctctgatagataaaaccacatatcctggagaaaaaacatcggtcgaatttagattcatgaacaaaaaaaatcttgaaaccctaattctccaatcaaacagtaatccaacactagtcatacacaactctaaagcagacactataaacatgtttacagaactacacacgatttattaaaatccatttgtagaagaagtaagaatataaattgaagttcaaattcatcatctatagaacaaaagtttaccaatgattcgcccttgtggaagagattagtcatgagctgagacggagcagtgggatccataggtttctgcttaggagaaaagaacttagaagcaaaataccaaaagacggcgattctaacgatgccggaaatcgtggaaccaaatccacgctgctgctgcggtggagcaccatcggcgccagccgcttcagccaccgccgccctttgtcctgccggcggggccatagtttaacgaatcgagaaaaggaggattgtttttagttacggcggattcaaaagcagctgagatgtgaattcgctgaaggagattctgagatttgtaaaagcagagagagttcgatagagagatatttatgggattctttatttaatttatattttttgtataaaaatctgaaagaagatttgaataaacaaaatatataactgtgatggagtcgtgacgatgctcttccaatgcgattcaagtagaagtgttttatgacaccaacacgtcgctttagactttagaacaaagtaacatttgcatctaacgacctctgtattctagatatttactattattgcccgaacctttagataataatatttgtacccatctattttgtagatataaaattctaaaaacatgattttgatttgccgttctgtgattcactctgacgtttggtaatatgtctaactttcatatgaaattttaccaaaaaaaaacaaaatactaaggaaacttggttttagtcacaagaacttaatgcttccttagatccgtctactaaaaattggaggataataatctataatctccttagatttgtcctagtatttaaatggagtctctcagatctcctactttccgacataccaaaagcaaaacaaagaaacttagtcttgtcttgtgtaccagacttttgtctcaatcatcttcattgtgaaggccatgcttgtacatgagctgttccaaagcctcatcaaattctttctccagatcaaatatctcctcgtgatgcctcttcttcatgtcttccatcttcttctcttgatcttttatcagcatctccctctcttccacaaactcctccatctctttctcttgaaactcgatgaagcttgacacttcctcagctctgctgaaagaatcaaaaccggaataattcagttactcttaggtttgaaaaacaaaaacgccagagggattatgttagttagtacatatacctctttcggcaatcgtcattgctagagggattaatgttctgctgctgctggccaacaaccttggcacgttcctgctgctgcaacatctcgaaattctcctcctttgcgtctcttctttcatggatctgtttgattgaatccatgaaaaacctgtcgtgtgcatccatcttcaaaccaccacaggttttttgttggacaatataatcaaaaatgtgaatcagtaggtaatacaaaatgtcaagtttgtgattttctaggaaaaatcatacctcttccctgttctgttcatgctgcatcttagttctctgtctcacgatccgattatcctctgcagttctacgcagcttctcgctcataatttccagagattcctcaagcaccttggcgtgcttgttctgttttgagagcttgttcttaaagtagttcagctgctgattgtcctcagagatctgcctcagctcctttacaaccatctcttggtatgatttcaactcgaatttcagccttgttttgcctaatgaatcatagatatatacataacagatgcattaacacggaccaacaaaactttaaattccaatgacaaaactaaaagcatatatcaaatttctttgggggagagaccttgagagtgttgattgaatatgtccagatcttgtatcgttgcaaggaagccatacagttggcgaacacctccagaaaacatactgcgcttctgacccaggcaattcta

SEQ ID NO: 5392 - DNA, 2734 bp, Arabidopsis thaliana landsberg
gtttggccttaggcgtgaccaaagagtaacatttcataaagactttatttagcatcagctccttataaacttgagaagaatcaccaggccaatattaaaacactgatttctgatatctgcacaatgaatttaagaaaataagagaagtaacatgctttaacaaccgttgcaaaatcccccaaaactccaatgcaaacaaaaaccatgtggatatacacagaaacttcttgtcttcagacatcagtaagttaatatatactgaggaaagacatttcaacaattaaacaagggaaattcattgctctacctgagtggatggatacatgatacatttagtgacccatgtaaggagtaccgtatggcccgacaccatgttgccctctacttgtaccgccttgaccaggttgcggagtctgataaccgccttgcaacccaggttgtgtaccgtacccaggcattgtccccggtgccatagcttgagtaccgtaaccagttggcattccaactccattccctgggtttacaccagcagctgtccccaaggaacccaacaaagcctgtccaattgccggattaaaagccaaaccagctccctgagatgccagtaaagctgtcaaggcctgtccaatggccgggtttatcacctgtgccgttggaccacccatcccagctgggttaccagccatgagatgtccatgacctccaggcggaccataaccattgttatcattcctttggtaacgaggattgttataggcgtgtgggttatggtgatgctgctgctgcttgcccggtttgggaccatcgatagctttctggcaatgcaagatatggccttcaaaagtcttgtgtggctcctccaaagccctcttggcgctttcagacgacttataaacaaagagacagaaacctttaggtctcccagtatacttatcaagacccaaaggaccttcttcaatttctccaaactttgagaaaaacatcagcaacttctgtggatcaagctctgctccgacattactaacataaatctttttctgagtatgctccgagttcgaatgctgagcaggcgctgaaacagctgcagcagcgataggagctccaccaaagacaggtcctttagaagccaattggcatgccgtcatacgactaccaatcttcttctgaggctgcttgagtgcgttgcgagcacctgaacgagacttgtacagaataaagccataacctttagatttccctgagatcttatcaaacacagccttgcaatcttcgatctctccgtactgcttaaaagcttcaataagcgtctctgttttcgtatcccaaccaagaccgtgcacaaagatcttccgatgaacagggtcctcatcagctacttccctaattcgattggctacatcaacatgcttctccgctgcttccttaagaagactcaaaacttgctcctttgaaaatggttccaacagatcctgaattggttcatcgtcatcatcttcttgattgccagatccagacgtcgccgccgcctctatacgattcccatccgtctgatcctcattctcatcaccatcatcttcatcgtcatcatcttctacttcttcttcttgctcttcctctacttcctcgtattcaacttcttcaacgtctccttgattatcctgatttttaattacaagctgctgctcctcctccggcgtctgcttcagcttctgcgacggttcttcagcttcgttagattcttctccttcgagctttctcttctttgtcattttcgaattctaatggagattttagggtttcgaatgttttctttggtttcttctccaaaaagctgattttcccctccttatctataatgcgccgctatgtgggtggtatatcatcaacctcaagtctttgctaagtggagttttacacatttacccctaaccattttatatatataagcccattaatgattattgggctttaagtttaaagacccatttacgaaaagatgcttaagtaagaaaaaaagaataacgtcaaagttcccgccatgtgtttcccgcgagacttgacggctcataagattagtcagaactcagaagacaagacaaccaaagaaaaggtttcgcctcccttcttacaaagagctgcaattttcagtctcttggtcttcttcttcgtcttgttttcaaattaatgtctctctgtctctttagtgaaccctagatccagaaattagagtttggagcccaggattcggcattcatttcccttctcaatccaattaagcgttgattaagacttaaggtaaattcaatgtcctagattcaatttctctttgatcattcatctactttacccagatctgctctttaccattctcgaatcgatacagctacaaaaaaaattgatgtagcgaaattagggttttcgccgcccattgtgaatttcattttttaatttgcatgtccttttgcgtggtcagatttgtgcaattgattttctaagaaaagagttttggtttcaaattgtgtttagtagctaattcatgttcgtttctctgattggcttaatgaaatttaggattctggtttattgttgttagcacttagcagtatccttaccggtaattcctttgtttgtttcaatccaggagcgcggggattatacgaccttaatccgttgttagcaagtaattatctaaaagttaaaatggtggagttaagaagtagcacacacttgtact

SEQ ID NO: 5393 - DNA, 3486 bp, Arabidopsis thaliana landsberg
atctattcaataaatgaaaaataaaaatgatgagaacaattatgggcttgccacatcttttactatatagaggattccaaaaagttggaagaaaaacaattcctaaattgaaaagatttttttctttttcttgctatgaatgtaaataaaatctcaaaaaaaaaattaggagatgatatatatcaagatgaataaagacgaaagagacttaaaatttgttactgcttcccttctgtcatctttgtattatttcctatcatattgttaggaaagatttatttctttacatatgagaaatatgacagcatcaaattcaatgtgcatcaaacgttttgactatttttgattttcttccaaaattaaaacgacaaatttgattttgaaagcaacttttaaaaatacgtttcgccaaactaattacagtataaattggatctcatagccaataactttatctcatcaaacaaaactcaagtcatctatttctcttgttgcatagtcccccaaatattcatcatgtcgatcaagagtgttgtttctctcctattagttgtatgcatcgcagcctccgttaatgctcagctaccgcagtttcccccaatcatgttcccgtttccaaatccgttcaaaccaagtcccggtatgccaggaagtcccgacttgagcaaatgttggtcaacagtgatggatttgccgggatgctttgaagagattcaacaagccgtaatgtccggcaaatttgaaggcgttggtcctgcttgttgtaaagctttccttgacgctgaagctaactgcttaccaaatcttccatccaacccgtttttccctcctatgatgaaacaccaatgctccaaaatggctagtcctccaaccaccaccgcctattagaatgcaaaaatgtagttgtgttttttcgatttttttgttagtcccagaatgttctagaagaagaaatgatcttaatctaataataatgtctcatttcttatattgtgctccatatgattgatgttctttcttcttttgattgatgaatgaatctcaaagacatgttgcgtgatatctcttatgcggttatgacaatgctttctatataactcgacatgtagaccgatcacacacaatttagaatacatcacatacattacatactatcaaacaaaaatgttccaaaataatgaaaagaagatcacgcccaagctcttttcctaggggaaagatcagaagtcttgatatcatctattttagccgccattatgaaatcattcatgctcaaccctcctgcattattcatccaacaaaccgtcttaagaaaccatatattaaaactcaaactcgaacatcaaatatttgacataccgatagaagaggtaaatagttcagctcgaacttgggtaggactttccaagtgaagagaagggtaatgaccagaagcttcagcaaccttatggatcctgtttatgagttcaacaccgcacccaaaatccctcactttccacatacaccttattttcagaccacccgcttcattatccactatactccatcccaaaacctaaaacgtttacataataatcattgagattgatgtaccacatcattagagtggtaaccgtgaaccaaaacaccaacatgagccttatcaacactaatcatttcatttttttttaatctcgtaaccattgttcctaatatgtccctcatgatactaaaattttcattggcttatctatatttttgggtcacaattctatctttatagattagaaatctgttaaacgcagaatcaataacattttcacaatattttgatcaaccaacaaacttgtaaaatcaaaactcgaacatttttatactaagagagaaatagtataagtaccttgtggaggagagttctggcatcatcgccggacaaaggaggctgtgaagacgaaacaggggaacactgaagctgggagagagacaaaacagatgcgtttggtatcaaaatcttgtgctcagtgctttggcatcccaacactttatctccgaattgactcgctatctcctccgggtaagggtcacgagctccgaagtcaccaagaaaatcctgcgccagattagaccgggtcaccgttaaccggccgagtttacggttattcctacttacaggtggtaataaaccgaacactttaaggattgagcgagaaggttgacggaggaggagggaggacgcggagatgttacacggcggtgatgatgacgtggcggccatcgggagctgtgatttgctctgtaccgaagataagagttttggtttttagagagcgaaacgattttcagaccactggactgagttaaatgggtgaggtgccacgtaatcactaatgactaatgggaaccacaataaactttcgtgggaccgactttacacgtcacgtttttaatctgagaagcccattgggtttgattgtacttttgtgtccacttttggtgaatctacttaagatttcataattccgaaagtatcctttttgggtatctttaattacaaacaaaccttcccttctttcccgatttcaagccctaaaattccgagacttctgtttctcgctttaacgacagtcgccgagtgagagatatagagagagaaagatgccggtgcacgatgagcaagagcatgaggtgtacggtggagagatcccagaagaggaagaaggtgagatggatacggaagagtacgaagaacacggcggagaagaaggtgccgccgcgcggagatgaggagcttgaacctggctctagctctagggtattgtgattcttcgatctataatttacttttatccaattgagactcttcttattttttactgtatttagtctgttatttgctttgattgtttgataggacttggaggatatgaagaaacgaattaaggagattgaggaagaagctggagctttgcgtgaaatgcaagccaaggctgagaaagatatgggtgctagtcaaggtttgtacttattaactgatacgtaaaatcttgaatctttgtgcgcagcttcacattaacctttaaattgatagattaggtttagagcttgtcttgttgattatgatattgctttgggtttacatattggaatcttttagtgaatcaatgaatctgtctagaaatttactggagtttgagtatgagaaggaaatcattaatagtattgtggagtcttgtcagttagctaattgggtcaataccttttatgttgttgcatatcaatgaagacccttcaggtggtgttagtgcggctgagaaggaagaagtggattcgcgttcaatatatgttggcaatgtgaggcttgttccaccattaattttcacatgtttctcatatatgtttgtatcttttttaaagaaagtttgtgtgttttattgctttggtatcaatgaaatttggaggctgcttgttgtttatttctttatctctagtaattgctaaactaacttc

SEQ ID NO: 5394 - DNA, 6151 bp, Arabidopsis thaliana landsberg
aaaaataataaaagacacccctttttaattaactttcggaaggtttctccaaatatttccaaatatgaaagaaacctgtgaaaccatgcctccaaaaggataggaaaacttgttataagcacccaatttggaacctttaaacttaactaccgttacatggcatgacaccaacccgaatctcaatgacaccttttcctatgtagcctaagaatccaattctaataacgtacagcacatctcaagcggccttctaaattcaaattagaagagcaagcaacaaagaaataaagtatctgccgccaatctgttcaaataacattaccggttaatgagctttcatctacgcacttggtaaaatcccagactttaacagtcgtatcatcagaacacgaacagaacttcaaatctgttttacaaaaactgttggatacacattgttcagttttgagagattcatttaatgcaattcaacatatcaaacttttttttaccttaaatcgcgaattgattccttgtgagcagttttattggctttcacattgttcatattgttctgccaatacctgatacataagaaacaattgatccttattgtcacagcatttgaatcatagaattctgagcttctcgtttacaacatcataagttagggactgaaagggaaaaacaaatttactttaatgtgcctccatcatcaccagaaaccatataattttcattgtggctccataccatcgacctaataggttgatcatgtgcctgatattgacaacaaatttaaacagtcaataccaggagcagcaactatagaagaatcaaaacagaagtttcaacagattagttatacaatctgagaaacgaacctgaagaatcatttcaaaattaaaagattgcccattccaaagagtaaactccccactttgggagcccgtgataagacgtcttcctgaaggtgtccactaaataaaagaaacccaatcagcaatgatcccattaagttggaataatagagttaaaacaaagaaagaaagatgttgctttcttgaatagataaacatggcaaacagagaataatacaaaacacacagctggtagagggatataccaatacacggttgattgaacaacggttcttgtttagagatgcgtgaacaaactttgcagcaaagcttgttgaaggattatccgaataggcaactgtgggaagcatctgaagcattgatatacaagttagatcagtaaaccattcaatcttattgcaaaacccagaaaagcaaagaaatctaacatcaactgctgcagctggggttggttgcagagtggtcctatcccttgagtctcgctgccatgttcgagcctgaacaaaaacatatatggagtaaacactctctacttttagttccatataaagtatgagttcgttgaactacatatccatatcagttccatgacataaagacaatcctatctaatggcttttgagataaaaaggaccgaagaattcaactggggaaagcagaggctatgagtatatagaccaagactaaaactttacagaaaacaagagaaatataatcaagcagtacaaaaggttctaacaaagaaatactgtgagcagcaatgggaatacattacctgaatatatctaacaacggtgctggtgtaatcaacagctcttctctgtgtatgctttctcattcgtttcgccccaaaactgtctacattggctgcaacatcagacagagagacattaaatctcacagtcatcactaatccgataaaaggaagacgctcaaagtctacttacggtcgaaggggccagatgggtggtggtagtcgggattgatgttagtggaagaagctgacgactgccgcatcatcggtggttgtggcatctgtgaacccctgtgcatatcgccgccggcgtacattgttccccacggagaacagtgatttattcgaatcgaagggaaactgcgaaagtgttcgaatttaggttaccttgaaacgagcgtggatctctctttagggtgtgcgtgtatcaaattcacgaattgatgacaacccaagagcagagaagtacaatgggtagagaaatgatgagaagtcgataatggagtgaagagtagaaataaatcttagggttttcttttttcttccttctcggcaagccaaaccctcgatcgccggtcggttttaaccgataagataaataatatcgtcaaactaatcaagaactctattggtttagccttttttacttttttaatctccacgattttttactttatttatttatttggggtgtatgttggtacttggcctacccgatccattagacgcatatgttcaggctgaactatgtattgcgagtaggaaataacggataagtttgtttagtaaacccatccgtcggccttccggttgatcaacaagctcgaggagtgtatcttaagcaactaaccgcaaggtggcatgaaaaagatctgaagaactgttgagatcaacgagattctagggtggatactgcggatcgggcaggacaggtgaatgactataaaagaaagaggaagaagaatgaatagaggcatcgccattaacattaagaaaatcctagtattgtattcacatcgaactctaatgtcccaaagtgtggttttttctagtattgttgttgttttactgcttatttcacaatcatgacagagtgtgtgtatgaattgtagatgaaaacacacacataattcacgtattcatagtggaacatattgaataaatattcaacccaaagatagtggtgatgcaaattagtctttttttttaaaacattaaaataactaaatatttgaaagagttaaaagtaaaagaaaaaaaaattgacactagtaaaacgaattacaaaaattcagaaaatgttacaatcttttttttttggtttaatgttaaattaaatgttataatcttgtcatattagaacttaaaatctcccaaataacaaaaaaaaaaaaaaaatcgatatacgttattccaaacaagattcactacatcccaatggcaatgctatatgaaacacaatcccaatccgctattatattcccctacgaaacttaatcatgttaaaaccctgttttgcacttatagagtataaatagactatgttaacaggtttcaacattttttttttttggtttaatgttaagatttataccaaatgaaaaaaggtttacatagtacaatgaaaccccaaaaacacaccgagctcttgtgaagagagactaatggaacaccatacatacataaatatgagctttgccacacctatagtggggtactaatacaaccaaagtagaatccaaggagagagatagtggtaactgattcctccggcgagaaggagatgagacggttacgcattgtgcgatcaacgagaatttttgtagcggagagagaggtagcatctgctgagaaaactctgcggttgcgctctttccaaatcatataaacagcggtttgaagaagaagttttaagatcttacttgcatagtgcggcggagaagaatgtacaccaagaacccacatagaagccaagggtaaagagagtggaggattcggcgaactccttccagcgagcgaaatccaaagtgatctagaaaactcacatttgaagaacaagtgatcatgggaatcaaggccagaatcacacagaacacaagaaccatgtacattcataccccactgtaaaagcctatctctcgttgtcaacctttcatgggaagccatccaatggataaatgaaaaccttgggacagattccttaaaccagacagctttatgccaagccacatgaggagaaatttgtctaatttgcatccaagttcctttcgaagagaatgtttcagaaaaagtacctgtgggctgcttccattggtaccaatcagcacctcttaaaggagaaggcggggcaaccgaggacaagcaaatctgcaactgctcagcttggtgagatctcgcattgggaaaatgccattgaccttcatgtgtagcttcccaaacgctagcatttctactgatccgaagctctcttgggcccaactgaccaaaaagctcaataaggggaccaaggcttgtccaataatcaaaccagaaagaggctttcataccgtctcgcatctgacatttaatcaatctctggaacacagattttacttccaacatcttcctaatgttccaagatagacgtggtgtgctatccatcaaccaatagttccttcttccgaagatgttatggtccaaccacataacccacaatgagccccttctagtaaagaggtgccaaacctgtttcaacctgaaaacagtagcaaattcctcaagagatcgaatacctaacccaccctcctcttttgtcttacaaatgtccttccaagcaactcttgcacctcttgcagacgaagtagtatttttccacaaaaaagcagagcagagattgtcaattttcttataaaaaccctttggtagaacaaagacttgactccagaagttcactttcccataaacaacagatactattaaccggattttcccagcataagagagaaacttggttgtccaggagttaagctgcttggtaatcttttgaataaaaggttgaagtgtggcaagagaaagcttagtcgggttcagcggcaagccaagataccgagagggaaaaacacctattcgaatcccaatcaagtcagcaataacagcagcttcagaatccccataacctccaaaaaacagctcagactttgaagggttcatgtccaaaccggaaaaggaatggaaagtttgcagtataccactaataccaaggagagagtgctgagaaccatctgagaaaaccaataaatcatctgagaaagctagatgagttaggcgaggagtgatacacaaaggatgagcagaaaacttgccctccaacagtccactgtccaacattctggataacacctccattaccaaaataaagagataaggagagatacaatcaccttgccttaaacatgcctttatgtgaagatgaacatattgactgatcttgcacctttccattttcaacatgcctttatgtgaagatgaacaaacatgagctgaaaacaaagaaggtgaagcacaaccaaagtgacatagcatactttagagctagatagaagacgtgggatttagagctcttcaagagtcaaggcaaatacatttggactgggatgaggcagcatcacaagccttcccaaccattactgaatcacttcgacattcgaaattctgactcaaaacatatgacaccctgaagatgaccattatagcgatccactaaaattttgtacaactagccgacggaggaggaggcgaggaacgtaacactggtggactgatattgtgtttttgttcttttttttttttttttccaaaacaccatttttatttgtaaatatactgttggtcaaaacaaatattaaagattaaagcactttgaccaaaaaaaaatataaactaagaaatatttgaaacgttaccgtgtagacagttgactacaaaaacccgtcaatggccaataacattccacatttccggcgccaaataggtggcatgatctacggccgataacgcagtcgtatacttccataattatattattcattttagtaattacaatcaacggctcacaatttcaatctcgatgatctaacggtcctacagtccccgagtgtatagaatagtgcgttacacttgattctttctagtgtgaccctatttctggagccaataaaaggctcgtgtcaaaactcgcctcttccccacaaagagaattctctcatttcttcttcttcgctcagctccgacaacgaagggcgaagaatctcgctccctcaatttcgcattgccatcgattttcttaggtaattctggttactctgagatctctatcgctttaaatctcgttgtttatctctgttcttcatttgattctattgatctgcttcacagtcttatatatcatcaacaaggtaaaatgattcgtttcgtcttgatgatctcctggcttctctgcgtaatcctagattgaaaaaagaatagatctcgtgtggagtgtgaatgtatcgagatcctg

SEQ ID NO: 5395 - DNA, 4843 bp, Arabidopsis thaliana landsberg
cgtttgctatatccctagtaccttgacaaatctaacgaatgtagataatcaacctttgcttgtattttttgtgggtctattcataaccaaatcaaaagtttttaattaataatcttactttatattctacctaaaagatttgtggagccgtttattcgttttatttttcggcagttgagatctatcttaatattgtctgaaaaggagaagtaccaactctagctcccatactcacacaagtcaatgttgcttgaattttttgtaaagcattaatttgtattaggtaaaaatatttaagatttacgaacgagttatgttcgcttatttatggatcattatcactcgatgttagtgagaaccagaccaatagttttctaaatccggtatattaaaagaacaaaaaaaaattgatacacaaatatttccctttggccaaatatagggtagataatattttctagtttaagttagcgattgtttaatagtaaatcatgacttgtagtgttatatgatttggtagtggatatgcaactgctagtagttttagtgaaatgttatgtgttcgtaaaattcatgtattttaacgaagccattgttaaaaaacactactagtagacgctattttaagcctgacactttggaattagaaatcaaacgtagaggcatgcatacttaggctcggaaagcatatatatggtatcgaacctatcggtgtgacggtgtccctatagtggctacccccaaagactgtcgtctcccattattactctgtcgtctcccattattactctgccattgcaaattttggagtatgcaactccattttctcccgccttttattttgtcaactaagtttctttctattgcttgacaaaaaaaaaaaaaaacgaattgcctttatcattaagtcaactaattttcttcttcccttagaaactgtatttagttactacaattgcaaaaaagggtatgattattaaacttttggatgcatggaaataaacactataaacttagtttaactgagaaaacgcatatatacgttgggtcaaaccataatactattatctttggattagagcactacgcatactcagactccagatggtatgcagaatatttgcttatgtctactaattcaggcaaacattgtttttaatatgttttgtcggtattataacttgtgttattagagataaaccctttttggatgtgaaaatctcattaagccattgatatttttagtgaaaatctcgtaatgcataaacactaatatatactacaaccccatccttacggggcatggtgctcatgttcattgtcaataagtgttttaaactcgcaagattaggtattaatatttcatctaatcataggtttgcttaaaattagttacccattttctgataagttaattacgtaggcccaaaaagtcgagctaccctttgaaaaaatcatctcatctcaatggacacgccatcaaccattatcaccaattcagtccttatttccacctaaccatttacactctatatagtaagcaaaaggaaaaaaaaaaaactttcctatatataaacactcccactttctctcacaaacccacaacactgactcacatcatcaccatggctttttccactagctcatgtctcttcttcttcctcttaacacttgttcttttctcaacccaaatcagtgcaagaaacagctactcctttggcaagttccaaagagaggaccccaaagagcaaaaccctaacaatcttgtccctatcgaaaccaacgagaagaaagagccagatgaccagaaacctgagtctatcccccagtccggaaacgggtacggctcgtatggtcacgagacgaccgacagcaacaatgaagagttgagcaataacaagtacgaggacaacgttaactacgacgactctttctccacccccagcctaagcgaaacggctcaaacccaagaatcttacaagaactacaaagagagctatcctaagactaccgagatttacgacaacaacaaggacacgagctactacgaaaactcgaatgcttacgggacagataagagagataatgatattaatgatccgtacaagggttatagcaacaaggacacgagctactacgaaaaccccaatacttacgggacggagaagagagagaaggagccggcgtacaggggttataacaacaacgtagagagacaagggatgagcgatacgaggtatatggcgaatggtaagtactattacgaccttgacgatgacagaaaccacggccgtttctaccagaatcattactacaactacaagcccaccggttacaatgagaagaagtccaacttcaagaatccatacgattccaaccaacagtccgagatgttcggggaagagcaaggagatcagatcactccatgagcatcaccgcatgaaacaataataagtatctgcttttgtattctcgatttttgtttcaagtggtttaatcatcagtcaaaagtataattttaatttgcatataaaatttggaaaaaaaaaaatatatatattatatggcgatgcttgttaattatgataatgttctgatgctggttcaatctctattcttctttatatagagattaaaatgttttgcattatgtacaagaaaatataagatactaatatcaatgtcgtctgactattgaagctgatgatgattgtttctgtattagtcgattgaccataatttatctcaaagaaaatgtggatagtcaatgattagtttgcgattgaacctctaatgacccatagtgaaaccaccgactacagatttgtatagaatttttgacgtcgactctctattcaagattaacattttatcatactacatatttagtaaaactcttgttgtttggattaaagaattctcttaggaaaaaaaggtacacaaatacatagtcacgtgacatgcacactctcgtcaaacattaggcattgcacgtgtaacgtagtgagagcaacgactttctactgtattgaaaagtcaacagctcaacagattttctttgacccaaacagaatccctaaatcctactccaacgagaatcgggaactttcaatgtccgccgccagatccgtcttccgttccggtgttggccgagccgccgttgccgcgttaaggtcgacaaagcctatgccgtcttctgcgcggtcttcgtttaagttgcctaaacagagtcctctctctcaccgcattttcaggtaaacatagagtgaaaccttctctaggctactccaaaacatcgattaacttaattttgattgtcaattgtgaaatgtgttgaagatctccggtggaattgagctgctgcgtcgagacgatgctaccgtaccacacggccactgcttctgctttgctcaattcgatgctttcagtttcagggcgctccatttggactttccaaggtacttaaatgacttagtggaactcggtgttttgttaccttttgactttttttggtgaaacttcttgttgaagatgtgaattatgatgaagatagagactttgatacataaggcagaactgtatcctttaattgttgcattgttatatcttcttcctgtttattcatcatatgcttgtagattaagtgtagagttggtatgtcacttttaaaggttgttgtgttggtcttaaaggttatgtgcaatagtaaatggaggttcgatagatggatgaatttctggaattgaattctgtcattgcttggtttactagttctgttaggctctctcttgtttaggtggacccttgttttcagttttcagttatcgaccacattttgatgtttaaatttgtcgcagttttcacgagtagagttctacttcttatacacttacgaattggtgttttggtatgagacttgaagtttatgttggcatttaatttccatctgctttcttcgccttacttgagtagttgggtcaggaaattaagagactaaaatacagccttccctgtggcataatttgacaaattttgaactatatttcaaatgtcttgcatgcaatgagaatctcaacttttttctttgtcaagatgatgaaaaggataatgatcagaagtgattgatgtaagccatttttatcatgtgttcttcttggagttaagtcttcaatataaaaaggggaaccttgatgtgtgatgtgtgcattatgccctctaatgttttaggttatgatagtgtttcacatgaattgccaatagaaactttcatgaatcctgcaacacatgaggttatgttttctcgatactgatatgatgatgttctatttgctcagattgcatcgatgatgcatgaagaatctcaaatgaagggcaagaatggatgcagttcgcagcaaggtgatgaagtgacagtagctgtgtcatgtttcgtcttgggtcataagatccggttttgaccttcaagattgtcaagtaacgaaggaatcttatggaattctattcgactctaaccctagagatttgtaaggaccaaccggttcagtaacagttattatttattagcaaattctgactactacccaagtctagcttctttatttttgagggtgtttcacaatcacaactgtgtatcggatttgactaatttgcaaagacattttggacacaaattcaccaattttttcattaaccttctctttaaagaccatacaaaagtagagaggttacagaagcatacacagctgaaagagtacataccgaataccaaacccgagatcaacacaaatcaactggtagataaatatagcaaacttgcatcatcataagataaatatattttacc

SEQ ID NO: 5396 - DNA, 1457 bp, Arabidopsis thaliana landsberg
aaagaccttttaaatcaagccgagacccacgacaacgacacactaccccaataattgtttacacaatcataaatacccaacgaccggccaatgcgtatccactagtgaattgatacttttaaggttaagagaaaatgaggtttattttcgtacacgtcatttggtgtactgtctcgaccacattcacatgttttctgaggtcgagaaactattttaactaacacggcacttaaaattcaactgcaagattttttgaatggaagacttattagttattaccaaatcaaaagtcttctgatcatcaaaggaaaattagtataaataagcatagaggcgtccatggattatcacagttctcatcaaatatttgaaagtatcaaacaaaaaaaggagagtgagaaaaataaagagagagatagagagagatcatgtccactactcaagagcataggtcttgattggtggaagacaagtaccttagataaaccgaccaaaacccggtggataaaatcgagttccaacctcttcaacgacaacgatttcaacactctcttccaggaacaacttcctccaggcagatgatactaaagtgctggagttcccggttcctgagagtgagtccatatcaaaatgcgcattcgttatcacttggttgaacccatttggggatttaaatttggaggtgaaatggaacgcgtaattgatgactcctacgtggaacctcttcttaggaagagcacggtcgaagaagtaactgcgcagtgcttaaatcgtagatgctaaagtcgttgaagaggacttggaacttcgatattatcccccgtgttttgtccagtttctctataggttgtgcctgaaaatatgggtttctaggtttaattgatgaaaagagataacgtaagtcatgcacatgtaattaaattcatgcccctaactattaattcttgcaagtaattaaaaaataaaacgtacacaaaatatatttatgatcactaatcctttttaactactaacattaacgatttgatctatcaatgtctaatgatttcagggaaattttttgtttcctcatgtttacacgtgtcaacatcctccgaaggaatgcaaatggttgtggaaaaaaaaaaaaaaaaaagaatgcaaatggttgagctcgtgttgggctttgttttcttattttgttttttaagggctctagtggcccatgtaagttatgtttcatcaataaaactccacttataagaaagaaaaaaaatggttacaaccgaagtccaaaaaaccaaaatagtgacgtaaaaactgttgcttaaacaatctgaagtctggacgcttgatttcattccttccgttttctccaaaaccagacgaaggcaatccctaaaccgtcacatttttggcgccaaatttcatcttcctcatcatggcctctgattccgccggagccacaatctcaggca

SEQ ID NO: 5397 - DNA, 1749 bp, Arabidopsis thaliana landsberg
ctatcttgaaatgatcattcaaacctggaatattatctatatgggactactctaaaatgaaattgtaatatatgtagagatgaaaaggaatatccataatttatatatgctcaatatgtatatctacatagagtcatatcaaaacatttggcccgaatgcaaatttcaaaagataaattttggaatagaacatttccaaagacgtaaatcaagcacgcaatttagaaataaagcattgcaaaaataaattcaactaaaatttagatgtagatgtatattgtgaacccccaaaattaattataaaatcttttggaactgacatgtcaatatttgtttgattgatcaaccttttttctcctccaatcttcgtttagttctaataaaaatatcataaagaattaaagattgcagttatgaagataatgacatttttctttaatattttatttttcttcattattttaaaaacgtttggctcaatttatagacagtgaaggaaagttcttggaatttggttcttcttctatacataagctttggttacacaatcaaaatcaaatcgagaactgttgttgtgtccgaaaatcaacatcaacatcgtttctttcttctgccattaaatttcaccatcttccaccttcaactgccctagacagctattctccacctttctcttttctctatcattcccagagataaccaaacaatctcagaagaaaccagaaagagcaaagaaactaaaaactaatattcattaaagtcagtgtttttaaattcgatttcgtaatgggttcttctgcttcaaagaccgcttcttccgtttcttctgcttcttcctcatctgcgttttctccaccgccgaccaaattcagctccgattcatcttcaccggcggtgcagagagctttttcgtttccgacgccgttggttcaccatcctccggcgagaaaaggcgactctcatcaccttgtttcccttacatctacatcgtacgggtctcttctcctccttgatctcgatggatccaaaaactcctcttccgaccaacaaacgctgcctcgtatctcaatctccgggaagaacacaccagatccggtctctcctgattcagtcataaacacttgggagcttatggatggcttggacgatgaattcgaattcgaaattcccaaaccgggtaagcgtctaaattcggatttttgctctaaacccgacccgaatcggaatgtgagtttaaatgggtcttcgttgaaattggatgaatcttacgagattgtgagaatcgaagaagacgatggagattgggttcctttgacttataaacctaagcaacctttgtggaagcatttgtctgaagaatcatttctctctgatttagatcccagcattgtctcatcctacaagaaagctttgtcttctaagctattaagcaatcatagtaatactagaaaccctcatagacccacaaagtctctctcttgtagcccatcatcaaatccatccatcttaataagcgaagaaccaaaatctgtatcctctagtcaattgatttcatcaccagccaaaccgagattaccaggaacagaagacaagattgtactctacttcacaaccctcagaggaattcgaaagacataccgagattgttgttgcgttagagcgatattgagaggagttcaagtgtccgtagccgaacgtgacatctctatggattccaaatacaggaaagagcttcaagcgtgcttggcg

SEQ ID NO: 5398 - DNA, 1617 bp, Arabidopsis thaliana landsberg
attgttagtgacctgtttaaccgtaatcacaacctttcaacgatataataactatgcactagaattcaacatacatagatagacacaaagctaattatcaccaacacatgaaaataaaaactcgaaaatcaacaattttataatctgctagacaacgcaaaacacaaaccccctctcaaacctaatagatcgatcaatcccatgaccaaaacgattctcttcgattcatacgtaccacgaatcttcgtcaaagactacaattatctttagaaaacaaagaagaagaaaaagaaaattaaaacttgacagaagagagattataaattaaaaacaacgaacgtatctaacttgttttttcttcgcgatttagaaagatggtctcggagttccccaataagcttcagctggcaattgaacagaattcataagattcggaggcaacccttgtataaacgacgtcggatcttgcatcaactgttgttgctgttgctgctgcgtctgagtttgcgtttgcgttccaccacccattgttgcgtttccatcgatattattagcaaccgctccagctgtttgctcttcttgatcgtcttcctccaacggcagtctctcatacgcagcgtttccaaacgaagctgccataatcactacaggtcctgaagccatgagtggaccaaccacgcttcctccaacaacctgtccctgaccaccggctaagtaaatcgttagacctgacgcagctggtggagccggaggaggaaggaatgatcccgagagagaaagaatctcgaaacgtccgtgtaagttaacgacagatgagccaccaccaggtactgaagctggttgtcttatggtaacgttggtaacggcgccgtttccgctcaaaacgcagatgccacgttggcgacggcgagcgaagacggtgacactttccatgacgtcacatccgtttgctacttccatgacatgagatttgagagcgtttgcgctgtctcgagtgatgatgattggcggttttggtttgttcttagatcccgctggtctgccacgtggccttctcgtgatgtgattatctcctcctcctccgccgccgctttctccaccggagccaggagtactttgatcttttccggctgaagagtgctcgttgggatcgatatcagcatctcggtcacgttttagcccaccgattcggtgctggtctatatcgtggccgtgattctgttgctgctgctgctgctgatgctggaattgatggtgtgggtgaagatggagatctcttgagagaaaaggtggaggaagagagcgagagacctgatccattacttgatataaaaagcaaacaaaaagtaaacaattgaaaccctaatttagttaatctctcctcttctcatccactcaactcacaaaaccagaatcttagcttgagggatgtacaataactcaattaaattaatctaaggagaaaaaaatctgaagtagagaaattaagagaagggtaatacaaaagtcatatacatgtaagacgaaactggagctgcactagtaatacatgtagatgaagcttgtaagaagaaggagagagagatgggtttaaggttaggtcagagaggaggaaga

SEQ ID NO: 5399 - DNA, 2344 bp, Arabidopsis thaliana landsberg
  unsure (1)..(2344): unsure at all n locations
gagacgattttcagatagtgtattggggtatgaatgtttcctatgaccccattattatacattattttaaatgatcaattacaaaggttggaaaaatgccgagggtgtcgatccaatatgcgagttcctctttgtttactctctaaaaagattaagtctaggggagagaaagaacaccgaaaaagaaaaaaatatataaagaatggtcgatttgtcatggtatagtacatgaatgagtttagaaggatcttgaatgttggcttgtttgatgagaccacagcgatgaaaacctggtggatatagttgtggaacttaggtatgaaatctagaatgttgcgtaagtttgtagagaagtacatgttggttaggatttgattagacttgttaggcatatggacttagtttggatgatcatggcaataggctaaagaatgttgggagttcctttgtttttaaaacctcttccatgggtttggcttttgtgttttgcttgagggcaagcagaagctaagtctaggagagttgatataaccctattttcactgattttatttatgtcttacgtataggattttgagtctttatgttatttctcgagtcgttttagtgtctttccaagtatattatgcaatgggacaacaatggagataaggagacattttggagcaagagctaaaggaaaggaagctaaggacgattttggtccaggaatcagcgaggagtgtcgaccgacacactcttggtgtcaaccgacacactcttggtgtcgatcgacaccagtttcggcccagcaaaaaccctagacgctttcaagtttacaaaagctcatgtttgccccagaagacttccctatttgcattattagtccatggacgtttataggatctatatatattgtttttacacctaagtttcttttatcaagtcttttatgaggttctttgcaaaccctattgtaagagacataaagctatgcatccattgttattcagagtgtcattcatatctatatacagtgaagagatcccttctttccccttctctatttactgtttttatgctttttatctcaaatatgttgtttgcttctaccaatatgtttgagtaatctgcttgttaggaataggatttctcattagggattcttatggtttagtagattgcctccttgctaggttatctgtagaattcttcatctttaattgtgcttaatgctagatctagattaattaactagatcttgaatcccaacaatagatatgcccgccataggtatctatagttagatctattatttgatgagttatgtttataagtgtgtaataagaatcggcctatttactaagatgaacaattgaactcgttgagaatgcatattaaggttgatagtttctcggcttctctggttattattagctatacatatagggagtttcgcggcacacccatcggttattctataattagagtttgagtttaagaatggtttgatgacaacctagctttcattagatctactaaccaatagtttcctgagaataccctgttcctagctctttattaaatcgtttacaacacaatcaatctgttgtctttttactttgttctcttttattttcactgataccctgctagcttaatctcgacatttaattcattgtttgaacaaaagaactccgtgaattcgatcctaaaatactgtaattgatctcttatttgagagagtagttctagataatttgaactatatcaaacttggcgccgttgccggaattcttgggaatcacattgagttttgtttagagatttcgtctagtttttacttctattttgttactcacgcgtttcttgttttcttcttttctgtgtttcatgtctatgccttggcaaaaaaggagcagaaaacagaaggagcttatcaacttgtctgttctggactttggaaaacttgaacgcacaaaccaaaaaactcagaaatttgcaatggctgacagagtcatcagagctgatgcagaaggagttttgagagatgtggatgggcaagcctacaatgaagttggtcagagattggatgatcatggacttatcctacatgagaacgccaatgaggatcaagcggcctcaatgcgcaattagcttcaagagatgcagcagggctcggtgttgggcgacaccaactgggtgtcgaacgacacaacagaggtgtcgatcgacaccaacaccagattccttcagctattcctccagctgcggaaccacgtcgtactcttggggatttcaacaggccagacctgttctatgctaatcgtttagcgattgtacccccanccattccagaggaacg

SEQ ID NO: 5400 - DNA, 2809 bp, Arabidopsis thaliana landsberg
  unsure (1)..(2809): unsure at all n locations
tttgttttgttgatgttggtttgtgatatttttctgattgaaatattactttcattttgtctctatgtttatatcatgtcaaaaataatctctcggctctctttgtattgttgtgcttacgtaaaatgattgaagacaagggtggttatgagtagttcctccagggtaaactataaacccagtaatgggttacatagactttcctgaaaagaagacttgatgggtatgtcgactgtgaaagcaccaacataatgatgcaatctctttctcaaagtaaatcacatgtttaacttatcaggttgatacatttatagacgactaatatccacgcactatccaagtcactaacaaatgctcatgccataatgatactgagcttgcaccttacagtcggaaagataaatatctggccgaacacatgtaaaagataattagataaattaaacactacttctgaaataataatgcaacacacaaatgaaattgtagccgacataaaaccaataatgaaggtccatgtcacaagatatcataaattgacaaaacttggaaagtaaagtgggaacatgggacggacgagaatcttgccggccgaaaatgggattatgccaattgttatagcccaaccttctccattatctctctatttgtttaaacactacttctgattaaacgtataaacgatttactactcattgttctgaaaacattactagattttaatttatgctaactcgactaaatatatattagattagatggaagtggatcttaagcaacacttgtctaccacatttgcacatactattattaccttacattctcacaaaaagaaaactatatttgttcctatgtatatgtatgttagtctaatttaaaaactctattagagtcttgttgtaacgaagcaattttctaaaacttataattagaaaaaaatcacatgaagactaagatttatgaaccattaaattataatctagtgataaagaaactagtcagcttgacaaagatatggataaatgcaactttgtatcaacagtgatatataaaataacttatcaaaaattggaaataaaaaacaaatatcatccaattttgggcaaaatattaatagtttttgtgcccatatggtgacatcgaaagggtatgtgaagttgtgaacacaaaactatataaaatagagagagtgaggataagattactagtggatggagatataagcaacaagacttcaaatttggctcctcttccaacctgtctttttctttgctacacaatatacatttttgtaaccccccatacacatttcaacataaaactatatagtcatccaattgaatgatttttattttcttttaaccaaggtatcattatcaaacactgtttcaaaaatcaaaaatagaatttggcaccaccaaacaaacattttttttgtaaaaatagacctctcaaaaatatcatagaattaaagaatactttttattttatttgtttgtccatcatcatcttcatcatcatcatttcgccgttaagtttctctctctctctgtttccacccattatagaattcagtgaatcaacaacaacaaggtaacacatctctctctctctctctctttctctctttttatatttttgtgtcccaatctcttcttcatttctgtttggttgccgagaaaacgcaggaaacttttctgcaaaaaaactcggtgaccatattcaaaactttcccacgttaattctctcttctttgttttgtttcagattcattacttttctccaaaaaactttcttcaagatctgttcttttaaataattatggcggaagaacatcgatgcgagacgcctgaaggtcaccgtctctgcgttaacaactgcggtttcttcggaagctcagcgacaatgaatctatgttcaaactgttacggcgatctctgtctcaaacaacaacaacaagcttccatgaaatcaaccgtcgaatcatctctctctccggtgattgcacctgttctcgaaaactacgcggcggagttagagatcccgacgacgaagaagacagaggagaaaaaaccgattcaaattccgacggagcaaccgtctccgctgcaacggccgaatcgatgcaccgtatgtaggaaacgggtcgggttaaccgggtttatgtgtcggtgcgggacgactntttgtgggagtcataggtatccggaggttcatggttgtacgtttgatttcaaatcgggcggacgtgaagagatcgcgaaagctaaatccgttgttattgcggcgaggctcagaaaatatgaatcggagccgttgaccgatttctatctttaccctgagaaaatttcgattgtctcggtggatctcaaccgttcattatgttattgtattacggacacgtgtcgcaagattaaggttgagatggtttcgtaactttttaattattttctttgtttatttccgaagaaattaaagtttttatgattgtgtggcttttgcttgtaaaaaaaaaaagggtttctctttgggaaaaagaaaagaaaatatatgaaattgtgtctcgcgttttggataatgttttataccgacagaaacagtacaaagacgttttgatcatttcaaaacgttagatcattgaagaaaatgaagctcatgtccttattgacgtttgtttgctgattttaattcttagatttgtgaggaaaatggaatataagttttaggtcagtataaaatagacttttatctgaatcagtttacctaatcatctctaaagcatttagctaaggttgttttttcttaatgc

SEQ ID NO: 5401 - DNA, 1531 bp, Arabidopsis thaliana landsberg
aagaaagatggttctgattgtggacctctaattgcagagcctgagctcatgacaacaattttaacttaagaggatgagttccttataattgggtgtgacggggtttgggatgtgttcatgagccagaatgctgtagattttgccagaaggagactacaggagcacaatgacccggtcatgtgtagtaaggagctggttgaggaagctttgaagaggaagagtgctgataatgtgacggcagtggttgtgtgtcttcagccacagccaccaccgaacttggtagcgccgaggttgagagttcacagaagcttctcggcggagggtttaaaagatttacagagctacttggatggcttgggaaactaattgggggacatgaggatggtgacgaatgattgatttctctgtttttgttttgtcttttcttacaattttatagtttggggtttggaggttttgttctgttaaattctcgcaatttgagtaagttataacatgaggcggcatacaataatttattgtttggtaggatatatttttttgtcacttttgcataataataattctgcttcagtctcatttgttttgtaactagaaagttattccaattcctgcgtttaccgaatatgttgtgttcttgcagaatgacgtatgttagatatgcagtaaactcgagggtcggctttgaccacatcgccacttatcggtttgcggatgctggaaaagtcagtctagtgatgaggctgagtgagccatcgtcagttactattttatcgtgaaactctgaacaacgagattgtcccggatattcaaatgaggaacaaggcccaatagtccgatcaaagtgggctattcgtatcgcttacgaggcctatacgatggtaattgaattcacgcgcattcatcagcgcgtgatttggagttgctcaatttcagatcgcacaggctctgttaatcatctcctcctccgaaagacagagaaagagacaaatcaaattcattcatatcaaagagatagagagaaaatgtccggtgtggctattcatgcgagttcatggggcgcggctctggtgagaatctctccgtacactttctccgccatcggaatcgccatctccatcggcgtctccgttcttggtgctgcctggtataaatccttttcttcttctccccattgatttgcgaaatcatcatgcttacgaaaactattttgctctctctctttatggtttaggggaatttacattaccggaagtagtttgatcggtgccgccattgaagctcctcgaatcacttccaagaatctcatcaggttttgccttcgattcaacttcaatttcacgaaatttttgtcaatttgtgtgaaccaatgcgtatgccattagattgtagtttaggagattgaagaaagaaaggttgatctagagatttgtcacagtggctctgatttagatgctagaactatgtgaatgaacaagtgtttgttcattgtttttcagtgtaatcttctgtgaagccgtggctatatacg

SEQ ID NO: 5402 - DNA, 1622 bp, Arabidopsis thaliana landsberg
catcggacaatgcacatactgcttcaaggattgctacacataacctgcaagagaaatgtggacctcggttgtatatctgacaatggaatccaaaaaccaaaagtgtgaggaaggagaaaagggtagatacagacccgcatacaaggttggcgaatccaactataattccagatgcaaagattgcatatccagctctaagagactcagcatcatacatctttgaagatgggacactctccaactttgtttgcagtatgattgcaacaataactccatatatagcaacagcttcgcaaaagatgacactgggacagtttaaaagaacaagaaatgcttcgtcattgtatactttttgcatctaatcttgagcctaaagctctgttaagtgttaacaaagtagaaaatgtagaatgcaaacacaactgtttcctacttaagcattcctaagtactagtgcctttacagccaaatgctctactcaatatggttaagaaatggtgtgtggtaatgacactgttgacactgatgttgcagagcatctaactccaagcctgtagctctgtaacaacaaatcaaattgcatacacagctactccctgttaagcattccttaaatctaccccgtagacccatgggatataatagcaatgactgtgttgagtgtttacttaagtgactccggcccaagaatgaaggagcggaataggaaggcaccacaaataacgtaaacacaaagtttaaatctatatcccctaatttgacatttagctatctcgatggtatatatatgtttctgctgaaatacgtggaaagacaaaagacacttcattatcattacatccagtgcttgaatccgcaaagccagagccttcacgatccaaagttactagccctaccaaccagatgagtccttgagaattctaaatttctacctcctgaatcccaggtcaacaacttgtatcattatgtgacaatctaatcttgcagagatgtggcattgaaatatccaaatgaatcaagctactcagcgatgaattctcattgctattcagaacaagacatggaatctacacagttccttaaaatggccactaattgatcaaccaaaggaacaaaactagaattaaaaaagcttgaaacttttaacgaacctgatgagattcttcgaagtaatacgaggagcttctatagccgcaccgatcaaactacttcccgtaatgtaaattcccctgaataagacaaaccaaaaaaagatgatgaaaaaggtcaatgctttaatctgcggggacgaagaagaataagattcgatttaccaggcggcaccgaggactgagacaccgatcgagatggcgattccgattgcggagaaagtatacggcgagatccttaccagcgctgcgccccacgagctcgcatgaccaagagcaaccacaccagacatcctctctctctctctctctctttttctctctttctctgatattccgatggtcggctcgtgatgataccatctgcttctctctctctgtcggagaagagaaattatcagggcctgtgatctgaagatattaaggaattgccaatcccccgctgctgaatgcgcgtgagtactttgtggaaac

SEQ ID NO: 5403 - DNA, 1813 bp, Arabidopsis thaliana landsberg
gggaagaacgtacaccttcttctcgtactttccgcttgctttctcgttccagagctcgagctgggcaatcacctggttggtgaaagagcaagacatcacgaaacttgggtgaccagtggcacaacccaagttcatcagacgaccctcagccaagacaatgattccagccttggtctctgggaacacccacctgtcagtctgtggcttgatggtgatacgcttcacaccagggtaagtctcaagtccaagcatgtcaatctcattgtcaaagtgaccaatgttgcacacaatagcgttgttcttcatcttcctcatgtggtcgaccatgatgatgtctttgttaccggtggtggtgacaaagatatcagcttctgagacaacatcctcaagggtaagaacctgaagtccttccatcaaagcttgaagggcacagatgggatcaatctcagtcacaatgactctagcaccagcagtcttcatggcagcagcacaaccctttccaacatcaccatatccacagataacagcaacttttccagcgatcatgacatcagtggccctcatgagaccatcagggagtgagtgacggcagccatacaagttgtcgaactgtaaatcaagagcaaatgaatttatcagtaacagcacataagtgtaaacaaaacgttgaatataaaatcaaagaaagcatgagaaatattgacttttcatgcaaattctgtaaccaaggaaggacttttctctactagatcgtaatactttcaacaaccaacaatgaaaagcttgctaatactaagtgattatgttgttgttaagcctatcgcatcaaaaactacagagctaaagacctagcagatttatcatcactagtaaagaaacaaatctgaagatcaataccttgctcttggtgacagagtcgttaacgttaatggcagggaacaaaagagttccattttgctgcatctggtaaagcctcttaacaccagtggtagtttcctcagagacaccaacaagtctctccttcatcttgtggtacttcttaggatcaacttgaagaccttccttgataatagacaacacgatctgaaactcagggttatcagtagaagtaggatcaggaacttgaccagtcttctcaaagatctcctcagctttaacaccctcatgaatcaaaagagtagcgtcaccaccatcatcaacaatcagatcaggaccaccacctggaccccaatctagagcacgctcggtacaccaccagtactcctgaagagtctcacctttccaggcgaaaacagcggcggagtcacgagcgatggctgcggcggcgtggtcttgagtggagaagatgttgcaggaacaccatctgacttcagcaccgagagcagttagggtttcgatgagtacggcggtttggatggtcatgtgaagagatccggtgattctagcgcctttgaatggctgagaaggtccgaattcggtacgacaagccatgagtccaggcatctcaacttcggcgagctcgagttcgagacgaccgaaatcggcttgagacatgtctttgaccttgtattcacggccacttgaggtcttctcgacgagcaacgccatggttgagctagatctgagatttgaatccgaaaggaggcagagagagagagagagaagtgtgtgcgaggagaagagaaagggagtgacagagaatatatagatgaggtcaaaatgaaatgaacggttcagattgttttgagggtttggtggatctggtagaagttgtaatcccgtggatgacggaacacgctgcacgagcggtatg

SEQ ID NO: 5404 - DNA, 1984 bp, Arabidopsis thaliana landsberg
acttcacgggaaacatgcaaaagaaaggaaattcggttcgaggagtatacaattgaataattaggacaaggaaattcaaagccattgaaaaaatgttgggagaattcatggaagttgggaatgaccgcaggttagaattcgaggacgaattctattaaggatgggagaatgtagtgcccgcataagggcatcgggcacggccaaaggaccaaatgaaaaaattttgcccgaatgcaaagccaattgaccgcatgtgtccaaacggtgccaaaacattaaagggccagaacgggcaagaataggcacgaatgggcaaagatgcaaaaagttgggcatgcctcggcgaagtttgccccgccggccacagaaccgaaatgagtaggacacctcacttgcggtgccttgcggctcaagtcaccaaccttggagccgaagtcagctgagccttggagccgaagttgatagggcggtggagtgacacccgtcgccacgtgtcaccacgtcgtcgtccgagacacctgtcgcctgtgggcatggcagctggccggacatgtggcagcgggctgtgctgcatggctgaccttgggcgaattataaatagagctctcaccgcccagtttcatttttgaaggcaagagagagagactgaaaggctctccgattaaaaactcgaccgaaactaagaaaaacttgcccgaatcgataaaaccttgcccatggtcgaggaaacattgtctgagactagagaatcgttgcctgtggcaacaaaacctgaccgtgagtaagggatcgttgacagtgcttgagaagttttgcctgagacctagaaaactttccgacataccgaatctgtgagttgtggttgaattgtgtgtttgtttacatgttttctagagctagtctttagatcatatgcatgcttactcacttaggtttaactaatcagattttggttaagattgaacttgaaacttaaaatgatatgggcattttgacaacttgataacgttaaggaatgaaatgaactagtgtatggctaggttaagtgaatatggacttgatcgagtttacgtgatgatttgagattatattctctgccccatacccgttcatgaggtggtcgatggatatcataggaccattgcacaggtcaacccgagctgtacagtatctcttggtcctaactgattactttttgaagtggattgaagccgaaacagatgtaaacatcaaggattcggcggtaaaaaccttcattttgaagaatatcataggtaggcacgacgtcccatacgagatagttacggacaacggaccacaattcatctcacacgagttcgaagctttctgctcggattgaggggtcaaagttagttattccactccgcgatattcacaagggaatgatcaggctgaagccgcgaacaagacaattctaagcaatcctaagaaacgtctaagtcatttgaaaggaggatggtatgatgaacttcaatcggttttattggcatatcgcacaactcctaggcgcttgaccggagaaaccccgttctcattggtgtacggaatggaggcagttgttccagccgagctcaatgtgccaggacttcgtcgaacagaagctcctttaaacaaagaagaccgcgatcctagacgattcgctagataccatcaacgagaggcgagatcacgccttgatccgaattcaaaattttcaacaagcagcagcccgatattacaaatcaaaaatcaaaagcagacctttctttgtgtgtgattatgttttgaaatgtgtgttcgataacaaggaggaggaaggagcaggcaagcttggcattaattgggaaggtccctacattgttaccgaggtggtccggaatggtgtttataaattgaaagatttagaagacagaccagtccaatgtccttggaacgtggtgaacttaaaagaaattttatgtttaaaaacgacacgcatggtttg

SEQ ID NO: 5405 - DNA, 1613 bp, Arabidopsis thaliana landsberg
taaaacctggtcaaatcttaaccaaccaacttgagaagaacgagaggtctacaggagctactcggttggtacaaataccttcttcatattgttctattgtaccacattacctaatttctggttggttccgaagtatacggactcagccaacacaatgatccgtcctccaacatgtttgtccgtaacaaggaggatttgttttggtgtaatgccccaaacatgactgtagctcgagcgaaagccatcgggcacgcctacaatgggaaactatatgtcatgggaggttgcagggatgatgaatccgtgaattggggtgaggtttttgacccaaagactcaaacttgggaagctttacctgaccctggctctgagctccgtttttcttcaattagaaaaatagatgtgttccaagaaaagctttacgttagcagcaacgagaagatagactctgtttatgatccaaaagaaggtaaatggaatgttgcagaaaaaacacctgtgcaatgtatggtaaataatgtatggtgttattgtgataaacagagctgctgatggtatgacaaaaatagtaaaaaatggagagtggtaaaaggtttagatatgttgaccaagaatcttggttgtggaatgattgaaatagctaactatggtggaaaactcttaatcttatgggacaaggttggtctttctcaagacaaagatatttggtgtgcggtgattgcgcttgaaaaacgtgatggtgttgatgaagtttgggggaaaattgagtgggctagtatcgtgcttacggttcctagctcatacgttttcttgtatagtctactaaataggatttgattaaatctaatcatgttttttgatttgattctcaaaggcttttttcttctttattttttagtgtattgttgcttttatacttgtaatatttgcaacatcacgagaaatattgagtcggctaatattgtgctgacggttcctagctcatatgttttcctgaatagtttaccaaataggttttgataaaatttaactatgtttttctgttttgccaatgccttattttttgtttgaattctgtagtgtgtttatggttaaactaaattgttggcaacatcacatccaacttcaaaataacagttttatatcgaaatgtgacttagtggtaggatttgtatatgatgtgaatcagtaagtcagatgtttgatagctttcatattccaattcttcgtcttaattttgtcagtttctttagtcacacaaaaccacataagtttttagttaccagttaatattggagagagactacaaaagataaatgctattgtgtgagttttgaaatctgaagttaaacataccttttttttgtccgttatagcattctctaaagaatagctcttttctgtatttggtatttaaaaagattttgtaccaatttctaataacatatgtatgatgtaaccttgagaaaaagaaaatgatgtaaaatgtgattactagaaaggcctataagatatgagagtttctattcataacaatgtatatcagatatgaacttatggagtgcaaagaccatctgttcttcgaatgtggctacgccaaagagatttggaca

SEQ ID NO: 5406 - DNA, 567 bp, Arabidopsis thaliana landsberg
aatgccatctttacaaggcacgacagagttgaatagccttgagatcagttcgtgtctactcttaagctgcaaagtcggcaaaagcccatggcaatacctacgcccactggcatagaacttaaacacattcgtcgcttctttcagcaacaaaggagagtcttctccttcaccaactccaagcaaactgaagttcttctcaaaaatcgtatctttaagaccaaatttggaagcccaagccaaagcgaggttctcattttcacgtttaccagtgaagtaattgatagcgtaaccaatcaatatagagacgcaaacgatctccacagtgtacgattgcatcttcttcggaatgtcagtatctggagtttctgaagcagactcaagatccggcgtctgtggatcggcaggagaggaggcgtcatcggaaaaaaccggagactccgtagatttctcatcctgcggcaatccttcgaactcatcttcatcccagtaatcgaaggagatggaggacgatagttcacggtctgagtggaggatcagattagatgcggagtagatcagatcggagat

SEQ ID NO: 5407 - DNA, 1850 bp, Arabidopsis thaliana landsberg
tttcctacaaaatctcggaacgccctcgctgttggggtcgattccacccaggtaagcgagccaaccatgttttaacgcctcgggagacgtcgaagagtatcccgaactggccacaaaacacctcggagatcgtatcaagaatccataccgaggcgatatcgagaacgcttcggagcattctcgtgaaatgatcccccgacccgacctcggaacgcctcggacataaaacctggcaattcatcccgaggcgggctccaagacgcctcgggaacgcatcctcgaatatcacggtccgagctgcccgagcacgacccaaggtcagctaaattccggcttggaaaaacttcgggttagatgagaaaaccttcaaaaaggacttagccgatataagatcaaacatatcatttccgaaaaccccggaagagataatcttcaaagatatcaccgaatacagaaattcacagaatctttggaagataaggacaatctccttcaccaacttaaagataaagagaaatcttccgagaatatcgcgaggggcgatattccaaagctctataaaaagcacctcgaaggacaaacaaaggggacacgcacaaaaacgctctcaacttcaggttatcaaaaacgctctgactttgaaggcaaaaacacttattttcatattctagaacacttgtacgatcaaatcattactttctcattaatacaatcaagaacaccgtccgcggtaattgaaaattctgttgttctttgagaatctcacaaagatctgttctttgaagaaaccctaaatacaatttctattgtgtgagttttgactctcacaatttggcgctagaaggagggggagagatttctcttactccaagaacacagaaccgaccaatcaagtaacgatgaccaacaaccagatcccccttaccaccgttgacgtggagggaaaccctgttcctccaatccaggtaaacgctcctgaagtcaacgctcccgcagtcctagcaaagctgaggagcatgatggcacaactccagaagaaggtgaacgatcaggagcaagcaaaccgatccttggcccaacagctcgaagtggctacttctcaagggcaggtcaggaccacccgctttggcgcacaacactttcctgatcggtgagcagcggcagatctcaatccaacgagactcgtgttcaacacacaccggtaacacgacgaggccatttcggcggactgcgccagcactcggcggactgcgccagcactcggtggaacccgagcaaaacatgacgaaccgagtagaggaagccgacccgcaggtcccgattccccgagccgaatctgacgaggctgaccagatcaaagtctctaacggccaaaagattcggaggaaaacattagatgggctgaggagtaagctagggagtaggaaataaatgccatcaagctcttcctagccaatgcagatgccgagatgaagctcgtacgatcacagatgcatagcgctgtctcctcagtcccaaacatcgatcgcattctagaagtatctcacaacacgcctttcactcacaagatctctaacgcgataattttagacccggggaaactgagaatcgagtacttcaacgggtcatccgacccgaagggccatttgaaatctttcataatttctgtggcccgagccaagttcaaaccggaggagagaaatgctggtctctatcatctgttcgtcgagcacttgaaaggaccagccctagattggttctcaagactcgaagggaattctgtcgacagttttctggagctatcgacgctcttcctcaagcaatactcggtcgctgtctcaacagccgaa

SEQ ID NO: 5408 - DNA, 988 bp, Arabidopsis thaliana landsberg
acatcggagcccagaagatctgaattctctctagccctcgtcctcttcgtcaccgaacctccgcttcctccgtcagaagatgaagaactcatcaccggaggaacttgcgccgccgcagaccacggcacaacttgattctccgcttcctcatcatcaccatcctcatcatcatcctcatcctcatcgtcgctgtactcttcatcctcatcttcttcctcatcatcatcgtaagactccgcgtcgtcaccgtcaccgtgatcttctctaatccgatcttcttcggactcgaaactattaacctcctcctgaccacgattctccgataaaactctgtttccacggccaccgccggcgtttttaagagcgacgcatgactcgcagacggagaaagttgggccaagacgaagcccagtagctttccacggcgtaagagactgacaagcgctacagagaagacaacgcgtgtgtttagctaccaagaaattagcgccgtgaactttaccgtcgcaatcccaacataaactagcttgatctgactcgcaatacattcttgcaacaccgttacataaatcacacttcttccccattttaatcaaaatcaaactctttctctctttcaagtttctgtggttgttcgttttgtgtctatgctttggttccttggagagataaggaaagaagaagaagaagaataggaaagtgcaagttgcaggatttgggatatttttcgtggcgagttttctgtgattcaacaattctttggaggctagtttcgtctttttctgccttctgctaaaaaatctatttctcttctttggtttcacaatgactctattttatatagcaccttcctttttttttattctgtggttagtatccatttcatttcaatttaactttgtaataacgtatagtatttaatcaattaaggattggttcaacttaaaaatctttttgctttagagatgggtttatcactttaaccttt

SEQ ID NO: 5409 - DNA, 4860 bp, Arabidopsis thaliana landsberg
tgccaaggacgttgctggaaactctgtaatctctgcacatttatacttttttctcggaattataaacgggattgacccagatatatgggatccatataacgataactttattcccgtaagcttcatcacatcctctcctttcctgtctttagatttctttctacatcttgtgatgtttgaacactttgtgtgtttcttaggtaccttatacttcagagaacgttgtagaaggcaaaagagcagccaaggaagaattgcaaaacaggcttggactaaagagtgccgattttccagtagtaggaattattacgcgcttaacacaccagaagggaatacatttgatcaagcacgctatttggcgtaccttggaacggaatggacaggtcctttcgagccttatcgacctttgaaaagtcctgtcatgaacttttcacaatccttaccggttttcttgaaagcaggttgtcttattaggttcagctccagatcctcggatccaaaatgattttgtaaacttggcaaaccaattacattcttctcatggtgaccgggctcggcttgttctaacctacgatgaacctctttcccatttggtagaaagacaataacaaacctttagttgtagttcgttcctttatttgctgtcggtattactcttttaagtctttttgtgttttactctccagatttatgctggggctgactttattcttgtaccgtcgatatttgagccatgtggactgacacagctcatagccatgagatacggcgctgttcctgttgttagaaaaactggaggtaactgtttttggctatggttagaatcttaagctttacccatttcactcaagaccaagctgactttacggtaatggtttatctttgtccaacaggactctttgatacggtttttgatgttgaccacgataaagaaagggcacaagctcaagttctagaacctaatggtttcagcttcgacggagctgatgctcctggtgttgattatgctctcaataggtaaaccaaccaaaatctaaactaagactctcttttgattcgagcattatgaaccgatgtttcttgtttccttttgttcccagggcgatatcggcgtggtacgatggtagagagtggtttaactcgctgtgcaagacggtgatggagcaagactggtcatggaaccgtcctgcacttgagtatcttgagctctatcactctgcacgcaagtaagaccaaataaaatggaagctctaagatgaattctctttgtatgtacagaaattagcttatgagacaacttagagagtttgatcctttcttcttcttttacattcccaaagcaatataaaaaacgtgataggtctatggattctgcttttgtaattctgaataaatcaaaagttaagcaaagtttatacacacactgttagtacttttctcacattgttccagtttctaactaaattagtactttttcacaattccaaatctgacccggaaacagaacagtacgtaactcttttctccggtactagatctgcagctgcagttatcattacattagtagcaaaaatcatcagtttaaaatattttagtaacttcaaaatctataatctgaaacgtcattattgtatatgccaaaacgttaccaaacttgtaagttatataaaaagtgattcaattagtgggtttgttctctcttcatgcggagagagagtgggagaaagagagtgtgcagaaaagtactgtaaatagacccacaaaaaaagcttgaatcttttgacttccaaattaacaaatctttgattttgcattgaccattctctgctttttttggatttgagtcctgaaaccaaatccaaatgtcattcaagaacagaggagattacaattttactccaagaaatgtagtttctagaaactctgtatttttcatgtgcctcgcaagtttctgccttggaatgttcttcactaacaggtaaatctattacatgagccccatttttattatgttcgacgatttcttattaaagtttggatatctcactgttcgtgtttgattctagcttctttttctttctggatttttaagtattttgttgtttctaatttcatcttcttgggactgaatctatcttgtgtttctcaaaatttaagtagatttcttaagctttgagttttgtcggcgaaggcatgtttttgttttttatcaagactactggtctatttgtgtccttgtagctttagtgaggaggaatcaagagacacacacaaaaaaaactatatcttatactgcttatcagatagatttgatcaaatagtggaacattgtaacttttgtagtatttgatcaatctctttgcttaatgtatcgtcggaagaggaacaattgaataatttgaatggcacattgtccacaaagtatgaaaataacatagagattacttctttttgtttcaaaaatctgtatcactgagatagatagtgacttgatctgaattttggttcggatttgtgtttgttttgatctcatgggataatgatcatcattatatcaggatgtggaatatagtacctgaagctagaggcatatcaagactctccaaactaagcttaagttccagtgattgcgataaaaagaatgtaagatttctacgtttttgcatcatcaattcacttggaaattcgatgatacattgtttgaacttgtgtttctttgcaggttttggactatggtaacaacactatcgggtaaaaccatttagaaatttgactagatgtatctatgaacaattactatgtatgtttagttgatgatgatgttgtagaactcaaaacaaattgcaggatcttagataaatccatttcaaatttagagatgaaactagtagctgctagagctgaacgtgagtcattgtccgggaaatttaacatatccaatgaagctaagaaaagaaaatacttcatggttatcggtattaacacggcctttagtagtcgtaagagacgtgactctgtccggtcaacatggatgccacaaggtaagtctgtttctacttttcttgatttctagtttaaattagtcagaaattgtaacttttacggtttttaaactatcattcaggagagaatcttaagaaacttgaagaagagaaaggcatcattgttcgctttgttataggacataggtacaaaggagaagtcatgttctgtagtgagaaactaagcatttataactatactttactttgtgtataccgacatttttatgttcttggaatgttctgatttcagtgtgttgtcccacgggattcttgataaagctattgaagcagaagagaaaacacatggtgatttcttgagactggtaaaactctgagcaattctcacaaaattttctgtgtttggtattttcgtgctacatttattcaaagctttagaaaacaaaacaggaacatacggagggatacatgaagttatctgccaagacaaagacgtttttcgctaccgctgtttccttgtgggatgcagaattctacatcaaagttgacgatgacgttcatgtgaatcttggtaagaaaatcaaaatgtttcatttatgtcttatatatcatccatccattttgttttgatgccttgatccgattttttgcagcctccctcaagaaggctttatccgcacaccaaaacaagcctcgggtttatgttggttgcatgaagtctggtcccgtcctagccagaaagtaagtaaaaaccctactaaggtgagcattttttaggtacttaaacagcgtaagagcatcaacctttccggactttctatacttctggcaaaaaaaaaaacaggagtgtgaagtaccatgagccagagtattggaagtttggagaagtcgggaacaagtatttccgccacgccactggacagttttatgctatatctaaagatctagctacttacatactgataaaccagtaagtttttttcctaacttggttttagccagcggtttaatgcagccagaatgcttgggaaaaacctctaacgatctctatttattttgttgaaataagggatttactgcataagtatgcgaatgaagatgtttcgttgggatcttggttcatcggattgaatgtagaacatgttgatgaaaaaagactttgttgcagtacttctcaaggtaaagagcttaacaatcctggtttggtttaatccatagatgttaccggttttactctaagttgattttagtattttacaacagaaaagcttttatactggtatgaaatatatcaaggttttagaaatttctctaagaaaatcatattctaaagcattattgtttctttacagattgtgaactaaaagcaatgatgggacatgtttgcgcggcgtcgttcgactggaaatgcagcggaatctgtcggtcggctgagaggatggccgacgttcacgaacgttgtggtgaacctcaaaatgcattatggacgtcaaattcctgaaaatatttatagaaaacaaaatttatatcttactactactacaatgctataacttgctaataatttagaatgattaaaaaaaaaaaagagagcgaaaagatttcaaaacaattctgtttttttttttgtttttttttgggtggggttatatagttagtagggtttttggtcagaaaatgaataaatgtatgcaaaaaatagttagtgaagtggtttaatgagagacaagaaataatgttttggtcacatttggtttgtcctatgacagacagagagtccttattgttgtgcctttttattaaatttccacatgtcctttttgcttctcattgcactcctttgtgtgttttttcttac

SEQ ID NO: 5410 - DNA, 6211 bp, Arabidopsis thaliana landsberg
gaaactccttactgctttaccattatcaggcgcttgaagactcgtcatgacttcaatcttagctctatcaacttctataccatgctcagaaatcctgtgtcctagaactattccatcatataccatgaagtaacatttctcccaattcaaaactagatgtttctcctcacatcttgctaacactttgcagagattctctaaacaatcctcaaatgatgatctataaactgaaaagtcatccatgaaaacctccatgatatcctcgatcatatttgtgaagatagacatcatacctctctaaaatattgcaggagcattacaaagaccgaagggcattctccgataagcaaatgtaccacaggggcaggtgaaagtcattttctcccggtcatctggatgaatcgggatctgaaagaatcatgagtatccatcaaggaagcaatagtacttatgatttgttaacctctccaacatctgatcgataaatggtaaggggaaatggtcttttcgggtagcagcattcatctttctgtaatcgatgcacatccgatgtcctgtgattgtccgagtaggaatcagctcgtctttctcatttttgactactgtaacacctcccttcttgggaactacatgaactcgactaacccaactactatctgaaatcgaatagataatccctgcttccaacagttttacaatctccttcttcaccacttttttcagattcgaattcagccttctttgatgttcaactgaagacttagactcatcctcaaggtggatcctatgcatgcatacatctggagatatacctgcaatgtcatcaagagaatagccaagagctttgcgatgattgcgcagcttgcttagcaataaggtgagctctgcgggattaagagaagcattcacaataacaggataagtagaattttcaccaagaaaagcgtacattagccctgttggatatggtttcaattcgattttaggagcctttgctggatcccaatctgaattagtagtcggcgttggagtcacagatggaagaacttcttcaaccgtaagttgcatcacatgttcgttctcatctagcagcttagtatatgtagaagtttcagtgtccaaatctgcactatcttctatggaagagaccaaaactcgctctagtgggtcttctcattccatctctgaaatactatctaaagctgatgaagtgaaagaatctatcaagaaggttttcccttctatgatcggtttcttgaccaaagtgttcatatcgaactgcatagtaagatcgctaacattcagccctatcctgccttatcgaacatctatgattgctccagctgtgtgcaagaaggatctccctaggattaatggatccttagcttccttctcataaggcaagactacaaagtgtgtaggaatcgtgctctttccaatcatcatgggaacatcaataagaattccatctggaatacgggtagaacgatctgccaagacaagagtaataaaggtaggctcaagattggaatacccaagacgcataacaactgaacgaggcatcagattcacactggaacccatatcacataaagctcttgggaaggaatcgtgattgatggtgaaactaagtacaaaagttccatgatcaagtagcttccttgggattcgttcctgaatgatgttgctaccctgctctgaaatcatcataacactgcattctttcatcaaattctcagtgaccattgtcttaacataccttttgattgtgggcgatagatgaatagcttcaactagaggcatctcaacaatcagcttatcaatcatagccttgcatttgacatcatctaaggcttgtcttgactttttaggactcttggggaagggaattcgccgatttgttgaaatttgcacattgtctgaacgagctgggtgtcgatcgacaggagctgggtgtcgatcaacacgatcgggaatagtttcctcctcctccacaaaattgtcgattccactcgacaaaggaaaaacagagtcgtcaagagtagtgttgattgacaccctggtgtatcgatcgacattgattcgttctctgcaattggaaaagttgaaggctaagctgatcgttcgcgttgaagtattgggttgagctgctttccgctgcgtagtgtgactgcattgatagaagctgatgtaggtgagagattggatatatgagagcgtagattgtcaatcttgctattgagatatgtggagagagaatcatatttgctatcaagctttgttaggcctgctagaagctgcgcaagcatagactctattcttgtctctgatgagggtggaagggaggcttggataggagcagaaattgctaaaacaggagtcgctttgctcgcggtggctaactcagcttaaattcttcgttctatgtctaattcctgcgtcgaaagacaagttaaagcattggtgatgaggagtaatgctgcactaatggttcttgtcatgaagttacaggagcttgctgtatcgagttgattccggtatggcttgtttattcctttgtagaataggttgatgagttggctctcttggaagccattttggggacattcacgctgataagacctaaaacggagccaagatgctctaagggactcagctggagcctgagtgaacgaagagatttgcaaacgaattgcctctgtcacggatgcattgaagaagtgattcatgaatgcattctttgtattagtccaattggttccagttaacgtaaccattatgttcctctgctcgcgagagagtggaggaagagtttgcaaagaaggtaatcaagtggtacaccttcggctttgatagaggaaactatgtcttcgaagacttccaaatgatcgaatggtgattcatcaggagctcctctaaattttcctctagatacaagatcataataagcagggtgtattgcaaagtcttctctttcaaatggaggtagcttgaatgctgatcggttggtgtagaagagatcagttctgttaaaattgcctattgtagccgtctggttctgcagagggtgtcgatcgacaccctgatggtgttggtcgacgcagccgtgaaagtctgccattcaaacgtgagtctcaatctgaaggaacctgaaacagaagagaccaatagacaaagaaacacgtgaataggtggtaggaaagtagtatttagacttaaaaggacacctagtctaatggtgaactaaaagagaacttcggcaacagcgccaaatttgatgtagctcaaattgccttaagcttaatccctcaaataagagatcatcgttagcacttaagggtcgaattccactgagctctcgatgttcacacaatagacttatgatgttattaaataagctaaatgaagttattgaatgtaaaagataaataagcaagtaaaagaagtgtagatttaagtgattaaagcgtcaggtctaaggaattatcttgggagatagataaattgtagatctagctaatataaggattgttatcgcaccgttctcgaactcaaactatgattctagagtaaccggtggtgttccgcaagactctctatacttagagctaagataaccggagaagccgagaaatcctatcctaaagcatgcattgttttcaagcttgattagttcacctagtatctaaaccagaacccttctatgagcctacctgttctctattaaatgcctaggctcatttatgatagttcaaacaacaagtacctatggtgggcatacctattatctaatatcaagttctagttagttactcttaaactagcattaagaacaatcaaagatgaagaattctaaatatattatcctaacagggtttccgatctactaattcatccaaatcccttatgtgaatccctaaacccaacaagagaacttctcaagcatgatcatagaagaacaaaacatgattgaataagaaatcaataatgaaattaagaagagaaaagagtttagaagaatcttctctaaagggagtctccacagggttttgctcccaagtataaaagatttaataagagttaggtctaaacaatgaccataaataagtcctaaaaacgtctgggccttctttggatatatgggagagttctgggccgaatttggaaatcttcaaaacatgaataagttgcgcaattgaattgctttcaggtattggtgtggctcgacatcaggggttgtgtccatcgatacctacgtcaatttctgtctctgaattttttctactgcttaagtggtctgtagcttaaggtgactttgttgctccagaatactccataatctccaaatgcatcccaaacatgtaaagacctgaaaagagtagaaaagactctaaaaaaaacaaaaggactttaaaaactataccttaatcatagctaaaagcagtgaatatcgaggtatatcaactcccccagacttagcttttgcttgccctcaagcaaaacacaaatgccgaacccgtgaaagaggtttgaaaacacagaaactcccaatctctctagcttattaccttgatcaaacaaacccaatccatgcactaaacagctcaagtcgaatcctgaccactatgtaattctctgctagcccacacaacatcctagattccataccaaagcactcaactatatccattaggctctcatcgctgggtctcatcaatcaatttaatgtttaagaacctactagactcattcctgtactataccataacaaatcaaccattcattttctttttatttctggtattctttctctcccccagagttattctttttagagagtaaacaaaggggaactcgcatattggatcgacaccctcggcatttttccaacctttgtaattgatcatttcaaataatgtataataatgggatcatagaaaaccttcctacccctatacactatctgaaaatcctgtcaatctctcattattatacatatttttttatcaagggagaggaatactttcttttatcacattagtcgatttatcaggtatgaacaaggagtcaagtcctatgaacactaaccgttttgatgaggtaaaaggaagagtaatgagattagctccagcctctgtggattatgttgggaatggatgtccttaagtttgttgattggctttctggattttccattagtcggattgatttgaatctgcagtacttaaaccatccatgcaataaactcgagagatagatcataatttcagacaaaagttttaactcaataaaacgactatctaagttagaatgacacaactgactcataagaaaagaaaagatgaagttagtaactgactcccccagacttagataacattgtccccagagtcattaagcaagaggaatcgaaagaaaaataatcaaaagttaaaagttagagaaacgtgagttgccacctgagagtggtgtcgatcgattataggttggtgtcgatcgacactcaggtcatttttgcatcgctttgcgaattcagttcatcgttgtagagctttggtttgtgttttcacatggatcctcgagttagactgttaaatcactaaaacacacatcaatagttccaacaaagcataggaaaataagtgcaacaagttccaatacaaataacaaatagtctgaaataaagcaaaaacaaaatcagaaaacaaagcaagatagggaggatggctagtcctcatgctctgagccggaggtgggtgcgggagagcgacgacggcgacgagtggaagcaacacaaccgtatcgagagagtgtagctatggcgttccagacgctcttgaagttgtcgacgatgtattgttgaaagacatatggctgcatcgggataggaggaggagaaggcagctcatatggccgagctaaagaagaagatccaactctcggaccccagtagggttaatgaactcattctcagtctgagtcagtgcggatcctgaacctgaacgtctttgtgtactggagcatggtgcggaatgcagacgagaaggatcatgatgaaaaccaatctcctcatgctctcctgtaatctctgtaagtgcagggcaaggtaactgaatcatatggtgtcgtgtctcatctctgaaacaccaaaggaagttgcctttcagcctgtgaaagttcttaagataactttcatccattgtgaatctcg

SEQ ID NO: 5411 - DNA, 879 bp, Arabidopsis thaliana landsberg
ggtcaatcttttggtgggcatcggatactctttctctcttgattaactaccatttatgggggtacacatacaaaactatgtattgtaatgttgctaagctatacacatatcatacttctgctttagatttagaacctgatattgtagctctttgtgacattctattgaacagttttcaaagatggaggaaaagaggaaaagaagaaagatctttctacaaagaaagtgaaatgctactttatacgcacggactcaacagctttttatgatatgcaaaatccctatattttaaccggaaagtcaatttatgaagctcgtatgcattttatgcacgtgcatcgagcaccaactttggcgaattatatggcaaggtactttataggaagtatatgaagatattctactgtatcatatttaaactcttctgtagatgtccttttttatcagagtcacctttcttttgctgatgcttcaggttttccttaattctgtcaaagactaaaacgcttgaagttgacatgactgggattacctttgatcaaattgatgatatacactgccatgtacgtccttaattcatgtttccttgaggaacttcgtctctaatgcctgtacttacttgcattcgctatgttctttgacctttttccatttcttccaattgcaggatcaagatgggaaagatgttcttgacaagaacaaaaaaccttgcatacattcagatggaactggctacatctctgaggacctggctcggatgtgtcccctaaatatatttaaagggaaatgtctcagaagtgaaagtattcaggtccttactctgactttgatggttgactaggccctttgttcactcgtatcatctttgttccttcttca

SEQ ID NO: 5412 - DNA, 825 bp, Arabidopsis thaliana landsberg
  unsure (1)..(825): unsure at all n locations
aagattatctgcattcacgtgatacttttaggatataatgtttattattgataatttgtttttacagggttattttctggagaacagtggaacacacctgcacaaggttttgggtgatgataatgttttaaccgttagattcgatcaattaccaaaggagtcaacatactgtgacaacccttactctaaatacaaagagattgctaagaatggtatcatggttggtttacgtcgttatcaattttttggtgggtcattttccttttctcttgattatcatttatgtttttgcaaaaacaacacttttccttgttaaggtgctaaggccatgtctagcagatattgtcatactttatcacatagtaccttgttaacttcttttaaacagtcttcaaagatggagggaaagcagagaaaaagaagagaaattctacaaagcaagtgaaatgctacttcatacgcacggtttctacagcatccagtgatatggagaatccttatatcctttccgggatgtcaattcatgaagctcgtatgcattttatgcatgtgcatacattgccttctcccgccaactatatggcaaggtactctagtttcttctaagtctctattggaggcatcttgaagatttcttactgtttcattttataactgtgttagagatgttttcctttgtaatcagggttacctcacttttgttgatgcttcaggttttctttaattctgtcaaagacaaaaaagcttgaagttgacatgactgagattaccgtcatgcaaatcgatgatatacactgccatgtacctctntaattcatgtgtcct

SEQ ID NO: 5413 - DNA, 1170 bp, Arabidopsis thaliana landsberg
gtctttgcttttgcgttctcaggagttactatagatgtgccagctcgaaaggttgttttgctagaaaacaagtcgaacgtagccgcactgatccaaatgttttagtaattactcacatctctgagcataaccatgccattccccactctacgcaatactcttgccggctccactcgttcctcttcctccaaatgctcagatgtaactacttctgcctcatcgacagtctcccaagacaaagaaggaccggataaatcccatttgccttcctcccctgcttctcctccttatgcggccatggtggttaaggaggaggacatggagcaatgggacaatatggagttcgatgttgacgttgaagaagatactttcatacccgaattatttccagaggataccttcgctgatatggacaagcttgaggaaaattctcagactatgtttctctctcgcagaagcagcggaggcaacatggaagcccaagggaagaactctagtgatgatagggaggtcaatttacctagtaaaattctgaatagatagttactattatgcaatgttaataataatctgtttgattttttaacatttgttcggacatccaaacctgtgggacacaatttattactttaaagataatatatcaaacagagagtgcaatggataatatcaaacagataaaaggaaaaaaaaaaaaaatctttgagatgagacttgttctctctggtgcctcttctttcacctccaaccttttttgttcctcccaacaggttctctatttctttctctctatgtaaacattttgttaagataatggtttcatacatgaacgtgagtttgtatctattgttcgaaaggtcaatggaagaggaaaagaactgaaaaacccactttctctaaaccacaacaaagatttggactttctgttaaagaagttagctccgccactcacggcggctttacttgctgtttcacccatctgtttccctccaggtaaacccttgtttcctccgaccaaaagcttctacctttagagtatttgcacttagattgagatattacagaacagctcttcacttaaggaattcgtatagtataagttaacagagcattttgtagacacttgtccacccattgcttgtgaaaatgaagaggattttgagacattct

SEQ ID NO: 5414 - DNA, 765 bp, Arabidopsis thaliana landsberg
  unsure (1)..(765): unsure at all n locations
ttttgttcgtttgttaaacagtcgctgaaaagagtcgctaaaaacagtcgctagaaagtgtcgctatgttgttcatttattggtcgccataaacagtcgctaaaaagagtagctgtaaacagtcgctagaaagtgtcgctatgttgttcgtttgttggtcgccagcgacagttaccgcaattttactatttcaaaattttaatgtgttctatataatgttttgatgaaaaatgtcaaattctgtaaatttaaactgatagaaaactaaattaagaaaatctataatcataatattattaaaacataggtattttagaaagaaaaaaaatcacacaataaaagattctaataaggtaatcgatatcctctactaagctcactcgtgatagtatcacgcaagccttccatggctctatcaccggtaggctcatatggaatgtgctcaccacgatcatcatcatcgtcattttcttcttcatcaccatgagtatgatattcttctgtcccttgccaatgcacaaaatcataatcttctcgatgtgaatcacgtatgaagttgtgcagtgccatcgtcgctgtcacaatcttcacccacttagttatcccatacttaggatgcttacggtctaaaattctccattttgctttccacactccaaatgtcctttcaatcactgatcgtagtcctgaatgttttctgttaaacaactctcgtgtgtttggttgaggtcctcctctgcanactgatcaagatgatatcgacac

SEQ ID NO: 5415 - DNA, 2064 bp, Arabidopsis thaliana landsberg
ggatcgtcactgtttgagatctgccactatgaattcaacatagattgatgatatatgttgcaaagatataatcagcgatctaccagaagctcttatttgccacatactgttcttcgtgcccacataagaagctgctttaacatcacttatctacgaaaaacggcgtgatctctttggttttgcaccaattcttgatttcgaagattcggtatggatgcaaagtccattggtttacatgaatgaggttcatagaaagttcatggatttcgtggatagagtattgtgtttgcagggtaattccactctagttaggttctcactcaactgtcgaaatggtattgatcgagaatgcatctttagatggatatcaaatgtgatagaacgtggagtatcggatcttgatttaggcggtaattttgtttcgaatcgttctatgccttcaagtgtctttgtgagcaagtcacttgttaagctgagaatacgaactgaaaattgtaccatcattgatttggaagatgtttttcttccaaagcttaagactctcgatcttagtagtatttggtttcgagacggtgatacttgccttctcaagctcatttctggatgtcaagtccttgaggatttaactatgagtgatctatggtgggatggttattggaaccgctctatgtcttccaaaaccctcaagagactaacggtacattgttcagactgggatagaagtccgggtagtatttcatttgacacgccaaatcttgtctactttgaatactttgatctcgttgcggacaagtatgaagtagtgaatttcgactcacttgttgaagctagtatcggtcttcgaatgagacatcatcagcgtgcacatgcaagctatggagatttggtcgtaaatgcaaccaatctttttatggggataagcaatgttcggatccttcaattgttttccaacgctcttgaggtttgttttcgctacttagaaattaaaaacaagacaaacaaccgaataatttgaattagtgtttggtttatgttttcaggtgcttactttctgttggcctctcttcttcactttgtcttactccttcggcttttcaatatgcatttttttacctttttgtgttgcatacacttgatgttttctcaagggttccaagtttttcaataacatagcttttgttttagttcttggttcaaaattatttactttggtctctgttatgtaatatgtgtcttcctctttctgcttctcaatatgcaattttcgcttttctttgtgttgtatacacttcatgttctctcaaggccttccaagttgttaatttgctccacggtgagcaacttgttaagatatgctatatatttgcgtgcaagtactaaatataaaaattaaggaggaaatcgaactcttttctgtataaattcgatcgatttagatattttttttggtaaattttgggttcttgtataaaaccgaaattaactaaagaggttttataaaacgaaaccctaatgttcgatcacttataaatcactcgtcccgccacatttgcatctcactctagggcacaagccaaaaccctaatgttctctttcacttccctctcgcaatcgagttctcaatattcgtctgatttttatgctcccaagtgagtttcttctatttcttctttcgatcttatgctcctctgatgtcgaaagtttttttttttgtttttttgtctacaggaatttgcttttgtgtatttctgtttgattcttagatttttttttaataatttttttgatcctttagttgtgatcactttaatcttcttatatcattggatcaaatcacttacacgatcatcatgtgaatttttaggttgtaagtaactgttgagatctgtcactatgaattcgaaaaagttgaatattggtcccaaagatataatcaacagtctaccagaagctcttatttaccacatattgtcgttcctttcaactaaagaagctgctataacatcacttctctcgagaaaatggcggtatttctttgctttcgtacccaatcttgattttatg

SEQ ID NO: 5416 - DNA, 1319 bp, Arabidopsis thaliana landsberg
agcaatcccgtttacacaaactgcagactatggttccatatgtattcgaaacaaggcctgtgcataatcctgacttcattagagaccatcgagcaagatgaagaaaacgaatcaggtgtacaaatgcagtcttgatgcttcgttgtcctgacaattctgtaggtgtaagatccagattctcggatttggaacttgagttcaagagcattgcctctttacaaatcaattcttcatgaggaagcaacggtactcggttaagatgagcataccggcaactggcaatagctccaaatggaaaccaatcacccatcgcaaagttcactgcctcaccacaattaaaacctacaatttttcacacaaccacaatttcagttgaagatgataccacatctctgaccaacaaaaaaaagtagattcagacaattttgttttaccgtggctgaaaccagcatgataagccctggggaatgtgacaacaaattctccaggtttttgcacagctttatacactggcacattatgatccaacagagtctttggggggaatatagttgtcttccccagaagcacgtcaaaggcaccatcttctccattagttgatagaatatcatcattgtacacacactctttaaccaccttttcaaattttagagctgcggaacctggaatcccataccaagtttttgatgctccacaatgttggtaattaatgctgtgttgggaaagaaggtcagaaaaaaaggagattaaaattctttggattgccacatttagtaacccatatacttttaaccaaaattcgttaaactcttgttacctgtacaaataatggtcctcaacatgccaggcaaacatactgaaaagcattccgatgtaaagcatgggttcagtgactccctgaaacaagcaaatccaagttagaagagaattagcagaaacctctaaagtgatcttgtgactaaatataactgtactacttctcacataccggaatggatgtttcaagaaggcgcagggtagacttaggaagccttgaaactttctgaaagtagagatataaaaagccatataactaccaaatgtaaataacgatgcatatgcaagcatatgatatctttaatgcttaaccaaaaaagaatagaaaagggagaagcttaagttgtagtaaatcaatacattcaagttccatttgctgcttcctagtgggtcacctggtgcagatgaaaatgcgctaccatctacatcacacgcatactcaactgtttcagtcttgccacacgcaatttccttccagaattctttctccaagaatgagtcgg

SEQ ID NO: 5417 - DNA, 1745 bp, Arabidopsis thaliana landsberg
tcctaaatgtaatgcaactacatgaacactctttttttgttaaatcattttctgaaatttttaatttttttttggtttttctatgccttagatgaatgcagacttaaaaatatatacaatgcaacatacttcctgagccctcccccaaacttaaatcacacagtccactgtgtgaataaacttggaagagagtactcaggacaaatccaatcactgaaacaaaataaagaacaaatcacaagagatgatataatataatggtgaagtgaggcgcttacctcagtcgaataatgaacgaagttggtagtcaatggctgcctgtgattgctcccaggccatagacgaaccgccatgttccgtatcagctccagcatgtgggtactcgatctcatcagctctgtggcggccagcaccgctctgaggatactcgacctctcttcttctgttgcggccagcaccgcggtcgcgtaaactacgagactgcagaagtcgtctgctcctgctgctagatcgagtgagtgtcgttctcctattcctcctagattcacgaggctcgaatgatgaatgcctcgcagggacatgcagaatcttctgctctctaggctcaggcctgcgccaacttggctcgggcgcgtcatatctcctcgaaggcatgtcctgagggagctgtcattgcggaatagttgtagtggaagaggagcagctgatcttgtccttcagaaacttgatagccctgaggcacttggcgagtaacttatcctgtttcttgcaccacttctgcagcttgctgttgttcctgtgagcttcgctcaaactcttgcttttcctcgctggaggtatatgctcactgaaatgatacatgctcgtgtcaaactccgcctcatctatatcatatgtctcatcaacatcttctattgtagctccttcggtgtgactaatctcctcagttggcggactgccctcgaaataaagatcttcaagcgcaggcttgaagtcaatgttcctaccctcgagaatcctagtagcgtaaatgcaggggaaaagaatgttggcgattctaatcgatgaatgctcgaacctgtagcggtgaaagtcgccaaccatgtcaaactcagagaactcacatcggcgcaagtgatccaagtccatcattctcggtgctaaccctacttccttgagcggaactccacaaactttcagaattggcgtcacaacgccacccacgcatagtgctcctcttaccttcttcttgccgtttgtcagcgcccacttcatgtacccacacagatggatcaacagaggcattactggtggtgagtcgttaagatctcctctcaggacattctttccttttgtacggcggagaatccctataagcgctgaatctatcatcttcatgtctgtgttagacacggtgcctgtagactccctggagtaaagaacattggcaaccgagcgctgaaagtagcgaatcacaggactccggatttggttgcttttggaccgtacagagtttagcggcacattgttcccaatagtagcccacaaatccttaagctcttccatgtcaaacttaggcttggttccctttccactagggaagccaaacagtctttccaaactcttgatcgacaactgatagcgctgttgatcaaccgaaaacgtcaagaaccctaatcctataaactccaactcatactttgtgagaccctgatacatctccacttgcattgggcagaaaccga

SEQ ID NO: 5418 - DNA, 1123 bp, Arabidopsis thaliana landsberg
tattataactataaccattccgaaaccgcagagatgggaaagttgcacatttcattggagaattgccaccggagaaatcataaacagtgaccttccaagttacactaagcacgtaaagcttgttttctttaaacgccatatcgattatgcaacgttcattctctaaaggtttaaacactttccagctattattttcatctcctttcttgtgatatccaaaaagcctagaaatattccaaacaaccaaataatctcttcttttttcatctacccacaaaaccgcattgtctattttaatacaactaccatcagaaacattttcataaacccttttgaaaacatttccatcaccggttgattctagaggcggaagagggatcctcactcgagtaaacagattcaaaatatgaaagtcagttctatggtccaacataaggaaccaactaccggaactcgccaaacaacgactcctagctaaatcaaacccgagatctcttactatgtaggaactatggtcacgaggattgtacaacttacatgaatcgtttttgctttccacattttcgcttggaaagaggatgatccatggacttgttggattttttactgcgagacatgattccgaagctgaataccattctaaagaaatgcatctgcctcgatgaaaatcaacaaagcttaagcgctccaatatcgatctaagcaagtccaagataagtacaggctgctttgaatcgtcgttgcattttttttcctcggaatcgctcatctccttcttttgtttcttctgtatcacggccaagtcaaaaaccctagttagataaggacgcttccctaattaattaattataaaatatttttactttattgacattaattttaattttaattttatttttaagtaattttatttttttattttactaaaaacatctctaacatacatccctaatcataagtgatatatagctgagaatttatttttattttaactgaatttttttttctatacattagataatgcatgaaacttatagatataaatttagaattaattattttgaaattggattgtgacactgacttactgtcacacatttagtgcatatatgagctatgatgc

SEQ ID NO: 5419 - DNA, 514 bp, Arabidopsis thaliana landsberg
  unsure (1)..(514): unsure at all n locations
acaaaacctacataatcagagatttagggtttgatatgtctacgagtcgttgtttagcgagttccggtagttggttccttatgttcgaccatagagctgattttcatcttttgaatctttttactcgagagaggattcttcttccgtctctcgaatcaatcgatggagaacggtatatgcgattcaagagacccattagcggtagccatatagaaatagacaaagcggttctgtgggtagatgacaaacgcagagattactttgtgctttgtaatctttctagttatgtagcatatcatcacaagagaggagatgacaacaatagctggaaagatcttcaaccaataaagcatcaaggctgtgttgatatggagtttaaagaaagcaagctntacatgattagtgcacatcaatgtctcactgtctttgatttctgcggtgggagttctccagcagaaatggaatgtgcatgcttcggatcgtctgtgtgtgtaaatagatttcatatgaagta

SEQ ID NO: 5420 - DNA, 946 bp, Arabidopsis thaliana landsberg
  unsure (1)..(946): unsure at all n locations
gcatatgtataagacatgatagatagctagtccaaacttgacatagtaagtaatttagatatatttacctctcatctttctctttataatcacccattctcataagttccatcggagatccatcgattgattcaagagtcggaagaatcctctctctagtaaacagattcaaaaggtgaaaatctaggttatggtctaacagaagaaaccatctaccggaactcgccaaacaacgactcgtagccatatcaatcccgagatctcttaatgtgtaccaactattgtcacgaggatcgaacaacttacatgatgaatcattgttgctgtttttcgaatatttgtatggaatcgtgatgatccatggagttgttgttatgcatgatttcgaagccgaataccattctgaagaaacgcatctggctctatgaaaatcagcaaagctcaagcgttgcaagatcgacataaccaggtctaacaaaagtgtcggctgctttgaatcgtcgttgcatgttttttcgtggaaaagaaataagtttctcggtttaaaccgggttattccggtttgaatatttgttttgttctgttttgaataattaattcgatggaaactaaaacaatgaagaagaggtaaaactctacaatggcgaaatgcagactagagtgtcatcacctttcatctctagagctctttcgtcgtcatctaacctcaatgagcttcgtcgaattcacgcccttgtgatctctcttggtcttgacagctccgacttcttctccggtaagcttatcgacaagtactctcactntcgtgaacccgcctcttccctctctgctttacgacgagtttctccggccaaaaatgtttacctctggaattcaatcatcagagctttttctaagaatggtttgttccctgaagccctcgagttttacgggaaactccgggaat

SEQ ID NO: 5421 - DNA, 3291 bp, Arabidopsis thaliana landsberg
  unsure (1)..(3291): unsure at all n locations
ccaaaaacatgcggcaaattggtactcctaaacaaacctatctaccaagtgatagcttagccattttacattgtaatttacacaagcaaaaaactttccatgagaaaaacaatctgaggattataactctttattattacctcatttatatatatgcatgtcaccatatcacatccaccttcgccggcaattctactccggaagctaagccgctagaagaagcaaccagcttcacgcccaacatgggattcgaaccgtacttctgttttgcttcagcaaagcttcgagcaagaactgtttgcatccactgatcaactattgttctcccttcttcttcgcccgatgataatgatgaccatgaagccgccagaatctgaaggatcacttctttatcaagttctagatgtgtttcggatccaaagcaccgctcaaaatgtgaaccaatcttctcttgaatgttcttggctaactcatcgaaatcaaccggtttgaacgtcacttttccatctactttttcaatgaattcatcgaaccaagcgtccctgtcctctgcctcatgatcaaggctaaattctgtttcattcactggaagattcagatccagatatgaacgttgcaccttcactgcacgttgcgctgtttctagctcatattttctcttatttaccccaaatttagtagcatctcctagctttatctgcagtttccagcttctcgcgctgagaacttgctcctcaggaaacttcacaggtttaataacatggtcagtggcattatccttggcaatcccagacgtcacaacaacaatcacatttttcatactaatcactcttccatgcaaatcacggattttccccgtactcacagcttcagacaatctcatctgatccgggaactcagctttttccacgttttcgagtaaaacaacagagtgtggtttcctagataactcaccggttacgtaatccaccactgttttgcctctgaatttgtcatcaagggaacaatgctctgccccaaaatctacacatatgtaattgactttaccaccaaagaagacttcagaaagagtcatcgccactttcttcttccccactttatcgggtccaagaagagccagccaaattccgcttgcttggtttcttcgcgtggagtcggttttgcatccgcagataatttggcttatggcatttacagcttcggtctgccaggcaactttacgagagagtatttctctgagagacttgaaatctttctgatatgtatgttctaaagaagagtttagagtcaccagcatcggtttctccctcgttgtttttgattcctggtttttggatgcatagattactcccaacccaaaatctgtagtaacacagctcaaaggcaaactcactgtgcggttagtcaccgatgccgtaagatcctccataggttttggctttgagattggcggattcagcagtttaggcgtctccaaatagcttgtaggagttctcacactcttctcagtctgaactgggaactgcggactcaccgactgaaaaccaagtttaagaaacgccggagtgtgatggatactttggcatatgttgtcccatttcttctgtagagcagcggtttgcgaggctgatgtattagcgtcatctaaagcctgcactgaatcagaagaacaagatactatatcaacaccattacaagcgactacaaatgaggaagaagttaataaaaacgcaccttactgctgcctgttattcccttgtcttctttggtctcaatagcccgtagccatggggctaacttctcggaacatttgtcagccagagaaagactcgaaccggccttgagaacagcggctacttcttgcaaatacttctcgttgcagaggtggcatctagagagcgtctgattcactgtgctactcaatggaactctgaaatttgatgttgatgagaagaaccctccaaagggaacaaaggatcccatcaagctgtaaccaacagattcatccaattacgaacttgatcagttgcaaagtcgaatcatagttttgagaaaagacagaacattaatgtctactctcagaaaaatgggaagcataaagctgagaaggaaagtggatatgtcaaaatatttaagttttatgttatcgacgttgacgcaagcaataaactattcccacaagtttactgattgttttgataggcataaataacacttataatgttaatggaaatagcaaaagcattacctcgatgtgggataaaccccttgagtcgaaggtttagtagaggctgtgattggaagaacatgaaggtcccaatccttctctatagtaggaaaccgatcaataagcttcgtgtaagtctcattactcgatacacatccgatgaacgaaagttgtttactttcatgtttcagcaaatccgaaagcttcgacaccaaaatctcaagagccgcattggcttcactggtcaaaaccttgagctctcccagattaagcactatccccgatttcgagccactttgctctacagttcttcctaggtcatccactttcattcgaatctcttcttcgtttttcgatccatcggctaaaatctcactaatctccttctcgatactaatcaagcttaatccgctaatatccatcggaagaaaccctaacttcccactgttgatcgaatccgtgaacgttttaagagcttcattagcacagttaccaataagcagagggttcttcttatctttcctgcctaatacttctccaatcctccgggaattttcatcgaaaccactgctcccactaaacgggaactcacgattcggatctgagttgggaagattacagaggaagagaggcggacaacgacctctagagaaacgggaagaaagttgtgttaccggagggtgaagcacatcgagcttaatttcggagctccgaaacccagcttctccgaatacccgatttacaatcggatcgtcaaggatcgagagtatgaaatacttcaattcgactttcaaaaccgtcgtctggcatcctcccccgccgttgttactagcgtggatctgctgaagatgatacgactccggatgccgtctctgattcgcctgagaccgtttgatcgccgccatgagcgaattcgaaaccggtggatcttcttccgtcgccggagnnnnnnnnnnnnnnnnnnnnnnnnnnnnnacaccgacgcagagctcaagagctcggaattgaagtcgcgacgagtaaggaacactcctagcggcgcgtgagacgcaaacttcacggag

SEQ ID NO: 5422 - DNA, 4441 bp, Arabidopsis thaliana landsberg
gaggatcccccatcaaagaggtattccatcccgaatggttagccaaccctgtacttgtgaaaaagaaaggtgggaaatggaggatgtgtgtagactacactggtctaaacaaagcatgtccgaaggttccctaccctctgcctcgcatcgatcaaatcgtggattccactgctgggtgcgaaaccctgtcattcctcgatgcctactcagggtatcaccaaatcaggatgaaagagtccgaccagctcgcgacctcttgcatcacaccctttggcatgtactactatattactatgccatttggtttgaggaatgcaggcgcaacataccaaaggtgcatgaaccacgtgttcggagagcacatcggccgaacggacgaggcttacatcgatgacatcgtagtcaagacgaggaaagcctccgacctcctctctgaccttgaaacgacattctagtgtctgaaagcgaagggcgtgaaactcaatcccgagaagtgtgtcttcggaatccccgaggcaggctcctggggttcatcgtctccgagcagggcatcgaagccaacccggagaagatcgcagccatcaccagcatggggcccatcaaggacttaaagggcgtacagagggtcatgggatgtctcgcggccctgagccgttcatctcacgcctcggcgaaagaggtctgcctctgtaccgcctcttaaggaaggccgagtgcttcgcttggacccctgaggccgaggaagctctcgggaacctgaaggcgctcctcacaaaggcacctagcttggtgcctccagctgacggagaagccctcttggtctacgtcgccgcgaccacccaggtggttagcgccgcgaattgtggtcgagaggcaagaagaggggcatgcattgcccgttcagaggccagtctacttcgtcagcgaggtactgtccgaaaccaagatccgctacccacaagttcagaagctgctgtatgctgtgatcctgacaaggcggaagttgcgacactacttcgagtctcatccggtaactgtggtgtcatcctatcccctgggggagatcatccagtgccgagaggcctcgggtaggattgcaaagtgggtagtggaaattatgggcgagacaatctcgttcgcccctcggaaggccatcaagtcccacgtcttggcggactttgtggctaaataggtcgatacccagctcccaacagctctgatccaaccggaactctggaccatgtttttcgacgggtcgctgatgaagacaggggcaggcgcgggcctgctcttcatctcgcccctcgggaagcacctacgctacgtgtacgcctccacttcccggcgtccaacaatgtggccgagtacgaggctctggtcaacgggttgcgcatcgccatcgagctaggggtccgacgcctcgacgctcgcggtgactcgcagctcgtcattgaccaagtcatgaagaactcccactgtccgcagacccgaagatggaggcctactgcgatgaggttcggcgcctggaagacaagttctacgggctcgagctcaaccacatcgcccggtgctacaacgagactgcggacgagctggctaaaatagcctcggggcgaacaacggttcccccgcacgtcttctcccgagacctgcatcaaccctccgtcaagatcggcgacacacccgagcccgaagcgccctcggcccagcccgaggcaccctcagcccagcccgaggcaccctcggctcgagcccgaggcaccctcagctcgagccgaggcatcctcggttcagcgcgaggtaccctcggcccccgagggtgaggcactgtgcgtcgaggaggagcagagcgggccacgcctgatcgagattggcaggccccgtacctgcaatatctccgtcgaggagagctaccccccgaccaagccgaggctcggcgggtcgcgacgcgccaagtcgttcgtcttgctgggcgatgaagaggagctctaccagtcgcagcccctcgggcatcctccagcgatgcatctccatcgccgaaggtcgggaactactgcaagaaatacactcgggggcttgcggccatcatgcggcaccccgagcccttgtcgggaatgctttccggcaaggcttctactggccaaccagccagtgtgacgccactagaattgtccgcacctgcgaagggtgtcaattctatgcgaagcagacccacctgcctgctcaggctctacagacgatacccatcacctggccctttgctgtgtggggtctggacctcgtcggccccttgcagaaggcgcccggggctacacgcacctgctggtcgccatcgacaaattctccaagtgggtcgaggtccgacctctgaacagcatcaggtccgagcaagcggtggcgttcttcaccaacatcatccatcgcttcggggtcccgaactccatcatcaccgacaacggtacccagttcaccggcagaaaattcttggacttctgcgaggatcaccacatccgggtggactgggccgccgtggctcatcccatgtcaaatgggcaagtagagcgtgccaacgacatgattctacaagggctcaagcctcgcgatttacaacgacctcaacaagttcggcaagcgatggatgaaggaactcccctcggtggtctggagcctgaggaccacgccgagccgagccacgggtttcacgccgttcttcctagtctatggggtcgaggccgtcttgcccacagacctggaatacggctccccgaggacgagggcctacagcgatcaaagcaaccaagccagccgagaagactcgctggaccagctggaagaggctcgggacaaggccttactccactcggcgcggtaccagcagtccctgcgacgctaccacgcccgaggggtccggtcccgagacctccaggtaggcgacctggtgcttcggctgcgacaagacccccgagggaggcacgagctcacgcccccctgggagggaccgttcgtcatcgccaaagtcctgaagcccggaacgtacaagctggccaacagccaaggcgaggtctacagcaacgcttggaacatccaacagctacgtcgtttctacccttaagatgctttcaagttgctcgtatacctcattcacacaccaagtctggtcgtcaaggaagggtcagccttgccttagcaaagcccgaccctccctcgggggctagaaggggggcaaccccctctgcgtcaaaattttcctcaaaaaaaatcttttctgccagaatgccttttgtgctcttcgactacttcaaaagtggatcctgaaaacgatggagtacacgtaagcagccaaggctgaccgagccgagggactcctacgcctccgggatacggatacctcactcatcaccttctgcgataagtaactcgcgcttggatatgcgattctgctaaccgatcaggtcttatcgctcgaaaacttttctgccagaacgatttttgtgccttctcgactacattgataacgggatcctgcggtcgagtatgagtactcgtaagcggcaaggccgactgagccgagggactcctacgcctccgggatacggatacctcactcatcaccttccgcgaaaagtaactcacgctcggataagcgatcctgctaccgaacaagtcctaacgctcgggtagaaaatgactttcgtgcatttttcgactatatcgatagcagaatcctacgaactggtgagagagcacgtaagcggcaaggccgatcgagccgagggactcctacgcctccgggatacggatacctcactcatcaccttccgcgaaaagtaactctcgcttggataatgcgattctgctgccgacgaacaagtcctaagtgctcgaaacaagaggaaggaaaacacaactctataatctgaatgctaaatatgtttaggcctcggtggccgcaagaaacatacgcatacttcagccgaactgttcatgcaggctcaaacatcagcagggggaggagcggcaccctcggcgtcatttccaccctcggcggaatctggcctagcctcagacggcgacacgggcgaaggacctccacctcgaaggaggaagccagcaccacgcttgggccctcgacagccgcgtcaagcctctggacctcggctaaggcggcctcctcttcatcgggtaagcagtacccctcgctgacccgctccagatccacgtcgtagtgggaagcgaggacggcgaaggcccgcctaacgccgtggtgcagcgccccgcggagtctcgtgcgcacatggccgcccaaggcccgcaggtgactctggggggagctacccgaggggacgtcatcgatgccaaaggcccggcaaaaagccgagatagcctcgaacatggccacgcgctcggcctccttctactcagcgcctcggcaagcgccttg

SEQ ID NO: 5423 - DNA, 3676 bp, Arabidopsis thaliana landsberg
ataagcagagagagatagagtttcttggattgtctaccttaatcttggattattttttggcggtgttttttgcagtatacaagaaacattatccaccggttttacatgatgaagtctggagattggataaaatagcgaaagatggagcgctacacaagaagctactaaaatctaacattgtgactgttgaagacttcctacagatactcatgaaggatccgcagaaactaagaagcgtatgtgcatctttaatattgtgagtatctacacaagaaaatgattgtttcttgcttatgttctttctttgtgtgtatttaacagttacttgggagtggaatgtcaaatagaatgtgggataacacggtagagcacgcaaagacttgtgtcttaggtgggaaactttacgcctattacacagatcaaacacaccagacagctgttgtctttaatcatatatatgaatttcaaggcctaattgccaatggccacttcttgtcttcggaatctcttaaccatgaccaaaaggtaactcatctctctgtaaagctagcttcttttttttattcttccctttagagtctgcagtctctaaggatcctactcaaaagtggtgaaaacttttgaacttttttggaattcaacagatttctgcagacactttggtgaagactgcttacgagaactggcataaagtggttgagtatggcggtaagctcttgaattgcttaccagttgctaagaagggaataaaaagcttgccagagccaaaaatggctcagaaccatcaaacgcagcagaaggctctgcaatgccaacagactgtgaatggctactcatcagatcctcagcatctgatagagtatccttttgtccaacaaccttgctatcagttacgagactacacatcgatggagagttcttcagtttcaggctcatataatggaggccttgaagatattttcacggaggaaattcgagcgaggagttctgagatgctcgagacggataacatgcagagattgctcaagacatttgggatatcaggcgggtttggtaacagggatgagtccatttacggtttcagtgatcagtacgaagctcagatagacaagggttataggagagaaggaggtagaggcgcagggaaagctgtagtgggatggcttaagctcaaagctgcattgagatggggtatctttatacgcaagaaagctgcagagaggaggcctcaaattgtggagatcgactaagaaagtactacaaaaaaattccgagagcttttcttttgtataaataaacttgaagcaattacttttttaaagaggatcaaccagtatatccttccatatctaagcattggagaaaaaggttaaacgactggttatcagtcagacaaagagtcttaataccgaaagtctcagtattcgtcctctttaagataatctccacaccaaatacatacgaatggagtgaaggttcctatatatattgacaaagaaaaattaaggatttatgaacagaatgaatttaacattgcatcaacttacttagcttaccattaaattacggagtaaaatctgaagacgtggaaaatcgaggtgagatggctggactggactagaccatcatcgagatatctccagcactcatatcaagaacataggtttcggttataaaagcctcccatgcacttttttttagagatctttctttgtgattgcttgatcggccgtatcaaaagcggttgtggattgctcaatatcaacaagagaggtaggagttgtagatggccgccggagcacagcagtttcaggagcggttgtggattgctcatcttcagagatatcaacaagagaggttggggttgtagatggccggactccagcagtttcagagaagccagctccttcgttaggcaaactcattctcgcagacgtggccctagttagtagcgcgccaaggcactatataagtgacacggcagggataagtcaaacttaaaggccgacttgactaattggccctataatgttaggcccatgttttgagagagcaagtagagagaagaaacaagcaacaagaagttccttcctcagcctctttccgatttcttcttcagtctctctccactggttcgtcgacttcgtagaagcaaaaaatgttcttgattcgtctctcccgccataacccatcatcttttacacttctcacgcgccgccttcacgaccaaacaatttcctcgtcacgactccgagacctttacaattttcaatcaccgccgcctttgtcgtcgtcagcctccgaaaatcctgactttaaccagaaaaacaacaataagaagaagccaaagccgcagtaccgtccaccttcttcgctggaaggtgtgaagacggttcactctgatcttccgttcgatttccggttcagttacacagagagttgttcaaatgtgaggccaattggcttgagagaaccaaagtattcaccttttggtcctgatcgattggaccgggaatggaccggtgtctgtgcgccggcggttaatccaaaggtagagtctgttgacggagtggaggatccgaagctggaagagaaaagaaggaaagtgagagagaagattcaaggggcatcactcactgaagctgaaaggaaatttctggtggagctgtgtcagaggaacaaaactaaaagacaagtcaatcttggtattcgtttcttcactccttattcatgagattgtagtctaccttactgtcattgatagatgtggttaaattgagaaatttgaagggtgtgtgtcttcttgtcagggcttagaaaactttcctttttggtcaccaataacgaatgcactcttttgtttcttttgtatactgctatttctatgctgaatggttgctttgggggtatgtgtagggcgagatggtttgactcataatatgctgaatgatgtctataatcattggaaacatgctgaagcagttcgggtcaaatgtcttggagtcccaaccctcgatatgaagaacgttatattccaccttgaggtgtcgtcttttatgaatctgatattgttcttttagtatatgatttgtggaatctaaagaatgacttgtacagccgtgttgcttgttgttacaggacaaaacgtttggccaggtagtctctaaacactctggtacacttgtgttatatagagggcgaaactacgatcccaagaaaaggcctaagatcccattgatgttgtggaaacctcatgaaccagtgtaccctaggctgattaaaacaacaattgatggtctaagcatcgatgagaccaaagcaatgagaaagaaagggctagctgttcctgccttgacaaaacttggtccataccttttccatgcctttttatttttaaattctggttgtgtcaatattcttaatcacttttgcctgaaatttttgtttcagccaagaatggttattacggtagtcttgttccaatggtgagagatgctttcctcgtgagtgaattagtacgtattgattgcttgggactagagagaaaggattacaagaaaattggagcaaagcttagggtgagatgtttcttcctgtcccttcccccctctttgctgtccaacttcatctgttgaacatacattggagacctctttactgcttcaggtttctgttt

SEQ ID NO: 5424 - DNA, 2992 bp, Arabidopsis thaliana landsberg
cacatcagtcggatgaaaacaaggtgttacttttacagtaacacacgagataagtgtgaatcatcactatgtgaagcgtttaattcccaacagtaaaacccagaaacccaaagtaaagctaattcaaacaaaaacgaatcaaagagattagcaagcttaatataaaagacaagtaaagggaagcaatataaagtaactgttcaccaggaaacagttgtgctagttgatcgaataagctgatacgtaccttatcataacgacgatcgatcgcagattattagtcctgaggaaattttgtgagggtttaacagtgatctctttgatcaaaaccttttttttgttttgttggtgttgtgattttgaggagacggtgattgaacaaggaaggtgaggaataagaaagagagaagagtatagaaatgtgcaaagtggccgtgagccgagcctgtttcttaacctactatcggatgacacgtgtaagatgaatcacccttagtgaggaaaggagttaggttcggaacaatctaatgcgtttttgagataagatggaagaataaagaaggtcaaggtcccacttttaagtggacccctctttgagatttcaacgatttatttcttttcttcttattcctttttgttttactccatctcaattaattaaacctgcgttacaacacaaacttcgaatcgtatagtatttcatttctaaattctaatagtatagggaactcttaatttttttgcattggaccaacgttactttttgcttttaaatatacaaactttatattcaaattagccacattttttagtttataaccgaaaaaaatttgtgagatgatgaagagtaaccttggatatgcataaacaagaaaatcaataaatataattactcgaaatttgacagttcttgttttagaaacaattttaatcacattatcttctattgacatcaatacagttgcaaaacaaactaattctcgaaactgatatcagaaattgtcgccatatatttgttataactagatttaggattatgctcttcttcaagttttgcatctaattttgatgcacgcattctgaatttctgattaatatattttgtaacaaaaatgactacaatatctcatgtgctataattttaatcctttttcatacatttatgttttaccattttgtttttctttcgaaataatacaagtcaaatctcgaccgttggatggaaccggaaaaaaaaaacaacgtaaaaaaaccgcgtaaattctgaagctagcaagtgtctaactgtctatctctatgtccgaaccttcacagaataccttgaaccctaataacaatggcgacgctgttgaaactcgacatagccacgactttccttgctttcatcgttccccgagctaatacctccttgaaccatcggttcgcttctgctaggctcagtacagccacagtttccctcagaacgaagtcgtcatcgttctattccgcggcgctttactctgacagccgtcggagattccactccgccgttgcctctgattcctcgctcgccgttgtagatgatgaagatatcttcgatgttgccagtgagattttgcccgacaatcgaattccggccactataatcaccgggttcctgggctctggtaaggtgaggctaatctagggttcatgattcggaaattcctgctcaattttgagcgatcagattctgaatttcactggaattgtttttttctgagtgtatagacaacattgctaaaccatatattgacgggagatcatgggaagcgcatagccgtgattgagaacgaggtattgtctgagaagctgaatagagattgttttatgttttatggtttcactaatttgttctgaaatgtgaattctcagtttggtgaagtcgacattgatggatcacttgtggcagctcaaactgcgggagcggaggatataatgatgcttaacaatggctgtctgtgttgtactgttaggggtgatcttgtgaggatgatttctgaattggtccagaccaagaaaggaaggttcgaccatatcgttattgagacgacaggttcaatattttctatcactctggagctacatgattcgttaagaaccaactactatgttattaaagaataaatgaatagattatgtatattttctttcaggattggctaaccctgctccgattattcaaactttctatgctgaggatgaaattttcaatgatgtcaagctggatggggttgtcactctggttgatgctaaacatgctcgtttgcatctagatgaggtcaaacctgaaggctatgtcaatgaggcggttgaacaaatagcttacgcggatcgtatcattgttaacaaggtattgtgaagttctatttcgacctaattttcatgattaacatcaccataacttgtatttgaaatgtgtggtggatgcttatagtagaagcttttcaatggtctgctatgtatgttctcctcgacatatcatacaagctgaaaattgtttgtactttgttgtagactgatcttgttggtgagccagaactagcttcagtgatgcagcggataaaggtaggttctgcttcttctgattctttcttttttctctttgaacatctatttttctctgtgcactgcgttagcatttatgatgtggttatttccagaccataaacagcatggctcacatgaagcggacaaagtatgggaaggttgacttggattatgttcttggaattggagggtttgatctagaaaggtccggttttattttacgtcttactaaaaatcttattacgagtcactccgaaaacttctgtccaaagtgaatagtagctccttacatttgttatggtttattggttgtggatttcctggtttaagagggctgattttgttactctgatttattgctggtggccaactattttatctttccagaattgaaagctctgtgaatgaagaagagaaagaagat

SEQ ID NO: 5425 - DNA, 1215 bp, Arabidopsis thaliana landsberg
ctgccatgatcaccacaatgagcatgagcatgagcatgaacacggtatgttatagtgttaccaaataatggccttattacttaataacgatcgcctacatgcattgattagtttgcttctgaaactgcagagcatcaccattctcatgatcacacccatgaccctggtgttggttcagtcagtatagtttgcgaaggagacttagacctcgagaaggtattaacccaatatggctcaagttgtgtcacatgtgatgcataaaactgtagcacctgacgtgttacttataattaaaacgattgttgagatgtgcgattgattacttgcatcatctataaccttagttttgaaaatggatcaggctaacatgtggcttggggcgctattgtaccaacgtagtgaggatatctacagaatgaaaggtatcctctccgtacaagacatggacgagagattcgtgtttcaggtgaccaacctttgtcattattttgatcatttcggatgaattctaaagcatcgaagccttgtgatgtaaattatctctgacgtttgtggtttataatggttggaacagggagttcatgaaatatttgaaggatcacctgaccggttatggagaaaagatgaaacaagaaccaacaagattgttttcatcggcaagaatttgaaccgggaggagttagagatgggtttcagagcttgcttgatttgattataggaccaaatatttaaaatcattccattttgtaatcaactggtcaatagatttttgaacaagaaatatcgtctaaagcttgacactaactacaagaggctgaatcaagaacatattaaagccttcacggtacaaaaagtgagtccctttctaacacaagcggcaaaaactacacaagatcccaaaaccaaaatgcccataagttacaaggcaggattcgtactactgacgaccaagtaaattcctccacttatccttcaaatccacctcactcctatcagcgaaaacaacagggtatgaattcttgatatctttccatgattttccatattctttaactccttccctcaaagctgccacttcttcagaagtccagaacttcattggccttctgggacgcggtctttccaatcttcctttcttcaacggtgatacattcagaggttccggggttggtagatgaggcctgactcttctagacgatgatgttccctcactat

SEQ ID NO: 5426 - DNA, 3440 bp, Arabidopsis thaliana landsberg
ccaatagtagtgaggaaagtacctattaaagttccaaactaatgttgctgaagcaaagtagcttactcctgcagacacttgagcagaaaatcttttgcatcagaggagagagtatcaggtattggaggatgtgattttgttgttcctatgaagaagatagcagcaacctgaaaagaaagtatgtccacttgtaattaagaagcaaaattattcacgaaaaaatatcaccagaaatacgaacaaattacctctttatactgctgactccaaggagccttcccagtcaccatttcaataactgtacagccgacgctccatatgtcagcagagctgagaacaatagccacatgtttgtgagaaatcaaaaatatgggacataagtcaccaggactacaattaatagccacaattgtatgagtatcagttacaaaacatctaattttgcatttacgagcacgcttggtttcttacaagctatgtccagtttgaagaataacttccggagccatccaatatggtgtccctttcatagattttgcaccagtcatcgtagcctagagatgaaatcaagtcaatcacattaaatcactctgaaggatatgttatactagaccaactaagaaataagagaatacacagaacagaatgcttcctgcaatatactttgtagaaaacaaattattttttgacttaccaactcagctacttgtttggatgcaccaaaatcagcaagcttaatgcatcctttattatccacaaggatattagccccctgagaaaacatagaaacatatagtctcatgggtaaggactcgagattgtaagcacttataaagtatggagaaaaattgttaccttaatgtctctgtgcataattgcatgattgtgcaggtactccaaccctaaaagcagttgccttgtgtatgtccggacaacctaattcaatcgttctcaccacttaagcaatgcacacattgtaagagattgaacaaaaaaaaatccaagcatgacttactgattcaggaaaaggtccaaatttctccaagagcgatgatatcgatccaccgggaacaaactcgagaaggatattcagggtatcatcttccctcactgtacccaaatatctctaaggccagaaaataaaaaatacctgagttagatagataacacaaggaagtgttgaatccgtatgcattgagaaggagacaataccaacagttacttacaactatattaggatgggagagatttttaagaagcttaacttcttcttcaagctcctgaatatgagcctacttagcaccaacacagataacaaactcaatgaagtacaaaaatcaatggaaattgaaagagggaaaactcgatgaaatggattgtttatgaacctgagtcttttccttggaagcaaaattggctgcaatcagaacctgagtagaacaaagcttttgaagttcagtacacatgccagagaattaggtcattcaaaattaagtcccaattagcttcaaatccacagcaatcagaaaaacaaaccctaaattacctgtttgacggcgagaagctccccggagtcaagattcatacccatgtacaccgtaccaaacgcgccgcgaccaattaactgacctttcctccacgaaatcggaggtgccatgtctacagtgttagcaggaggaggaggcgagaaggagggtttgataaaaatcttcgatttgcggatgcaagaggtgatcttatcggcgagaacaccgggaaacggaggctggttctcctggttatcgtcgtcggaagaaggacggaaaacaagcgatcgacgaacggagccgaagaaatcttgcatttgaacgattgagggaagaatgcgtttcactgttactctaattttgattcatcggtcggcacaaaagtgttaacgagtgagagggaaaaaaggcatcgaaattatatttttgaaaagagaaaattactttacttaaattacgcatattattattccaaataaaagtatggttaatactttcactcgaacgaaatatatatcataactacgtataatgtttttccttcataatccacaattacctgttagaaattaaattcccttccaaaatctttacgtaaagaaaaaaaaaaaattaagtctcttgttgaataagcgagtttgatgactcttctcattgacttagacggttcttcttcctaggatcttttattctaattttccaatgattttcaggaaaaccattgagcttagccattttcctccacttctcaacgttcttctccatcttaagattcagaccacaataacctttcagcttattacgcatcctgtcgtacactttccaccatctcgcatgcaccgactcgcttgcatacacacgtcgcgttttcaagtcccagttacaatcgtagtctctgtaacatcgccatggttttagtcccaagtagtgtatgccctctaaattttctggaagattgcgcgctttatcatgcctgctttcatcaccaaagtatttcatcgtatttaaacgttttgataacctatgccaccacacgaaatattcgttcagaaatccttggtctcccccgttgtatgacccgatcttgaatgatttaagcatcaaatcctcgaataaacaagctgatggctccagaacctgaagaaaaccagactttcttatataaaacatatggaaaattcgataaaataaaatagtaagaaatggattgataaggcaatatctttagaaacttaaaaaagtcaacatattcaaatcaaacaatctattgttaaagatatttgttagttagatgcattaccatgactcctgagttgaacaagactttgttattgccagcggcagaaagttgaggataggagaaaaggtaatcaatattcttgacgatgatgaagtctgcgtctataaacactagtttgtcgtaatctgtcacttgccacacacgtaacttactgtagttccactcattgtaagaacgcttcttggaaaaaggactacgaattctctccactcgccgtagtttccagccagcaaggcttaggccaatgagagagatgttggttatagagtcatcgtggaggagtatcatgtccttggttgatccagattgccttatgctttgtgctaaggctattgctccgcatacgtagacctccgatgagtgtagtagcgtcacgtaagcgacacgttgggcagtaaatgatgataatgtagttttttcggatgtgagatttctgttcttgtcttgtatccatgcttctccttcacctttaacaacgaataagaaatagttaattagtcgaaacattggaatttttaactatgcattatgtcatcatgcatgcgacaataaataaatgaagaaaacatattgacctatgaatactaaagccaaaattacctagcggagcaatc

SEQ ID NO: 5427 - DNA, 1388 bp, Arabidopsis thaliana landsberg
  unsure (1)..(1388): unsure at all n locations
tggatggtcgactcctagttatcttacggctcttggtgcatattcttttccgatgcctctttctcctgcttcggaaaagctagaagcacaaggtggtgatggaggagcttcgtgggacgatggcggtaattacgaaggtgttagaaagatatgcattgggacaggtgagattggtatcgtttctgtcaagtttctgtatgaaaatgacactcacgagatagtagtgggagatcatcatgggaacaagaacctgattaaacatgaagaggtgattactacttcacttttcttaattaattgtccaattacgtaccctaacttagttatataattgagcttgatattattatacttgattttctaatttttatttgtagttcgagctggattatccgggtgaatacctcacattagtggaaggtagttatgacatagtacctggaagtgaggaaactgaagttataatcatgctcatgtttacgaccaacatgcgagcctctccatgttatggactcgatgataacccaagctttgtgctccaaaagagaggtcacaagatcgttggattccatgggaaatcaagtaacatgcttcatcaacttggaatccacgtactccccatcacccacccctaatcatatttatatgacttagaatgaaacactcttctcctatgttttcattaactttgattcgtttctcatctttcttttttttccctctgttttgattttgtttctttttctctgtatttgaacttttgaataattcatgttttaagaaagtgtatggaggctcattgtgactatctgttttcaataagttgtttccaaaagcaagaaccattttcaagattcctggaaaaaggatatgttctatgaatctcaactcttcttctaattagtttagtatattcacaagtcaactgactaataaacatcacattgactggcttgagcatttggatttcggatcgaattcggattcggataattcggatgagggattttattatgcgttcggaatatatgactattcggaaaaaacgtgacaccagaagacaaacttagattatcatataaagaaaagaaaagtgagaaaactgttatgatataacttcttaaaagcaacatttggttcttatatagctgaaatttgtatacgaggtttctcttattattattgaagtttaattatgatgactattatggagacgtggaactaagttttgcgtaaaagagtattgaatttcaagttcagaactcataagatcaaatgaacaattttttttggggtagggaatttgtatgctatgttaaggtaagattaccatgtttaaatttacncaatagaagatagaatatgaggaagagggagaagaaacaaag

SEQ ID NO: 5428 - DNA, 441 bp, Arabidopsis thaliana landsberg
agactgggtctgggtatactaaggctcttggtgcatattattatccgatgcctctacctccttcttaggaaaagctagaagcacaaggtggtgctggaggagctccttgggatgatggcagtaatttcgaaggtgttacagagatatacattcggacaggtgagattggtatcgtttccatcaagtttttgtacgaaaatgacattcatgagataatagtgggagatcatcatgggaacaagaacctacttcgacatgaagaggtgattactactacttcagcctttatccaattatacaaagcttattgtatattagatctttgatgttattcttttggattatcttgttctttatcaatttagtatgacctggactatccgagcgaatacctcacatcagtagaaggtagctatgatgtagtacctggaagtgaagaag

SEQ ID NO: 5429 - DNA, 3551 bp, Arabidopsis thaliana landsberg
ctattgaaatggattagatcaactaggtagcagcttttgattttcccatatataaactcgaatcctggcttaggataaaattcgacttttaagtagttgtgagccttctcatgtaaaacactttaaagttgtaatattgtcaccaataacatatatataataatctttttgacaaataccttagagcatcattatcaataggttgttaacaatatcataagaattatcaaaatattatattaaacaaaataagaataaaaaaaataaaaaagtgtgcttaagagatgaaaaatggctcttagctaagagttttcttccttagagcatcattatcaataggttgttaacaatatcataagaactatcaaaatattatattaaacaaaataaaaataaaaaaaaaaataaaaaagtgtgcttaagagatgaaaaatgggtcttagctaagagtttttttccttattctcttcttttgtaagagcctttctaatatttaaacattatgttatatatcaaaattgtttagaactacatgtaagagtccattgacaaagatgatcttattctcttcttttgtaagagcctttctaatatttaaacattatgttatatatcaaaattgtttagaactacatgtaagagtccattgataaagatagtcttaattctcgataagttagtgttgctttaaaaaaataccttatactatcaacaaaacaatcacgaaaatgctaataaattaaaggacacatgacacaaaacacattaagatcaagacaaaaaccatcagacaagacaataaagaaaatctataaaaagactcgacaatccgtacgtatttccccatgtctcttccctctctttacaccaatggaacccattttatccatagcgtctccaaacgccttgagaaacttctgcttatctcttgccatctcaagtgcaatgggcttcgtcctcgggtcaaggaacaaagcttggtccgacccgagaaggcccatgttggttcctagacctgtgaaatatccattatcaaacacaaacggagttgtagcgtcgagcggaaggacgactccagagcttccgccggaaaaaggacaagacatccggagctcttttagtaatctttggtcaagactcgggtcgggtcgttttgtgcctttgtagtcgtagagacgaccaaggaaatttttacaatgggcgaagccgatggtgtgggaaccagaaaggacgacgagttcctctacggttagtcctttggacgcgaagagcttgatgagttgatcaacggtggagtttgatcgaggtatgtttggagggacgttctttgccgttgatctttttccgtcccaccttccttttttcacttgatagtaaggcccacctgcctatttggaatcataacaaaacattattcaatgacacgtagatataccatcaagtcatcaaccattggagtggacaatacggtttggtccaagaccggtttggacagtgggtacacatcaataatcaaatcatatgaatggaaacttattcggaagtaggaatgtagaattgaagttcgaattaccagatgaatgaaatctcgagcggcaatagcgagaatatcagagcaagagacgagagaagggcaatgagactcaaccaaggccttcgccttgatgatactatcaaatccttcctctctcaattccttattctcatatgcttctctctctgctaatttcttgcttcctttctttgtttctatcaatatcgacccatcacaacccttcaaaattccaatttcaactaatattattggttatcaatcaccgtagtccataatttattagtttttatgcatgagatgtgcactgttatttgttaaacaagcagtaatgcagaccaaaatactgttgagtttttcactaaaatgcgctgaatcttgacttttgtttgctaaaatgcgctacgttggaaaccaaaccggtgaactatttccatattggtgttatgacttttgcaataattattgcgacataatgagattgtacattatatttgaccatgctagttactaatgctaaaatgcgtgtgttatggtacatggttaattatgctatagtgcgctggcatgcctgagaaagataatgcaaatttccaattttggtaaaattttgacctcaacgaagcagtcgtgaaagaagaggcgaatggtggctggagctgagatggggacttctttgaaccgctgtgaagtgacggaaccgacgagagtttcaagctgaggacatttcttggagtagtaatcgccggagagctctctgtggggccgcagtgccggaggcttagaggttgtgggttttaccggagaaatcaaaatggttgatgtgaggaagaggaaaaagaatattgaggataacgaaagagatatgacatgcatggtggggttgtgacttgtgagatactgtgagtctggaccaacttataaatagtttacagttttttgtacggttcaaaataatgacaacaaaacaacctaagtcaaatctcatatcagtgacaaacaagttgattttgttataacacaaaatacttttgtgagacaaaaaacaaagagtgacaggaaatttgtgaaacatgggttaagatctcattttttctgtgtattttagtctaaaatgtggaagcaatcatggcttatattaactttatagatctactgccgacaataaaaaataaatctttatagaatctttcgagtagaatgcgtaataatgtgttcctgtgactattacacattttctaaaaggatcaataataatgtgttcatgtaatttgccatgttaaacataactgtggtagaacaaaaatatatatgtaaatactaaacagtactaggtgaagtccattgaacattggtttagtttagaagtcaggtcgagtaatccggatattttagactctggaccagcccattattattggctcagaaaaagcgaaattactaaaatccggtttggacggtcgaaccaagttacccacgaaatctcgaaccggctacgtttccggttagggttctaaatgtgagatttccagagaagtgtgcatatcttgatagtttctttgaatttcaccgtattcataccatgaaaatgagaagaatcgtcggttcaatttcgagtcttgctaaagataagctctcttcatcttcttattcttcgtctagacaaattttcactgcgcgttcatcttcttggcaacgagatgcatcaagtaagctctcagaagcttctttacctggaaaccacataaaatgggcttcgcttggttcagtcagaaattcgagattcgcatctggttttacaccattgcagcaaaaacctttggattcaatcatggatttggccagagccaagactaaatcccctgaagaactcacttcgatctgggacgatgtaatctcaaaatttctctttttatgtgaaattttctgtctttcaattgcatttggttggatgttactacattttcaatttgacagtatcatttgggacgaggtcata

SEQ ID NO: 5430 - DNA, 979 bp, Arabidopsis thaliana landsberg
cgaccatctttataatgaactcttacataaagttctaaacaattttgatatacaaaataatgtttaaacattagaatggctcttacaaaaaaagagaataaagaaaaaaaaaatttagctaagagccatttttcatttcttaagcacacttttttatttttttattcttatttcatttaatataatattttgatagttcttatgatattgttaacaacctattgataaggatgctctaactaatcttataaataaaacaatgaatctggtttggtctgggcgtaacagaaattatactcttttttttttttgtcaagaggaaattatactaagaagcaacagattaaacattaaagcgtatagtaaaattaattttttgagaatcttaaaccaaaccgaaccggtattaaaccggaaccaaattggcaatgaaatttagatgccagtagtaacccgcttgattcgtttgaagtgtgtagggctcagacttgaccggagtggactcaatcggcgaatctgtcacggaggacacggcgaatcaacgcggcggagagtgatggaagagctttcaagcctaaccgtgagtcagcgcgagcaatttctggtggagaacgatgtgttcgggatctataattacttcgacgccagcgacgtttctactcaaaaatacatgtaagctcacggatttgattttctagttttcttcatgatctgatgaattttagtagcgtcgtgaaagaattattttcgtcgatagatgaatcttactgatatggaagttgttctatcctaggatggagattcagcgagataagcaattggattatctgatgaaaggcttaaggcagcttggtccgcagttttcttccttagatgctaagtaagtgacatgatgcttgggtcatgttttcatgaattcgcagtacattttgccagtgagagagtgaaccctttggatttttgcgatagattagagttg

SEQ ID NO: 5431 - DNA, 4467 bp, Arabidopsis thaliana landsberg
  unsure (1)..(4467): unsure at all n locations
ccaaccagtccatcccggggatattattatgtctctggggtggaacaatgattaggcccgcgtgcatattgacacctttcactacaaccgagatgccccgaacaagtccggtcggatacattgcgtgtccgccggcgctcgtacccttccataatcggtgtttggttctttcctgaatccacctgattcaaccaattaaggactaacaaaacaatgtgtagccccagaatcaaatagagtgtgcgtttctacgtcacctactctcaaggtccctacacattcccttagaatgctgagtacctcccctttcccatatgcatgatgcaatgcaaatgcagttataaaaataatgaatagggagttgtgagaacgtaccagtgatcgccctgaagtttccggcatcgttagcttcctccgacaactcataaactcgcagtgccacggcttgccgctttgggggaggcggcagtccatttcccccgcgattgtctctttgtccggcctgcttctccgcagtcaacttagggcactctcgctttagatgtccagtctttccgcaatagaaacaagtccttgtctcttcatcgagaaccctggactgccctggttccattctcgggcaactttggatcgcatggtccttgcttccacaccgaccacatgcacctatggccttccaccaagttccgctgtggctcttaccacaggtcacgcattccccggtcttagcatcggacttggtgttatccaccttgtcaaatttctttttcttatccgcgggtttggtggattgattgttccggatcggtactttctcccggttcaagtacctctcctcctcgatcccttcctcaatcattgctgccctttcaaccaattcggaaaccgagttgaatgtccgaaccaaacaatggttgcggatctctatccttagtccacggataaatcggcgcacttgagcttgttcctcctcaagttcacgtcccacataacgccttaggcggttaaattcctcatcatattcacgcaccgtgcggttcccttgaactaggtcgaggtacgcacattcaagcctatcccaagcctccggtggaaagtacttcttgttaaactcgtctttgaaatccgcaaaggaccggacctcgtcccctctgtgtttctcgacggttaaccaccagttatgggcgtctccttcaaggaagtggaccacaatgtccctttggtaatcctcaaggcagcgggtagacttgaagttcctcttgagtctactcctccactcatcggctacaatcgggtccgtactgcccatgaagtgtctcgtgcccagccttgagatatgttcgagaagactcagatagtctccccttttccgcccatgattcggttgtggattcacttccacaacttccgagtcatcgtccttttggttatccacttttaggaccaccggatccgctacaacggccttggtcaatgtggctagttgcgccatcattcccttcatcaaatcccactattcttgggccgttggagtattgttccggttatccgtgttgtcccttgcaccactactttccagtgcttcctcatttatggacttcttcccggccttaggtccggccgagtctgtcccatcgagcatcgtcccgactctggttttctcgttgatcattgtttccttcttaaccaaagtctcctcgacaatgcccttgtccttcttactctttcccgttttgctgctcttacccatctgtgaaacctccaaagttaatccatataactcctagtaaaatcgtaaaagagtaaagaacaactaccgcgagattctcaagtcgacgagtggtgataccccttaacccaacacctagtcctagaaccaagcatgctctgataccaacttgaaaggccccgatccggactgcctaaagtctggacgagttctcttgacccaagccactaagtgactcggccctaaccgtttatgaggttctttcctagtctaatccgttccatatgattccgtgattcaatatatgagacgaatagagtaaacaaacaatcggatactttattgattaagcaaaggattcgatacaacctttgagtttgcatataagctattacaagtcatataatcgatccctagactatccgaactatcaccacccatcatcccggtcttgagtctctcgcgcctaagccaagtccttcccacgatcaccattcgttcctgaaagtcatagagccataagtaatctcatttatttagtcatatgcaagtccatgcaatgctctatatgccatacactactcggatccgtggagaggattcagagaggggaagatcgcgcatcagtcccgctgattctcggcaggtcagttaagacccgccggtcctccgccgagccgcgtccccgcctcagccgatccctacccggaccgagtcttgtgtaggatgcacatgacccggatactacccagccctctagtcgatcctttcaaggatccgactactaactcacatcctagaacccttagactcaaagtctaggagcccttaccttccttaggtcgatccgaccctccttctttattgccggccacagcccgactaccgaatcctaagactatttattctcccaagagggagagagttttaatggtgagtttcttgtgttttcggtgtgttgtggtgagtggaatggtcctgggcgcccttccttatatagggggcgaatggatgcttcccgaatcaacacatccgttccttgcacctttccgaagagttgcacctttccgaagagttgcgcccttccgaagagttgcaccattccgaagagttgtatctcttcgcccataaccgcccagctagtccgtcactcgtccagctacctcgagctcaaccgtcactcgtccagctacctcgagctcaaccgtcactcgtccagctgcccgagctggactgtaactcgacctgagtaaccgtcactccttccagctgagcttgagctttgggcgagctgacccagctgatttctttacgatcctagcttagcctgcatgatttcccctttgtccgagcttatggccagctccttctcacttgtccgagactccacctttttctctcggaccaagtcctagtcaacgatcctattgaggattgcaggcgttacaagtctccccccccttgaattggattcgtcctcaaatccgcatcaagttgatctttacccatctccttgaaccactccggaaaattggccttcatcttattctcggtttcccaagtgtattcttcacggcctccacaattccacaagacttttaacaaatcccttgattttccctgagtccctttcgtcatttggtccatgatccgtaccggccatgcttccaccgtcatgttctcctttaacccgggaggtacatcttccacgctttcttcttgatcacttagacacttccataattgtgacacatggaagactttgtgaaacgcatttagttttggaggaaggtcaagtttgtatgccaccgcccatactcattcgatcaccttgtacgggccaacataccttgggcttaactttttccttgaggtgaatcgccctgcccctttgtaggtcatcgcctttaagtacaccaaatctcctacttggaattccaattcctttcgacgtttgttggcatagcttttctgtcgatcttgggcttcctttaacttgatttttaagaacttcattctctnnnnnnnnnnnnnnnnnnnnnnnnnnncaaacaaccgacgttcgcccacgggcgtccaacacaacggtgttctacaagctagaccatacaacgcctcatagggagacatactaatactagcttgaaaactattattgtatgcaaactctactaaccttagatatttctcccagtttcctctccaatccaagacgcatgccctcaacatgtcctcaagggtttgaatcgttcgttcggactgtccgtccgtctgtgggtggtaggcagtacttaggttcactcgagttctcaaggccttttggaaagccttccaaaactttaacgtgaaccttgtgtctcggtctgacactatactaaccggaatcccatgtaaccgcacgatctcgtctatatacttctcggcaatgatttctgctccatccttatccgagattgccataaagtgcgcagacttagtcaatcggtctaccacaacccataccgcattgtgtttggatttgatcccgttggcagtccagtgacgaagtccatcgttatgtggtccacttccattccggtataggtaggttttgtaacaaccacttggtacttgatgctccgccttgaccagttgacaagtcgggcacttggcacccatctggccacgtctttcttcattcctacccaatggtagtacttttaaggtcgcggtacatcttgtcgaccaggatggattga

SEQ ID NO: 5432 - DNA, 1042 bp, Arabidopsis thaliana landsberg
acatatgacaggttcttgctagatgggatccggctaatgaaaagaggccagacattggtgaagctccagtattccaccctacatcagaggtactaattgttcatcatcttgttttcagttgttatgttgatgattctgttctttcttcatttttcttcaacattttggtgtttaggagtttgaagatacgcttgcttacatagaaaaaatacgtcccttagctgaatcatttggtatttgtcgaatcgtgccaccgtcgaattggtctcctccttgccggcttaaaggggatagtatatggaagaataaaaatttcccaacccgtgttcagtttgttgacctgcttcagaacagaggacccgtgaagaagaagacacctaaagcaaggaaacggaaacgaggaaaatacttatgaaccgtcgcccccaagaaacgaaatggctctgtttctaaatcagtttctacccccaaggcgaccgaagaagagaattttggtttcgaatctggtccagaatttactcttgagaagtttgagaaatacgctcaagatttcaaagactcctactttgaaagaaaagacaatgttggagatccatctgttgaggagatcgaaggagagtactggagaatcattgagaaagaaacaaatgaagttaaggtacataaaatgttcttctttatggtcgttattgttaaattattgaagaactttggtaaaagacagagggacttgacgaaagagacagagacagagttatgaaacctgaaacttctttttttaaatctggaaaactgaaacctctttaattgaaaatctcttcacttatgactcttaacataactacccttaagacaagactcttgattgtataaacttaacaaacatacttaattacataattaaatcacatttagaccaaactcaattataaactaaccctccctcttaattgagttttagatctcacaccaaactttttactcatttcttcaactcttgtggttgaatttcattttttcccccgtttccaattttgaattg

SEQ ID NO: 5433 - DNA, 2138 bp, Arabidopsis thaliana landsberg
attcgaatatattaagaattttatcatctaattattccaaattagtgcatgacaaattgtcatccattagttaccattgacatgcttttaacttttcttgttatattaaattttcataacacaattaagagggtcgatttcgaaaaggttaaaaatagtggagagttaccaatatcttgaaaagactaaagaatcttaaaagatgtgtaaatcagtgcacaccatcattttagactataatgtactccatatccttagaaattactactatttgcaaaatataattttattaattcatgtttgtttcattaacaatttgtactattattgtgaaacacctaaacctatagtaattagtcatacaaaacaaaaaaaagaacaaaatgtagttagtatttttgtaatggagaggaggaagcattaccagaaaaactgagtaatggaaaacgatgacgacgaatttacgcactaacaaagaaaatttggtcgactaaagttaggaagagagtaggggagctactctaatttcaatacactgggctccactctattcttccttcttcttcttcttatgccttcgtcttctttccatggcagagacacagattgatacaattcactcctttctttctgttttttcctttccctttctctcatctctctctttagctacttcctcctcccataaaccctctaccaagtaaactctcagctccaccattaacacatctcggtctcaattccgagctctgtattccaatcctttgttgcatttactttctgggtttttgtttattttgattttcttccatttgggtacccacccaaagagtaaagtttcaagctttcgtggtacttgctatgctttccctcacaaaaccctaatttcatatccttatccaattccatgttttgctctgctcaactctctgtttctacttctgaatcgtcgttttccttcatataaccaaaccaattctgttgaatcatcttggcacattcattgttttgagaaggaacagaaaaagttctgatcttgtccctattcgcacatcaatggacgataatagatctactcatagctcaatgttcggtgacctatcaacagaagaggtcacaagtaagatcattctcacagcaatcattgttctgttcatggcggttctgttcgtccttatcctccatctatacgccaaactctactggtggagaatagatcagctccaacagcaacagcaacagcaacagcaacaacaacagcaagagcaagagcaagaagaagaccaatcatccattgctccacctgtagtcactcgccgtcagcgacgtcgtttcatcttcgtcccaggccaagacgctctaagcaacactggactaacctcttttgaacttagttccttaccaattgtgtttttcagacaagatagttgcaaagatggtttggaatgctctatttgtttgtctgagcttgttaaaggagataaagctaggctgcttccaaagtgtaaccatagcttccatgttgagtgtattgacatgtggtttcagtctcactctacttgtccgatttgtagaaacactgttcttggtcctgagcaagctagctcaaagagagttgaacaagttccagacaatgcagaaaatgctggtaccaccaataacaaccatgatgctttgtctcaactttcaacatcttctccagaatttcccaccaaatgtcttggtatggggtcgtcaggatcaaagttagtaccggaaacaccaatgttgggactcaagaagacggtgctgctggtaatggtgcttctcagagtcaagaagctgttgttctggatatcagcgattcttccagtagaaatcataatgtatcatcttcgtcgtcatctatgaggtttattgttgaggaggaagaagcaaaatctccaatgacaacgaggttgaggtccttaaggaggtttctgagcagagacaagagagtgggttgtagcaatagtagtactagtaatagtagcagctccaatgctgttgcttctgttgatccttgaagattgtaattagcttagctgagtgagattgcctaaagatgtcaaactgtgtgtatgtggtctcggctctttattggctggtttgaagctttc

SEQ ID NO: 5434 - DNA, 3341 bp, Arabidopsis thaliana landsberg
attatcatttgaaaaattgaaaacaacaaaatgttgcaaattcgagaaatatacaaaaggaattattgtagaatttgaaatggaggttagattctcttctcttcttataacctcactctttcttggataacaagttcaaaaaatgtgttttaaattttaacactttacagccctagggcttgggattcccatgtatgccaagcgtggagacaccctcactttaggactaggccttggagatggaattggtccgtaagaattagctggtgaaaccctaggagacagactgacttgctccagtgcttgtgcttgtagctccattggataatctctaacacacccaattcttggaccatatccacttgtccatttacaagacagtctctttacaggatcaaacactggtctcgctctctcttctttctctgaaggtatctcaacttcttctgagacttccttcctttcttcttcttcatctgcagtcgatttgaatgacgaatattcctcattcacagaacatctctgcaattcagttcaacaacactcgtgaataaaaacattctcttgatgccaataacacaaatactaatctcataatatttatttccttaccttaacattggtgagatcaacattgtgctcctctaagaaacttatgaactccttgaagttgtcttctgttgggagataatgtccactatatggccatatagcctgaagaaacagaaggtaaattagacattttagtttacataacatattaagagaagcaaagacaggtagtttcttattcaagtacctcaaggatcccatcgcgggcgactaacctttctgctgcggttgtggcacctccagataagaaactagagtgctggaaaagacctttctttttaatccctaagtataagtttctagtagtattaagtacaaaaatcgacttggcttcctctgttgaattgatcagagtcatgccctgtttatacattagtctcccatcttctactatcacttcatatgcttctctctccatctgcaggtttcaaagaaacacagaggttaatgagtaatcaacaaggcagagctaactaattagtatagtcgagtcgaatcagataaaaaatcacaccggtcctaagtatctgatgcattgtttttgcagaacacttctagggtgtttctcaagatttacatctttgccgtctcctatatccaacctttagtttcaaatcagtgaaaacagagttttagaacacattcaaagacaggaagatcttaagatggattctggatttaagtccttaccagtaaaagaatggttgtgtgctcttgctcgctgaccagacatcataatagaagtgcaagttgtggccgtaacgatgacgtgggtcaatctgtaatttcaagagatggatcattagagtatattcaatgatagctttggatgtcaagtagggtacttgtctttgatatgaagttacaaagatatttaggttatggggacttacagcttcaagccaatgctgaagagctaatttctgagccttttcatctttagataagcctttcccaacctaagaaagtgagacccacgttggttttttatatgaaagagagatattgagctctactaataacaccttgacttataagtaaacagagataaattgatgtcagaccttagcagctcgttttctagctcgtgcccatttcgaaacagcggtctcatgtttttcttctccaaagaaagacacagagctcaaatccaaagctgcaccttccaaagtcctccacctacaacatttcaagcaatacaaagggttagtgtaaacatctttaaaagacattaaaaaaaaagacgaagatgaatcaagtaactcaccagagctcctcaacaacgaccgcacaatctgctaagttccttctggtcctgtaactcttgtacaccttttgtaacgtagttgcagctgcatcaagctcggtgacaggtctaggagagaagaacacaaatggctctggtggagtaactgtaggtttcttgatttggattctctcacagtttcttccattcaaagtgttaggcgttgacttctttgtctccaagacctcaaaatctgaatcagtcttggtctctttaggaacctcccagctgttgaaactcaacgaccgctccatagtactcttaggagaattctggtgcctattagtatcgtctctcttgaaactgttggttcttgatgtcaagcctccgtctttaagtttgaagcataaggacccaacttcaagacccatgaccactaatataacgaaaggataattccaaagtatatttaatatagaaaatcccctgcacacattaattaaacaaacagtagtcgcattaaaattagctataccaaaccaattatttgtctcattcaaacattttaacaaataaaagtaccttgtgtgggtatcaaacacaaaacaaacgttccttggtgtttgtttagacaagaaacagagaagcttgaaagaataaagaataaaagaatgatttttgttctttggagataaaactgaactagggatatgaatataatgatgactaagagatcttaacataaatataagtaagggtaggcagttgaagactattgagagagtaagaagtcttcgtttttgcaaaattgttgaatatggaaaaaatattacggaatattcaaagttggcgtgtttgaattgttgaatattaccaaaagagacaaaatagtgagaggaggctaactaggagacagagtatgtggggagccataagagatggaggctaacgaaggtaagttcatggaagttattgagataaggacaattcacataatctttttccaacattaattttgtcgttcttatttaattatataaataactacatatttagtacacaataattttaaagggtttacgtattaattatctaacggtgaagtttaggtcacacaatggttcatgtagaattattacacacgatgacacgaatgtcaaaatttgcgaggagcataaacgttttacatttgaaaactttgtatgcacttgtgttgacaaattaaatcttcggcatgtagacatgtatggttgcaataaaattatctgctatttcagagttactcaacgggtttacttttacatttgaaaacaagattctctcaaatccttacacaaggtctaagaagaggattatgaaagaattgaactagggtttaattcatcaaaaagtcaaacggttcaaagaaatacgtcaagttgtcaatttgcgaattgtccaatataaacatgtattttctatcttagaaatactaaaaatcaaa

SEQ ID NO: 5435 - DNA, 981 bp, Arabidopsis thaliana landsberg
agacacaacttagatcaaatccacaaaatgaaaggtttatttcatgtccaaagcaagtatggggacttacagcttcaagccaatgctgaagagctaacttttgagctttttcatcttttgacaatccttttccaacctaaatgacatacaatagaaggattcacatcagtttcttatgacatctaaacatagataataaattgtggaaatgatgtcaaaccttagcagctcgtgtcctagctcgtgcccacttcgaaaccgcggtttcatgtttctcttcttcaaagaaggcgactgagctcaaatttaaagctgcagcatccagagtcttccacctatgaaacatttgaattagtttcaacagcttgaaccacattactaataaaaaagatagaggaccatcaagtgactcaccagagctcctcaacaacaaccgcgcaatccgctaagttccttcttgttctgtaactcttgtacaccttctgtaacgtagttgcagctgcatcaagctcggtgaccggtcttggagagaagaacacaaaaggcgtaggtggagtaatagtaggcttcgttatttggattctctcacagttccttccattcaaactgttacgagcaggcttcgtcggttcaacaatctcctcatcttccttgttcatcggttcagtctcaacttctgtcacaatctcccagctgttgaagctcaaagaccgctccatacccgtcttcggagacttttcctgcgggttctcactcttgaaactgttggttcttgaagtcaagcctccttctttaagttttaagctgaaagatctggtttcaagaaaactctcgacagggttcttgaaactgaagaactgggtcgtcacaacttctttccaagcagacaagagcaaagaaagagaaagacccatctttctctgattaaacaacaatattaaacacgatctcttccttcaactaccctggccacgtataaat

SEQ ID NO: 5436 - DNA, 447 bp, Arabidopsis thaliana landsberg
aaaaagaggaacaaaaagaccaaaagggacttagaaaaaaaaacatgaattaattaacaaaggatgatgagaagagattgatgaagccttttctcatacctcactagcttaaagggtcataacattcacttcttggtgagttaagttgacaaggcctaacagtttacttgaactctagggcttgggattcccatgtatgctaagcgtggagagactcttaccctaggactaggccttggagaaggaattggaccgtatggtgacggaaaacgtgcagaaccaggcgatatccgaggagacaaactgacttgttcgaacgcttgtgactgaagttccattggataatctctaacacacccaattctcggaccaactccactgttccatttgcaagacagcctctttgcaagctggaacaccggggctttctctctctttctcttcttc

SEQ ID NO: 5437 - DNA, 2021 bp, Arabidopsis thaliana landsberg
  unsure (1)..(2021): unsure at all n locations
ctcttcctgcagaagaagacagctctcaagcatcaattcacatagttcaagaaaccaagtttgatcgtgttataaatatttagttacctgttcttgaaggctagtaatgtttcatcctcggattcatctgctgaagaatcatcatggtcatctttcagcatcatgccagcttcagacttcttaccacggggaagacggagaccaagttgctttaatttacgtgaaacctgggcagtagtatatgtattttcagagcccaattcactggcaatcaaataacaacagcgcttttcgtccttgaacctgcacatacacaacagtagaaaaacaatggagtcaataaaactcgtgcacagaagaaaaggagatgaaatttgacactcacttcttgtataattcctttataagcgtttcttgttctttgctaaaggagctcactctctttctggtgtttctgtttcaaaagcagtagaggagagccgttaaaatccaaaactaaatgagtgaagtttggaaattctgtaaactctaagagacactcacgaaggttgtgctaacgatgttgcatccaggtgatcagtatctccacgccgaagccttttccttgtttctagacctagctgtttaagcttgttggttacttgtgcagcagaaattccaccatcaggaaccaaattttcagcaataagccggctgcaatttttatcatctttgtacctacaaaaaaatattcattataagcaaccaattgaaccaaactatagcatatcatagctcatatgcagcaatctggagtttacaacttccaatgctcataaaatcaatgcttatactactaaattaagaaatagtgcactttatagagaatgaattgtgttatatttctttcaccaactacttcgcgcatcaaacaaaacatacctgtcatataggtctttaatttttatatccatatcgccatcaagaacaagtcttcgctttcttttagatggtcctgcagatttatcttccaccatgtcatcatcctcactgcagcatgaaaaagccacaagcgttagcaaataaaaatgaaaagtatctccagctgacataaggtataaacacaagtatcataaaggggagattctattctatcaagtgaaaccatttcttacttttgaaatccttgatcataagaaattacgacatcagcttcatcatcacctagagcatctgctaagcttctgtgagcccatcctttgtctgatgatgtaccaaattcctcagttcctgagaacttttcttgattacccatttgttttcttagatggccaagctcatgcaacatatattcagcatttatgtaatggcattctttgcgagtctttgagaagagaatttccacaaagagaagaggctgtgacttcattttcttcaacatatttctaaccagatctgtcaggaaggtaactatgttctcatagtctttgcagggacaaactttctgctcatcaaggatcttatggaatgttattagaagtgacagctgcaaaattaacccaattatgtattaaggaagatgcaaaacaataagaaataaatgtatcaatctgggagattatttaaaccctaacctgatacaacatgggagcgagctccaagtcttctgtaatccttcgtaaaatgcttattacgtggtgattcgtctgttttggattgcttttgtaaaacttaagcaacnnnnnnnnnnnnnnnnnnnnnnnnnnnnnnnnnnnnnnngaaataaatgtggaaaccttaaaatcaacttcatctgttgcagtttgctcttcgccatcagaagaatcatcactgccgctagacagatcatcaaccacattatttgacttcgggctgtgcatttgttgagtttcatcagtttcagtctctaggttcgatgcctctggtttattgggaggcacatccattggtccatcctctgttgaaactgttgaatcaaccatcggtatgctttttgctgtgctagcttcgtttaagggact

SEQ ID NO: 5438 - DNA, 581 bp, Arabidopsis thaliana landsberg
  unsure (1)..(581): unsure at all n locations
ctctcaggtttcaggacggttaaatattataatttttgctataaaagatatacacttttgttgggaaatctattgcaaaatatataaaattaaaacaaaaaaaaactaaaatcctaacactaatgaacattacaaatcaatgattgttttgctgtcctgcaaaaatctccaaaatataattatgtttgaaatttttcttgttttcacaatagcataacaaaaaagtgattcttttcaaaattgagttacaaaactacaccattatcttgtttttagcataagtaatggcgaaatttattcaagtacctgatttttaactttgacggtgatatgtgacgacggaatcaacggtttcttgtcagacgacgacatcgcttcgctttctattnnnnnnnnnnnnnnnnnnnnnnnnnnnnnnnnnnnnnnnnnnnnnnnnnnnnnnnnnnnnnnnnnnnnnnnnnnnnnntcatatcattaaatatcgataaacgacattaatgttggagataaattttgaatcatacgattaaatgttaaaccttttcgttttcagttcccatttatttttctctgtgggaatt

SEQ ID NO: 5439 - DNA, 2628 bp, Arabidopsis thaliana landsberg
aatggtaagagcaacggcagtgggggaaccgtcggagccggtgagtattatcacaatattccggttattatctcgttcaatcagaccgggatacagaaccacttggttcatgactctcaaccttttatcccttaaaaacaaaatgattttatatcaacgatcctaaaataaaacaaacggtatataatctaagcattatctttgatatacacatacatatatacgttgaaaataatttaaaatttacagtgcattcttgtattcgtaacttgttttttgtttctcttaattcttttttccttttgattttacggctttgtacaatttaaattccttggactgagactgaccatgaaaaatatgtacaaagatctccattggctattgactattgttacatgaattcattttgatatcttgtcggctgagatttatggactctgtagcacgttgtctacataagcgtaaaaactaaaacagataggaaaatgttgccaacatatagatatactatcaatatttaccaattaatacacatcttcatgatcaattttatacaaaaggtgtatcgggacacactgacactcgtataagcaataaccatgcaaatgcctatggtaaatccaaatgcaagtgtttttctcccccaaacgacaagtttattacaattaactcattcagcaagacagtatcttctttttcaactttcaccttgagatagactgatcccaagaattttaaaagtagtatttagtagtacaaatcaagcttttgttccaacggattctaggaacttaaaagacgaaatgacccacatgcagttttacttaagaaacctctctagttctttgcatcaacatccaaattcatcccttgtaggttaagcaaaagatcgtctgagctcaagtaaaccttgttcgccgagtttgctatggtctgtgcaatctctcttgcagcctcgatcttcctgagcgtgataaacgcttggttgtttgcaattgcttgaccaatgagctgagcactcttggcttctccctacacaagccatgtgaactttcgtcacacaacaatttcgctctcagagtttagattacaagtggaaatgtagagaatctctttacctgggcgcggataacagcacttctcttgtcttgttcggccttctcaacaatgaacttagcccgctcagcctcttgagccgccacctgctttgcttcaatggcagctgtgaactccttcccgaatgtcaggtttgtgatggacacatcgtcaagcgcaacattgaagtttgctgctcgttcagtcagaatcttcctgatctccctactgaccgcctgagagaagcccggaataaatctttaagaacttcacttactaagaaagagaaaaaagatgatcatatattcacagtcatttgtatacctctctctgagtaataagctggcttgcattgtactgagcaaccacagctttcaaagtctcgttgattatagaaggtagaactctctcgctgtagttctcaccaaggcttctgtagatttcaggtaactggtctgccatgggacgtgtgagaaccctaagcccaattttcacctgaaagttttaaaaccacaaaaaacttaagagcttatgatgttgaagcgaacgacttcacattcactaaattcacaaaacaaaatgactgaaaatgggaggagtagaagcagagtaccatctgaagatcacggcttccggatgtactctcaacaaggtaaggtcgagcacgaacgtcatagatgaccggcctttcaaaccaaggaatcataaggtgtgtaccctcagggtaaacctgcgtaataacaaggttacaagctacatacttgtgaattaagaagactgtttttacgcttaacgagaacaacaaaatttcatgactaatcagtctcagggattaatgaacaacatatgagactttaactaacaaatcaacctggaaaatttcatccaaatctcacaaacagcaaaaaaactcattgggaaaatacatttactgaaaatccaaaaagacccaatttgaagaaacactgactaaccttatctttaataccgactaaacgattgaacatgatggctcgatgtcctccttcaacattgtagagactgtgcgtagcaccatagagaccaagcccaccaataatcccaaccttaagcaacgtcgaaatggcaccaccacctggtatctttggaactttgacgttgttcatctctttttctgaaacaatcccaatacatgattaatcaaaacccatgtgtggtggaaaaactacacaaacatacactcaaaatccagactcacatctactcaattatgcaacttcatcatgaaaacatcaaaaacagtcaaagtaacaaaatcaagtcagattcagcacacaaagccagtaaagatagaaaatttaacgaacgctcatgctaagctgcgcaaaatacttcctaatcaaaacagtaacaacgagtaattagcaaaatccgagcagaaaactctcacccacctccgaaattcacgtcttcactaaaattttcgaaaggaatcgatcaataccaacccattacacaaaatacataatcaaaatggcgagaatcgtacct

SEQ ID NO: 5440 - DNA, 964 bp, Arabidopsis thaliana landsberg
tctaacggtattaagaatcattttgatcctttttatagatgactttgaaccattgtctagttttttaaactttatgttaccttttacacatatttgctttgttcatcgattgcgttatgtctgtcacctcctgaaatttgaattacatgatatgcagaaaaaatctaacatttattaactatatgtatcttcctctagaatccaattaaatcagaaataggatacaccaccgtgaaagaggaatttatatatttatatctaatgtaggttaagagagcttaagaaattagcaattgattgaatgtagtgcaataaagataaactttaattaaggatataaatctaagaaaatatattcttaaaatagatttggtagggactaaaaactaattattatttacttttggactaaaatttcgctggaggatattttatgcagtaactcaattataattattcacaaatgggatgttaagaaaggaaaatatttatgtaaatgtttaatgttgattgatgatttgtaagttttgtactttaaaatattttgtttagatattttttgtagggattaaaaactaaataatatttacataaaggattttttacaaaagcttcaccaaaaatgtataggtagaaatattattttgttcaggggttggtaacacagcttatgacacaaacttagacaaatatacactcaatagtatctctcttcttgtggacttgctggttttggaaggcgaggaacgctctactcttctccacttcctcgttcacggagaatgaaatagttgacaaagcttaggctgaagcgaagtgttgtcaatcagctcaagacaggacgttatctcaagtatttccatcagtaaactctagagaacacttaatttcttcttcctctgccccaatcgtgtgttacacagatgctgcgtggaatgcaatctcttttaatgctggtctcggc

SEQ ID NO: 5441 - DNA, 1386 bp, Arabidopsis thaliana landsberg
  unsure (1)..(1386): unsure at all n locations
tccggcggttccccactgccgttgctcttaccgttaccgttgttatgatgaagatggtaatgaaggtggtgttcaccacctccaccgaggccgtggaggtaaggtcggtccttagcggtggctgcagcagcaacggagccaccgcattgacgtggttgagtctggtaaaagactttggagacgacgagctcaccttctttctcttcctcgctagtgccaagatgatattgatgcattacccaattagtcttctcgggttttttttgtttgccgtagtttgtgtagagcactaggattttcttgtagcctctcactcttcctccagcaagaactggccgtgtttttcctgtcttgtgccaccgtgtctctccaccgacgtcagaatcagtgtggactttacgtcgctttcttgttcccgtcgtgtatgccttcgacggtcggtggaagaaatgacgcaccgtcccgtccttgttcactcctatatatgtattcaacgactaattagcattcatcaaacttaatttaattaagaaattggattagctacattttctttttctatatgacaatttccatcgtattaaaatatgattaaattgttttttcaacgtatttttgtagttttcaataagcataactagaagatcatttgaagacggaaaatttgtaactatagtctcaatttgtaaccgattaattgatgattgaacatgcaacatagaatcacctggcaatttttcaggatgggtataacaaatgccgttttcaccatcgatggtacggataaactcatcaatgagaggatgaagcttttttgcgtcatctcttaccttgccttcaagatgctccaagacctcttgatccgtcggatcaaattttactccagcaggaagtcccggcaagtcatggatcccagcctacattacatattaatatattatattcaaatatccaatatcatctaaagtttaaacttgatataggtagaaagagaaacaagaacctgttcgtgaaacttgaagttatggccacaagaagggcaagttttgtgacaagagaccggaagtgaggctacgggggactcagccgcccccggggagggaatgattctttcaacggtctgaacatcgctacggtcattgcaccaagtcatgttgttttgtgtccctaagtttaattcttcttgtgcatatctctcttctcctctcttcttttctttcagtgctcacaacttcatcagaataaacaaaggtatgagggagaaatagaaagagagaagggaaaaagggttaaagatagctaaagcatatgtttcataagaagatctctntgaggttatcttgagaaagaggaaggaattaaattctagtcatcacttttttagct

SEQ ID NO: 5442 - DNA, 1298 bp, Arabidopsis thaliana landsberg
agctgaacaggacaagagaagtgctgttatccgcgccgaggtgtgaaaagtgtttctctcttttctagctcattttaaaaaccggagattgtgttaaagcttgctttttttttttcttttttgttgtgaactattttaaagcttgctaactgatgtttctgcatgggtttatgtagggtgaagccaagagtgctcagctcattggtcaagcaatcgcaaacaaccaagcgttcttaacactgaggaagatcgaagcagctagagagatcgcacagaccatctctaggtcggcgaacaaggtttacttgagctctaacgatctgttgcttaacctacaggctatggaccttgatgtgaagccgaagaagtagagaatgatatgattaaaccacaccagagctcttcttccataatcgtattttcaattcacggattcttagaccaaaagctatgagttctatcttgtgaatttcagacactatcgtgcgtttgtagtctttcttttgtgagatcaagaagaaaagaaaagatttatgtttttacaagttgtttacatttggtaataatgatgttcacaaagctggaaaataggctgtgaaaaagatcaaacaaatgggcctgaaaatgagaattgggcatttggcctaagtttggtgaaccccgagagacacacatctgggtttaacgacgttaggtcggagccaatttgattccaccaccacgagcttcctaatctagctttaatggcgtttcatggaatcagagaagttgaaaactattttataccttttctacagcgagtcaaaagccgaaatgaatggaagaagatcaatgcctccatcatcatacatggattatcacaaagcagcttcatggtcactaaaatggtggatttttgtgataagattgaagatatggattatgcaactcgtctttttaaccaagtatcgaatcctaatgtcttcttatacaattctataattcgtgcttatactcacaattcattgtactgcgatgtgatcagaatctacaagcaactgctcaggaagagctttgagttaccagatcggttcactttcccgtttatgtttaaatcttgtgcgagtcttggatcatgttatttagggaagcaagttcatggtcatctctgcaaattcgggcctaggttccatgttgtgactgagaatgcattgattgatatgtacatgaaagttgatgatcttgttgatgcacataaagtgtttgatgaaatgtatgagagagatgttatatcctggaatagcttgctttcttgatat

SEQ ID NO: 5443 - DNA, 973 bp, Arabidopsis thaliana landsberg
  unsure (1)..(973): unsure at all n locations
gatgtaagagtcctatattaatcattaacttcgatcagaacatataaaaatcgaaactttaagaaaacagagacattactaataagtaataaataccttccatgaagaacatcgataccatcttcatcagagttaggccaaatatctaattcaataactctaacaccttttttcaatgcctcaatgataggcaattcactgcaatcactacttagttgattacctgttaaatacgaattatgtcctgtatatatgaaataatgtgataatggagcatccatatcttgatgcacctgcaaaaatatattcaacgatcaatctctctttaaatttatcttcagtctcaatctaaatttcaatctaaaatcgaattacctcaagagaaaaaagagggagagttggtaacagagaaaaggtatttgaagaaagcatcaaggtggagaccattacgatgaagaagagaagaagaagcattgacgatatcttgagcttcttctttcgtggctttgtcttgtttctgaacatcgattaggaatctgaggaggagatcggtagtcatgagacctttgtcggagtaattgtcgaaaagtgttttgatctcaggaggagctacggacacagtgtgtcggtacctccgacggaaacagaaacagactttgtatgtttgcttcgacatttgaacaattcctcaagtgtaatttgatgattgaagaagaagaagaaatgatctctgcaatgtttagggatttgtctttttgatcggacttgaaattttttagtttgttttctcgttggcggtttgattgttaatagtgactttccataaaacttgcgatgtgcagaaatgagtttgcattacgtgttatgacacatttatccacgtggattttttctttaggtcggcagctttttttttgtcattaagagttttttacttctttntaatactcttaaattaattaactagataagt

SEQ ID NO: 5444 - DNA, 687 bp, Arabidopsis thaliana landsberg
taacgaacaccatgaggcttttttcttttctataaaacttttagtatacagtattttttcactgtttgtatcatttttatggagacgatgattcatgtaatcttcaggtttagaacaacagatcagagatcaataagaatcaagtaacacacacacacattgtgcctaatatcttaaagatccgattgaaacaaatggagacaatgtgtaaattctagcagcgaataggtgtagacgatgaagtaaagtctgaaactttctttttgattaaaatcttaaacaagtctgaaacataaaaggaagcttatagtaagaacaatgtttgcaagagagaaagggagagaagcaagaaacagagtcgcattgtcttcaaaggcaaatttacttagaacgctgtctcatctttcgtctcttcctcttaagcctcctcatacgcttcttcttccactgcaaaagaaaaacaaaaaccattcactaaacccaaactaggatcatattgtatggatcagaattggcttctactcacccaaaaaaaaaaaaaaaagaggcaatgatcaaccataaaatttacatagtaggagagatcaagatagtgaaattgaaatcgtaaattcaacaataacccaaaacttgattaaaatcccaacattctcttccatcaaggtcaaatcacacataaaatgatat

SEQ ID NO: 5445 - DNA, 643 bp, Arabidopsis thaliana landsberg
acaccattccctcaattaccaaacaaggaaaacgaaaaatcccaatccaaaatctgagtttcttatatcaatcaatcatagtttacttcagattctgaactcataaaatcgaaataacacgaaaattaccttatggagagcaagaggagggttattatcaccaaagaggtacttgaagaaagcatcaagatggagaccattacgatgaagaagagaagatgcagaattgataattgactgtgcatcttctctggtggctttatcttgtttctgaacatcgatcagaaacctgtggagatgatcaacggtcataactccattctctgagtacttttcgaaaatggtcttgatctcacgcggtgcctccgatgcagtgtaacgaaacctccggcgaaagcagaaacacactttgtacgtttgcttcgacatgaagtaaagaaaaagacggatctttgggtaatgattggagacgatgatgaaggaatgaagtagggtttgtgtgttatataatcagaactatcttctcattgtttttgaaatcagacaagcgagatcagaatcgtcgttttgcgtgtcgcatctgcaaagacaaagagatttttttcctttctttctagtgaatctcctccatgtaatgtttaat

SEQ ID NO: 5446 - DNA, 387 bp, Arabidopsis thaliana landsberg
  unsure (1)..(387): unsure at all n locations
catgcgttgccttgtatataataaaacattatgcatnnnnnnnnnnnnnnnnnnnnngtaggtatcaatagtaagttttgctacggtaacggcgttatacggagcactagccatcacaggagcgaagatgtttcggaccaagtgtaaattcccaaattaccctcagtctttcgaaacatttagtagttaccaagatcgctctttgggccactgtactaaccccaatgaccaaatacgccttagagttcgctcctttggccatccagctggaacgtagccttccttcgaccatgactgatcgcaccaagcttgtggctcgcggtcttatgggatcagctctgttgctggtcattctcgcattggctataacagacccttgcagcggtt

SEQ ID NO: 5447 - DNA, 706 bp, Arabidopsis thaliana landsberg
atcttaggaaactctcagggaagcgaaagctgaaaccttgaaactaaaggggaagatgttggataaagaaactgagtttcaaagcattgctcatgagaacgatgaactcagagtgaaacaggatgattctctgaagaagatcaaggaactatcggagttactcgaagaagcattggccaagaaacatattgaagagaacggtgagctcagtgagagtgaaaaagactatgatttgctgccaaaggtggttgagttttctgaggaaaatggttatagaagtgcagaagagaagtcttctaaagtagagaccctcgatggcatgaacatgaaacttgaggaggacaccgagaagaaggaaaagaaagaacgttctccagaggatgagacagttgaagttgaattcaaaatgtgggaaagttgtcagattgagaagaaagaagtttttcataaagagtctgcaaaagaagaagaggaagacttaaatgtggtggaccaaagccagaaaacctcgccagtaaatggattaaccggagaagatgagctgttgaaagagaaagagaagaagaagaagaagacattgtttggtaaagttgggaatcttctcaagaagaaaggacccgtgaatcagaaataaatgaaagcatctcttgattactacactttttgaggtattgcaaaatctagctattacatatacacacatctt

SEQ ID NO: 5448 - DNA, 509 bp, Arabidopsis thaliana landsberg
ttggaagaaaaaaagaagatcttgtcagaactggagagcactaggaggaagaggagaagagtaagaaagcggtggagagtttagcttcagcattgcacgaagtgtcaagtgaatcacgtgagttgaaagaaaaattgctgagtcgaggtgatcaaaattatgaaacacagatagaagatctgaagttggtgattaaagcaacgaacaacaagtacgagaacatgcttgacgaggcgagacatgagatcgatgttcttgtcaatgcggtagaacaaaccaagaaacagtttgagagcgcaatggtagattgggagatgagagaagccggtttggtgaatcacgtgaaggaatttgatgaagaagtttcttcaatggggaaagaaatgaataggttgggcaatttggttaaaaggacaaaggaagaagctgatgcatcatgggaaaaagaatcccaaatgagagattgtcttaaagaagtggaagatgaggtgatttatcttcaggaaact

SEQ ID NO: 5449 - DNA, 7327 bp, Arabidopsis thaliana landsberg
atgacagcagcattacaggagtaaacttaccgccaatggaatgcccagaattgtaaagtttaacacagcagcaaacacgatgctggcaggaggttgttcatggccaatgtagccaaggtgagacgcaacaaatgaggtgattatcattccaagaaagcaaatagccattaagatatttgatattccccaaacaaaaccagccccccactttctgcaaagtttctccatgagcaccgaagtgattccaagaaaaacagaattcaacatcaaaccaagtgcacccatactgaccccagcactatatgaagtacctatgttcggttcaccgccatagatctctcgacccatccaatcagtatcaaacagaataaatggaaaccaaccaatccatgtcaatgctgtaacaagcaagattatccaaacatttcctggaaaatatctgaaagttccaaatatctcagaaagaaaagcttcgtctgttccactggtttgcccatgtgcttcagaagtcaatgaagcaagaggcacctcatgagccgctgaaacgcttaggatcgtagttattgcaataaagacaacatctatgtagaaggcagacttgagattggcacattccacattacatgcaactgtcttcgtaaaagtgaagatcttgggccaaccatagtatgatccaggagcatagccaagaacattgccaacagccataaagagagagaagtagccatttgccacccgggttctgcgattatcattctctgaaaataaagcaataggacaagaattaaaacacaacatatctttgttttcactccatgaggttatcacacaatcgtaggctacgattaacttcaccaaaatccacaatttgattcacaagaagggaaatagaaaaaacgaagtttctgtgactcaacgataagccaccgaccagaaacaaagaagggaccttttgattgctatggaccaataccccaaattgtatccaaaatcacaaatttgagcatttccatgttttgcatgtgagtgtataatcacgagaatcccaaattcactacctttgacccaatcaacaataaagtcaggaactttaccagtaagatcagcgaggagagctctacaaggaccttgagtcatattattagcaacatcaagaatccaaaaccctaaaacaaaagcaacaatcgccctcggcttaatcttcccttctctatccccaaatgcccatccaatatccgccgcatgaccaataaccataacagagatagaaatcgccacagctccggcgacaataaacggtctccgacgaccgtacttactagtacacctatcgctactatgcccaacgagcggttgcacgaacaaaccagagagaggatccccaagccaaatcacactagcccaagcgtgtgggatccctagctcttgaacgtaaggtgtgagaagcgaaagtgaagcgcccatccgaattgaatcccgcatgcgacggaagctacacggagaagcacacgcttcgaaacttttgatcgaggaggaggtacaacgggacgagatgatgaattagagggtcgaggtattggtggacggttgcgagtggctctgtgacggcgatctgtatcggaagtagccatttctcgcttcacagtcgtcgtggcgttgagagagtgaaaaagcttaaagtggagagaaaaaggtggcgaagaagaagatgttgtaagaattccattggactaaaggaatctactttaggaaagttgagtgctttttataaattgttttaaatttgttggggggattttgcaaataatgaaaagtgggcacgtaaaaagagggtttatagtgtaaggtttgttgtttctctatggataaaatacatatttttgttgaaacgaaatgattttgtgggagcattcgtcattttctgttggatcacggggcataaagtaagttccacatacgtaagctggaagaagagacgttgagtactcaataacactatcaatatgcagttttgtgtttggaaagaaaaaataatgtcatctttattcaaagaaagaagagagaaagagtgtgattaagcaattttcaaatgcatgtacattttaacatctacatagacaatattcaaatattttcttaagatgtaatttggttaaagtccgttgttttaaattttaaactaataaattacttaatatggaaattaggtcgaaaggattgagcgatcaaaattgttgaaatacggaaatgacgttattgtttgttaatgaagcttgggccaaatgtgagccgtacacgtaccgcatgattcatgttatactgcttaaacgtataacacgaaggcgccaatttaccaaaacgtactctaaaatggcatctttttatctttacttttagtcttttaggcctaatcatgttttaattagggtaggtgaaactgatttttatctttgtttttgctcaatagtttagtatgcacttgattgggttggaattcagttttgtaccaacatttcgttcccctttttatgtagttgctcactcgaatcatgtttaggtttattatggcgatatgaaattgtaaggttttgaataattggactattttttgcgttcaattactcaccgggtcaaaataaagaaaaacggatgattccaccatcatctaaggcaaaatgattttattgcaaaaataagaaattgagaaattctcattgcaaaaatggcttatagagaaacaagaaaggatgatggcatgcaactgaaggccctatccattgaaggaaactcttgtgggctgaaccaataagctaaataacttaaatgaggaagaacaaaaacctaaacatgaaggcccgtttctccttttaatgattttattcgtataaccgccttaaaaaaaagattcaaatgaaaacaaaaatgtttgattaaaacttaaaaggccgcaaaagaaacacggtttgtgacgaaaacgtggccgcgtaagcaacgagttgaaaagtatccgcgtccgtgcgttgcatagccaactaatgcccaccagctccaaacattttccaactctctctttttttttttttttagttttgcaaaacgtgttttctcagttatttgtcgtcacttcttttcatctaatttttttgtcaaaaaaatttgttgcctcttttatctttaaagcttgtattgttttttaatacgtactttatttctcatacggtagttctgagaaaatggtaaaactgccaagcatttgcaatttttgacgaggaggaattttaagtaatagagagaaaaattctattcgttaaattcttacaagaaaaaaaaatcttataagaaattatataattatctcatcaggtttttaaatgaatttgaactctcaataaggtgtactctaaggactgatttaaatgaacttatagtatcaacgtgcatattccaatttttttttctttgacatcttttctttttttgtccgttattagagtgatgaaagaatctgttgattgaaatatggttgctcgatagttaaagaaagatcttttcgaaggaagtatgagacaactacatggaaaagaaaaatcttaaaataatgtagaaattttcttagtaaagaagaaaagatggctcgcggcataactggagcatttatgaactgttggtttatttggtttctattttgtaaggacatgttcctttcctgacatatgtcatcttctttacatgacgtgtgcttcttattttaccaacatgtgtcggtttcctcttcagatgttattttaggtcattccataatatcgagatgcgaccctgacagatatataattccaactggaactagtagtactaatagatacaatttcagatataaacaattttaattataaaacagactaaatattttaaagatttttaatgaacacttgtttctaaaaaaattaaatttctctaggttatagtcctgctttttgtcgattctataggttataatcaataattaccaatttatattttattttcatccatattaaaattttatactattgtttaacccaacttgattctaaaaccagagttgaataacaacagcaaatgatgataagacgctgctctgattacacttcactccgacaagacaaaagtcacaaaaatccatttcgcccgccgacacatcgtcgatagaccgacatatcgtaaattaattcctaaaagatttttcttggtcaagcccaatgtagtagtatataaacattcttgcacaacgtacactcacagtccatacttacttagtgactactccaaacataagaaacatgccaaacactagcagctctcaaagcttcactatcttcgttgatggttggttaatccgtcacaggtatttcgttgaacagcttatgtgtgcttcttccttggatgaaactaaccgtatctctctcgaagaacaacaatctcttgtggcccagtttctatctcactgtcttcaatactaccaagagaaattcgcctccgtttccctcgccggagacaacgttttcactttcttctgcccaccgtggtttaactcctacgctaaactcattctctgggtcggcgattttaagccttctctagtctttaaactcaccgaggtctccgtggccgacctgacgcgccaccagagagaccggatctcgagtcttaagtcggagactaggaggaaagagagagaagttatgcgagatttcgccctcgtgcaacaaagcgtggcggatccgccggtgatgctcgcggcgaggcgcgtgggagcggtgggaatggtggacggagaagaaacggatttggaggaggcgatggaagtgcttaaagctgggatggcggcggcgatgaacaacgctgatcagctacggtgttcgacggtggggaaagtggtggagattcttactccgccgcaagcgattaaagtgttgaggacaatcggacagcttcacctccgtctgagagacagagaccaagaaagagcttaaaaaaaaagatacttaatttgctttgctctgcttcttcaacaacgatggagtcatcactaatttttgtttttcgggctcaaccacttgatcctgagatttagatttccttttggtgatttttgatttttaaaagatttgagaattgggcttttttgtttgtagtgatatgatgtcatgttttttatttttggcttctcgtttcttccttaaatcagttctactaaatctcatcagttacttttacaatcagaccaaaaaatgtcaaaagtacacagtacttgctttcaaaatcctacgtagcttatgatgtggtcgccatgtcatttacagtactttactaacttgctgacatgtaattgtttaaaaaatattacttttattccatttatcaacacaaaactgggctttaaagcattgggccaacaacagtgaacaacgggatacaaaaagagttcgtagttctgcaaatcgaatacagattgtatatttttcaagtccaatatttcaaaagatgcttatttttcttcgctaaattggtcaatgttattgttaggcatgacgttgactttagaggcttcctagagattgccagctgagggagtaaaagtcagttttgatgggctttttcatactttgataagcctaagaaaataaacaaacagctgcccaaaagaaaaacacacaatgctctaattgaagaatggattgaactatttttaatccaagtctagtttacatacacaaaggtattgtatgttgtaatagattcgaattttccacaagtctatctaaattgtgggttgagtcattattctttccaatttagtgaaacttaaatgattatctggaaacaatacatgattatgtatactaaaaaaagaaacatatagctgctactaattttaaacaattacagaaagaaggaagaaaaagaacaattatgcaaaccaaggtattgaacaaacgttatgtcaatgcatcaaattactcaaacgaaacgttaagcataataaataaaacttgttttttcttttcttttcttttcttcttcttcacgtcatgaattgtgtcctaaatagaagctaagcctctcagatttttttcccggataatgtgtagcattacacgtatagatttttcaatttaattttctcatacaaagattaagattataaaaaaaacttggcgttgaaaaataaaaaataaaaacgtgttcaccacccgccgagttagattccgttttcacatacataattagaatttttccgtccaaattgtttttggtcaaagcctcaatggtcttgaattgacccgttcttaaaacccgacccggatccacctgcttctttcaactaacacacgctcatgatccaaaccattttttctcatttttcaaatcattatcaactctctctcttcttcaacgatcgcataaattccctctttgtctgctcgattcctgatctctagggtttgggttctggagacgaaggggggtgttttgtgtataactgagaaaattgagattattgctttgtaaaactcaaaatctatggcggtttctagcgccttcgttgttacaccgaagctagagaagttgctatcgaatcaccataatccaacgtattcttattctccggccccgttggatgtaattgggattcgtgctcttccgatgaacaataggaacaagcgaggtctgatccagagagcgcgttgcgagatttctccgtttaataaggcagctagcatctcagctctcgagcagctcaagacttctgctattgaccgtacgaatttctctacttttcaaatgtttgaattctagatttgaatttgatgatgggtttttgttaatcctgcctctttgattgccaattttgaattttgaagctattcaacatgttgcatgatctagcttacccaaagatgtatcttttgactttaaagcaatcttctttggacatttgttaatatctatcatcattcctgaactttgtttagttgcatatgaataaatactctggatttagatttttggaggtgattgattgtatactttttgaagctaaaagctctgttttactgaactcgattcttttttggtaactaggatacacaaaggaaagaagcagcattgtggtgattgggcttagcattcacacagctcctgttgagatgcgtgagaagcttgccattccagaagatgaatggccacgagctattgctgaattgtgtggtttgaatcatatatgaagaacgttgctgtactcagtacctgcaaagcaatggagatttatgctttggctctatct

SEQ ID NO: 5450 - DNA, 1038 bp, Arabidopsis thaliana landsberg
tcgcccataatattaataaataccccttaatcttcatccgccaaaaacctattcaaagttttacacacaacaataatgattttaagagatatacgtaaccttagtatttagcttagtgttcaactcaatctctatagactatagtaaaaacaagcttgcattattatttgttccactgttattagtcaagcgaaaacataaatgaaaagcaaaaaaagaatatttatatgactccattcaattcactcttttatagcaatgactacgatagcctctcatcttcttttttcctctccatcatcttctcttatcaactttagactcacaagcctcctctcatcttcaccataaccgaaaaaccaaacaaaaaatccttagataatcagatcttgatattatggatcatatcatcggctttatgggcacaacaaacatgtcacataacacaaaccttatgatcgctgccgcagccactaccactacgacctcttcgtcttcctcttcttcctccggaggctcggggactaaccagctaagcaggtacgagaatcagaagagaagagattggaacactttcggacagtatctacgcaatcaccgtccaccactttctctctcccgttgcagtggtgctcatgttcttgaattcctcaggtacctcgaccaattcggcaagactaaggtataacatatacacttacatatgtgtctatctatctcttacatcaaaatactctttttgataattttccattgatatagaaccaaatgaattgaaaccctatgtctaatttggttctttgacctaaaggctaaaacgtatttttgttatatatagttgagaattggattcttattgatcttcattaattaatataatctcacttgggctctatatctttcatatattttcatctatcaccgacaaatagtattgcaacatgattctgaattttgtttatttaaaagttactccatcattattagcaaataaataaaatatattgtctatgattcttactgtgatgatgatatcta

SEQ ID NO: 5451 - DNA, 1559 bp, Arabidopsis thaliana landsberg
  unsure (1)..(1559): unsure at all n locations
tcaccatgagtctcaacatagctttttaatatcatatcttcttttggtttccacaaccctctcttcacgtaagacttcccttcttctcttttgcattccatcttttattttttcttccacagttttgcaagtgagtgaggctgtttattaactatatacacaaaaagtttgaggtttccaactttaactcttacatgtggggactatctactaaaattattgaagcgaaaaagagaacagtggtttgcacttttccgacagtaacactactgtaaattcgtgcaaactagagctgtaaaagctctattcccttgtttttatcctcaacattgtcacaaattattggcttttaaggcaaacatataagcacgggagannnnnnnnnnnnnnnnnnnnnnnnnnncgatacatgcgttagtccattgcattgcagatacagtttgtgcgtttacagttgttgcggtttcaaatattctttctcgctcgagaatgcttttccaatagtcaagactagtgtataagggataacaaatcaatatctaaaaaatctaagaacgaaaagagaggtatatgtctaatatacatatttgagtgatatatgcatctacgtcctagctagttcttagttttcagattttaatattatggaatttggtaacttacatttaaaaagaaaacacgattcaacttattttcttttttaatatgatatcataagatacaccacgattaaaatctgaaaattccatataggtcaataactttcgaaaaacattatagtaccaaaagataattattacaacaagaaaccatctttttattttgtgtaacttttgtttggctcacaaagggcattcaaattttagtacacaatgacatgcctagatctcattgatgtaccttcctataaaaaatgaagactgaacaaaatatgtggtatcatattcgattcattatatccactttgatccgatccaaaaatctgtataatcgtaaatttgcggagcaaaacaaataataaaatttaatatgtgccaaatgtgaaacatataacaaaaactaaaataccaaattggaatctttgaatatttcttagtaaaatgtagattacttttagtaggagtttactctgtcgtatcaaacagcaactcatgcctctagttttgtttgctatcatcatcattgttattgtctttcatataaaataatagcattatgactactttctgactgataaaacttcataattgcgtaatcattttcaaacaatgtagttagatctttattaattttcgaacaatttatctttgtgttatacgtatgacccttattaattttacatgatgcatattaaccagaacaattgcaatgacatatatgtttatgtccaaaaagtttgcaaaaacctcctgttttgcacccttcaatacaaaatttccagcatttcccatccttctcagcatcatcatcgatgcctggaagacaccttctaacactcggatgttctttacaacatatcgatttgtcttcaaatatccagggtgcgatgtgtttgtgtc

SEQ ID NO: 5452 - DNA, 3508 bp, Arabidopsis thaliana landsberg
gttattcctcaaagtagatatatattttttttcttcttgaagttaatattatatactatgtaattgcaagtttttggtaaaattgctataattaattatttgtatttgtgtgtgaatcatcattggcattttgactaaaacaccaatggatatgaactttgtacttgtcttatttgtattattgagaatgatattttgcataaaagagaaaaactatttgtaaagtatatgagaagaacatgaggagcatatataggagtatcatcaaattttcttttacatatataaatatatcactaacatgctctctcaaaatagagggatttgtggaactccaatcttgtcacctataatgagagtgaaccaatgtcgatttagtgacttgatgaggctatttgctagttaaatcaattgttggtgttagccatttatggcaatatgtttcgtccaagaatgaaacactagatttgtgaagaggtaaatcataaatggcttcttcattgtcaaatcaaataccaaattttgtaagcagagaatattcctcaattgagtcggatgttgtgtttgctattgaacaatattctacctcaattgtgaaaatccatgataaattttacatttgttaatataattattttgacgtcgaatagtttactttctattaatttacaaacttatttgccttgaatttttttcaaaaaataaaataaaatagtataccttaaaaaagtctctaatttttcagtaaccatatgattaatgaatacttttatgttaagaataagatttgaataccttactttctactcattatcattaaaaagtaaattatatttattatttttgccaacaatgtattcaaatttaattgttaaataatttcaaaatattcaaatttaagattcttaattcttcttttgcttacatacaaaaattcttctcattcattgacttaaaaattcatctaaactcaaatcaccaacttatattgttttgttaattaaacgaattattatttatgtttttttaacgataaataactaaaacaatcgcagcatggggaatctccatccaccaataaaatcatttcctaatttttgacttttaaaaccttttgacaaaaaccagatattctctcccatttccctcaatcatccaaaccacgcgccgcctctaatctctcacgcgccgcggtccgatttcaaatcctccatcaatttctccatcccctcttctcgtttattcatcaagatctcacaaaatccaaatttaactatagggtttcaattacttcgatcaaaaggtatctaatttatgaattagaattcatcatcatgggaggtgttacatcatcgatcgctgctaaatttgctttctttccaccaacgccaccgtcgtatgaggttatagccgacgatagctgcggtggacgtttatacataccggagattcctcgccgtgatgatgttgatatattgaagcttcgtactcgttgtggtaatgagatcgttgctgtttatgtgaaacattcaaaagctaatggcacgcttttgtattctcatggtaacgctgctgatttgggtcaaatgtttgagcttttcgttgagcttagcaatcgccttcgcgtcaatcttatggggtaaaacatttatgttattgaatcttaagacattatgcataattggtttgttacagcttcgaagttcagacattttgtagaaagattactactttgctttgctttgtaaagatcagtgctttagagcttcaaagttgagacattttcatcgaaaaactaagacttttctttgtttataatttgccccaaaactaggatctgttgatacattgttatagacatgtaatgaattgttcgtgttttaggttttttagtaaaggataagtttttgagaatttaagtagaattggtttttgtggtcttatagtaatatgttgttagaagaatcaatccatgtaaaacaaacagtgtgttatagtttcaaagtttgtgcctttaacctgaggcaattaatccatatcagtcacactttccctatgcttgtcattgccaaaactaggatctgttgttacattttgttataatgtgtgacttaacatttcaactttcctttcgtgattgattcatttccatctaaaggtcttctatgacttgctatcttgctttcgtcaccgttgataaattgtttctcatatattagtgactgttagattgttttctaatgtgttcatcggtttttctttctcaggtatgattactctggttatggtcagtctactggacaggtgtagtttcgagattactactctgtgttatgaaatatgaactttcatggattgtttctcattgatatagacttggtatatgaatcaggctagcgagtgtaatacatatgctgatatagaggcatcatataaatgcctcaaggaaaagtacggtgtaaaagacgatcaactgatagtatatggtcaatctgttggtagtggacctacggttgatctagcttcacgcacacctaacttaagaggcgtggttttacagtgtcctatcctgtctgggatgagggttttgtatcctgtgaaatgtacatattggtttgacatttacaaggtgatttactaaacatcaaatttgcttctgattacatatatagcttctaaaatggcgcaatttcatgtttttcagaatattgacaagatcggctcagttacctgtcctgtattagtaatccatgtaagtgacaccatcatctgacttcttgcattgctttggctttgagtgtgattgttataagacaggtcactgaactctcttgttggtctattagggtactgcggatgaagtagttgattggtctcacggaaaacggctctgggaactcagcaaagagaagtatgaacctttgtggataagtggaggtggacactgtgaccttgaactctatccagatttcatcagacatctgaagaaatttgttgtatcacttggcaacaaacaagcagagcaagctcccacatagcgagatagctgatatgtttgaaatgggttattttcagagaaggctagacagttggctacagaaagttcaaaagaaagtaataagcctgagagattcaagatgagagtggtaataggtttagtcattaaaagataaaaaaaggtctagtctggtgacacaatgggtcaatctggaatgtaaacagtatagtacatttcgtgaataaatgtattttctgctttcatgctttagtaggttccaaagaggttactttgtttatttcacattcatggatcatacttttatgattctataacatgccagagaaagctgtaaaaataaataaatgtattggctactttttttggctttaataggctccaaagagggtttctttctttatgcaacatttatggagcatatttctgtgtatgccgagatatcctctgaaaaagtagaccaattttgaagagttgctgtggggatttgct

SEQ ID NO: 5453 - DNA, 792 bp, Arabidopsis thaliana landsberg
ggcccaaaatcactccaaccaaactaagtggacgtgatgcttaatcaatcgttggtccactaccaacagactgactatataatatcaggtgatcatcttttacaccataatgttccttgaggcaagtatatgctgcatctatatcagcataggtattacattcacttgcctgattcaagtaacaaacttaaatccatcaaaaacaatccctggactctctaacacataacaagacggtcagatacacttttataaagttagaagctcagaatacaacctttccagtagactgaccataaccagagtaatcatacctggaaaaagaaaaccaaagaagagattatagaactattataacctactcatcattggattatagaccgtaactaccgcaataacacaacttaagtggagaaacttttgctactaattaccaacttacagtcttcacagtcgttaaaattgagtacaaggcctaagcaagtacgcatgaagatatgcgaaatcgcattctcagaatctaaattcttcttcaaccacagaggagaagtatgattgaaaacagttgcaatgaaatgcttgcatcacaacatttcacaaaagtcaaattatttatatagaaatttcaaaaactatatgaataaatgtcttgaggggtcaacaagacccagaaaattttggctaaagtctctgactttcacatagattttgtcactatattcaggactataagccattaataaccaatccaaaaccaaatcttcaattcacatttaaaaacatcaacgagat

SEQ ID NO: 5454 - DNA, 590 bp, Arabidopsis thaliana landsberg
ctctccagcctttctaggactagatagctaatttttaatggccttaattgtttgcagattcaagattatgattgcaatttttctaaaatgaatccattatccaagcatctcaaacatcttttttttttctttttttttctgttaatcgttattcaacacaatgttttttaatctatcgttgcactagttgtaaaaacgctattttcttttaaatctaatttaacattaaattaaaaaaaaataatgtaaatgtcaaaccttttgtatatatatatttttttgtatgaataaatgtcaaactttttcttcacgtttacgttaaaagtagtttacaaaaagctaaagagtattacaagtttaaagatattttcttttgaacatctcactttgcttgttgtttgcatccagatggtgacgcggcattagattaaactatgcctatatggcatggtttatgaattttgtgagaggttacttgtcggtacatcctgcatgttgctgatttttagtaaactaggatagtgatattttgaaatcgtgtttattgcctagacgtcttttacgagtgtttagcgatccattaagttttc

SEQ ID NO: 5455 - DNA, 1217 bp, Arabidopsis thaliana landsberg
taagacacataattggatgcttgttcctctacaaccaaatatgcatgtactagactctaaatgggttttcagggtcaaacttaatgctgatggctcattagacaagtacaaagctcgactagttgctcaaggcttcaaacaagaagaagacattgactatcttgagacatacagtcctgttgtgcgatctgcaaccgttagagctgtgcttcaccttgctaccatcatgaactgggaactcaaacaaatggatgtcaaaaacgcttttctccatggagatcttactgaaacggtttacatgaaacaaccagctggattcattgacaaagctcatcctgatcatgtgtgcttattacataaagctctttatgggctcaaacaagctccaagggcctggtttgacaagttcagcaaatttttgctcagctttggttttgtttgcagtatgtctgacccttctctctttgtttgtgtaaagaacagagatgtgatcatgcttctcctctatgttgatgatatggttatcacaggaaacagctcaaaacttctctcaagtcttctcagtgagctaaataagcggttcaaaatgaaggatttgggcagactaagctattttctcggtatccaggctcagtttcattctcaaggtctttttactctctcaacaaaaatatgcagaagatcttctagccacagccgcaatgtccaactgttctcctgttgcaacaccgttaccacttcaacctgagagagcccctaatcaaaccgagctcttcgacaatccatcttacttcaaaagtctggctggtaagctgcagtacctcacacttactagaccggacctccaattctcggttaattacgtgtgccaaaagatgcacgcccctacagtatctgattttcatcacctcaaacggattctccggtacatcagaggaacaacaaccatgtgaattttattcaacaaggacacggattgtcaactgcgagcttacagtgacagtgatcacgccggctgtcacggtacacgtcgctccaccggtggcttctgtacattccttggcaacaatctaatctcatggtcttcacgaaagcaggactccgtcgcaaaaagctcaactgaagctgaataccgctctatgtctgatacagcttcggagatcacatggctagttaatttactttgcgatcttggcgttcctcaattacagcttccg

SEQ ID NO: 5456 - DNA, 2187 bp, Arabidopsis thaliana landsberg
tacatgccaaaaggtgtgataaaagaagtcgcgagctggtcggattctttcatcttgatttggtgatagcctgaataagcatcgaggaaagatagggtttcgcacccagcggtggagtccacaatttgatcgatgcgaggcagagggtagggaacctttggacatgctttattcagcccagtgtagtctacacacatcctccatttccccccttttttctttacaagtacagggttagctaaccattctagatggaatacctctttgatgaaccctgcagccattagcttgtggacctcctcgcctatggctctgcgcttttcttcatcaaaatggcgcaggtgctgtttcacgggtcgggctccggctcggatgtccagtgagtgctcggcgacatccctcggtatgccgggcatgtccgagggactccacgcaaaaatttcggcgtttgcgcggagaaagtcgacgagcactgcttcctatttggggtcgagctcggagccgatcctgactttcttgccggcgtcgttgctggggccgagggagacggacttaaccgcctcggccggttcgaagttgccggcgtggcgcttcgcatcaggcgcctccttggagaggctatccaggttggcgatggcgtcacggtactccacgcattccatgtcgcactcgtaagcgtggcggtatgtggatccgacggtgatggttccgctggggcccggcgtattgagcttgaggtacgtgtagttgaagacggccatgaacttggcgtacgacggtctccccaacaccgcgtgataggaccctcggaacccaaccacctcgaaagtgagggtttctttcaaaaattggagggagttccgaagcagacgggcaaattagagttgcccaaggggacggacacgcttgccggggataatcccgtgaaaaggtgctgcaccggactggattgtggacagatcgatccccaagagccctagggtctcggcatagatgatgttgaggttgctgcctccatccatgaggaccttggagagcctagcgttgccgatgacagggtcgacgacgagtaggtaccttcctcggctcagtacgcagtcggggtggtcgccttggtcgaaggtgatgggcctgtcggaccagtctaggtagaccggcgcttctaacttcaccgagcagacctcccgacactcctgcttgcggtgtcgagccgaagcattcgccacttgcccgccgtagatcatgaagcagtcgtggacctccgggaactcctcttccttgtcgcccccttcttgttgttgccttggtccttgccaccttctgccgaagtcccgccttgatgaagtaacgccggagcatgtcgcactcctcaagggtgtgcttgacgggacccctgtgataggggcacgactccttaagcatcttgtccaacgtgttgactcctccgggaggcttccgaggattcctgtgctcggcagcagcgacgagatccgtgtcaacggtgtcgcgctttgcttgcgccttcctcttggccttctttttcgagccacgctagacggacgccttgggggcgtcttccttttgtcttccctgaggctgcttgtccttccggaagatggcttcgaccgcctccttaccagaggcgaacttggtggcgatgtccatcaattcgctcgccttggtgggagtcttgcgccccagtttgctcaccaggtctcggcacgtggtgacggcgaggaatgccccgatgacattcgagtcggtgatgttgggcagctcggtgcgctgctttgaaaaccgtcgaatgtattctcgcagggattcccctggctgctggtgacaacttcggagatcccaggagttcccagggcgcacgtacgtaccttggaagtttccagcgaaggccttgaccaggtcgtcccagttagagatctgcgcgggaggcagatgctccagccaggcccgggcaacgtcggagaggaacagggggaggttgcggatgatgaggttgtcgtcgtccgttcctcccagctggcaggccagccggtagtccgcaagccacaactccggcctcgtctcccccgagtacttggtgatggtagtcggggcccggaaccgagtcgggaacggcgctcgtcgtatggcccgactgaagacttgcggacctggtggttcgggcgagggact

SEQ ID NO: 5457 - DNA, 1291 bp, Arabidopsis thaliana landsberg
aacctgagagcgtggtctttgtcaacgatgacgaggattcgcctcttaaggctattgatttcgggttatctatgtttctcaagcctggtatgtttcttacaaaacagagttttttttttactctcacattagatagatgttatcctgagatatgtgtattgttgtttaaaggagaaaactttacggatgtggttggaagtccctactacattgcgcctgaagttctgaacaagaattacggtccagaagcagatatatggagcgcaggtgtgatgatttacgtgttactgtctggttcagctccgttttggggaggtaagattgttactttgaacacaaactatatatgtttttggaggtgttataatgtgttttgttgtatcaagcagaaacggaagaagaaatcttcaatgaggttctggagggtgagcttgatttgacatcagatccttggccacaagtctctgaaagcgcaaaagatttgatcagaaagatgcttgaaagaaatcccatacaaagactcactgctcaacaagtattatgtaagtccctagaatcatgaaactccatagtttaggcagttataaaacttaaatcattttattttcaggccatccatggattagggatgaaggaaatgcaccagatacaccacttgacacaactgtgttgagtcgcttgaagaagttttcagcaacagacaagcttaagaagatggctttaagggtaccacatacaataaaacctttttgatttgttttagatgattttgatgagagaatatctgattattagtgttggacttgcaggtgattgcagaaaggctttccgaagaagagattcacgagctcagagaaacattcaagactatagacagtggaaagagcgggcgagtaacttataaagaactcaaaaacggtcttgaaagatttaacacaaatcttgacaactctgacatcaatagtcttatgcaaataccagtaagtagacactagtactgtcttaatatatatggatttagtaattagtttgattcatagtttttcttacatactgggatcatttttagacggatgtgcacttggaagacacagtagactacaacgaattcatagaggcgattgtaagactgagacaaatacaagaagaggaagcaaatgatcgtttagaatcatcaacaaaagtgtaatgaagttggcgtgaaagatattgttgttgtctgaagaagtgtaatgagtacccaaaactgatgatgaccaatgtaagttaatgtgatgcattcacctcactt

SEQ ID NO: 5458 - DNA, 4112 bp, Arabidopsis thaliana landsberg
aattattataatctttttcttttaaaaaactgttgaaccaattgctctagagttctctaatttaaatgattacataaagctatatctaagtgtagagtttaatatcaattttgaaaacaaattccaacatggttggaatgtctatttagcatattaaattaaaaagataagtaatattagctggtggtgaacgtaaacacacacacacacacaaattgttttgcggatacaagtatatatcaatatatgaatgtaaaattaagttacattagtgaatatttcatgtcctaaacattggttattgtcccatttaacaaaaaatccactttggttataagatataccgaccacaacactaaaataaaataaaataaaataaaatagaaagaaagtgatgaaaaatggtggcgtactaaggactgtgggaagattaatgagtgaaggaaaagatgggtatcttttatctctcctttctttatcctctctctctttcaaaatatattagtcatttttattttgttatatattatttctcagctttttaaatgtattttatatttcccctttgagcaagaaaagagttgcagagatctttgagtctgacacagagaccaaactcacatagcaatcacacacatctccacaaacacaggtatgcatataaatatatatatataagtgtatattcgtgtgtatgtgtgtgtgtctgtctctctctctttctctttgatagaaattctctaatgtaactttccttttgcagcttgagatgatcatgaaacacgtgcatcctcagatctctatcaatccaggttcttcatcttttataatattcattttttctttcaatttctaactctattattttattattttattttcaatcatgattatgtcttaatttccatatccttcaatctctctttctcataatccataattcatcccttcttcttcgtcttcttgatgtgatcacgattctttttttcttcgcttcaactgtatatatatacagatctatattaaacttatagtggttttgtttttgctcctttttcatacttttgtttgtttttctatgatatcaatcagcttggtgaaagaaggtcaagaattgaaagagaatcaaagaaaacgacgtcgtttcattcgtgtgtaacaactactaattatacatagatggctgcttactttcacggaaacccaccggagatctctgccggatccgacggtggtcttcaaacgttgatcctcatgaatccaactacttacgttcagtacacccaacaagacaacgactcgaacaacaacaacaacagcaacaatagcaacaacaacaacacaaacacaaacacaaacaacaacaacagtagtttcgttttcctcgattcccacgcgccgcagccaaacgcgagccagcagttcgtcggaataccactctcaggtcacgaagctgcttccattacagccgccgacaacatctccgtacttcacggttatcctccgcgcgtgcagtacagtctctacggtagccaccaagtggatcccactcaccagcaagccgcgtgtgagacgccacgcgcgcagcaaggcctctctttaaccctctcgtctcaacagcagcagcaacagcaacatcatcaacaacaccagcctattcacgtcggattcgggtccggacatggagaagatatccgggtcgggtctggctctacaggatcgggggtaacaaacggtatagctaatcttgttagctccaagtacttgaaggcagcacaagagcttcttgacgaagtagtcaacgctgattccgatgacatgaacgctaaatcccaactattctcatcgaaaaagggtagttgcggaaatgataaacctgtcggagaatcatcggccggcgctggaggagaaggttccggtggcggagcagaagcagccgggaaacgtccggtggagctaggcacggcagagagacaagaaatacagatgaagaaagcaaaacttagtaacatgcttcatgaggtaacaacaatacgtattatatacaataagcctacatatactgagtgctctcttatatcgcacatgaagtggacttaaaagttctgtccctaagattttcagtcattttcacaattcattttatatgtatattaagctatcctttttttttttgctcttccgatttctcaaattgacaacttacaagattgatgaaatctttttttttttgtccctctcttagtaaagactaacaacttttatagattatatttatgtagaccgtacacttatgttcataagactcacgttactttgttggttgaaaaatgaaaaggtggagcagagatatagacagtaccaccagcagatgcagatggtgatctcttcgttcgagcaagcggcagggataggatcagcgaagtcatacacgtcgctagcattgaaaaccatatcaagacagttccgttgcttgaaagaggcgatcgctggtcagataaaagcggccaacaagagtcttggggaggaagattcagtgtctggtgttgggaggtttgaggggtcgaggctcaagttcgtggaccaccacttgagacagcaaagagctcttcaacaactgggaatgattcaacatccttccaataatgcttggagacctcaacgtggtctcccagaacgagccgtctcagttctccgtgcttggctcttcgaacactttcttcatccgtaagtaacccactatacacacatgcactacttttcatcactggaacacaaactcagtctctaagttgtctttcttttaattagataccctaaggattcggacaagcacatgctagctaagcaaacaggactcactcgtagccaggtacgtttcaaaatgattctttcttgtgttattaggttacttaagaaagcgtttttaagtaaatttattttctttaattatttaggtgtcgaactggtttataaacgcgagagttcggttatggaaaccaatggtggaggagatgtacatggaggaaatgaaggagcaggcaaagaacatgggatccatggaaaagactcctttggatcaaagcaacgaagattctgcttcaaagtcaacaagtaaccaagaaaagagcccaatggcggacactaattaccatatgaatcccaatcacaacggtgacctagaaggcgtcactggaatgcaaggaagccccaagagactaagaaccagcgacgagacaatgatgcagccaataaatgcggatttcagctccaacgagaagctcacgatgaagattctagaagaacggcaagggataagatcagatggtggctaccctttcatgggtaatttcgggcaataccaaatggatgagatgtcaagatttgatgtagtctcagaccaggagctcatggcgcaaaggtactcaggaaacaacaatggcgtgtccctcacgttaggtttacctcattgtgatagcttgtcgtccacgcaccatcagggtttcatgcagacccaccataggattcctatagggagaagagtgaaaataggagaaacagaggaatatggacccgccaccatcaatggtggtagctcgaccacaaccgcacattcatcagcggcagctgccgcggcttacaatgggatgaacatacagaaccagaagagatatgtggctcagttattgcccgacttcgttgcataaacccatctctctagaaggagaaaccgaaacaggttattatatacgtttctagtttttaattagtatatagtttctcataccattgaaccaaaacaaagaacaaaatttaattttagtctttggttatatatggccgacggttgtatatcgattttgtaatttttttttttttcgtttctattgggggatggatagggttatatatgtatatggattagttacgtgtaatagcttgcattgggtgtataccaaaatatatttttacttttattacaatgtaataattaataagatagtgaactgatctatcaaatatggaatgatgattacagattagatctaagctgtatagattccgaatatgactatgtatgcttaagcggctggatacttataatatttttt

SEQ ID NO: 5459 - DNA, 3950 bp, Arabidopsis thaliana landsberg
gttggtttgaagcatcaagaaacaaatacaaaacaaaaactatctgatgataatgggccatggcacgtgacccattgaatgaaatcagcaaaacgcagcgttttaggttcgagttcgtttttttgcgttgtgctctgtttcttcccttctctctctatccagtgcgtttctccacaatcctttcgccttcttctgccgaaattttgtcttgcccaaaaaacactaaaaaaccgaataacgcaaactactaaaaagcttcaacaagattgaaactttctgcttctattgattctaatcatctctctttcacaataccctagtatcaatttctccttttgactctctcggtttctagagattatttgtcttccatcttcaaatccaaaccaagctttagaggtttcgacgactctctagccgccgctttttcttaaacagagaagacttcaagaggttcgagaaagttttctctttttaattgggattttttttttattgtatagaggaactgatgctggcattgtgcatgtgctttgttcaatcctgattctgtattgaaatgttctgatttaatttgcgtttggattctttggtgattagagatggggcatttttattttagggtttttgtttttttgattgtggcagtgacaatgtgttatggttttggacttctttcgaaacaatcgtttgctctgtgatcgtagttctccttagctcacgcggcatcaccgaggtacacttcctaagatctcttattttatttgaaagttaattagaatgttttgtactgttgttcgtggaatgttttggcatgtatatgtatgtgttgtgggtttaggatattttagttaacttttgaagtgtattcaatggagttcttaatcttggttacttgagttatgtagttttaagttcccttctggtgctagaaattatccttgtaattgtcaaagattgtatttcttaacattagtgtaaggatggagtagactggtttaagctttagtacaaggattatattccgccaatttgttcagtttttcatttatcctatagtgttttagatagtttccttcgaagaattaataggaactacttggtgtaggttttagtatgcttgaagcttatgagatgcataggttttgacgttatttgcaatccctctagatttccacagttgtctcactgtaattttccagggagtagaactaactgaaaaatctcccaggatcttattttcacttctcttgttggttgaaagtataatatcttcatgatgtttttttatttttctattcatgttctagctgttggatttgcgttgatgattaacgtcagtgtctggcaaattgacagggtcttatggctcttaggaaaaatactccaaaaggcgattcagtttcactacctatgaagcctttgaatttctccagaaaattgccaggaaatgtgcagattccagaccctgatattgttcaaagtgttgcgcctaacattgatctagacctccgggaagtttactttttgatgctccacttactttcatctgggccgtgccagaaaacttatgcactgttgcggcatgaacttcttgaacatgagcttcttcctagaagatatcatgcttggtactcgaggagtggattgcctagtggggatgagaatgatgatggcaattcctttcctttgaactatactgagttggctaagaggtaactaacagtgttactctcaccgtttgtagtactagtgtgaattttaaattatttttcaagtgaagaagttaatatgtcattcatttctcctaattctgtattttctaatttgttaatgactgggtttagggttcttctcaccagaaatatttaacttgtttcatggcattgtatgtgcacttccaggtattctcatgtaaaaaaagatcacctggtggagcttctaaagcaattggtctttgtttcaaataggcctaatccctcacgagggatcggtgatggaaataaaatgattggagctggggttccaacacttttaggcactggctcgttctcccttttgagctgtaggtgatttctagaatttgttattttattggcacgtttaactcactcacatgcacatacatagactcatacatacatatgcttgcatatgtctataataacatattaatactaccaaggtctcttataaattatttggggattctttagcatttactaaattctctttgaaaatcttgatttgctattaagctacttcgtttggtttttcagctgacaaggaaatagttggaagtgatctcaaaccaccacctattggcatgcgttggcctcatatgcatgctgatcaggttcgtggtattagtttgagggaaattggtggtggttttgccagacatcatcgtgccccatcaattcgagcagcatgttacgtcattgcaaaaccatcgtcaatggtacaaaagatgcagaacatcaagaggctacgtggacacagaaatgctgtgtactgtggtatgatatttaattgtttagggatgaaatttttagtgtcaagttccattactaaataatagactaatcatttagatgaactggatacctgaagctatctttaaatgctgcagctatattagatcgctcaggaaggtatgtaatcactggttcagatgaccgccttgtaaaagtatggtcgatggatactgcatactgcctggccagctgtcgagggcatgaagtgagttccaagtactttgtgagaatgctatcattttgttactgtatctttaagtggtgcttaaaattgtttttggtgcatttgtaagggtgacataactgatcttgctgtgagttcgaacaacattttcatagcatccgcatcaaatgattgtgtgatccgcgttgtaagtttcttgtatcgtcctctgtatatgattgacttccacatattagcctcttgatgacttcacccatcaaaatttttgtagtggcgattgccagatggcttaccggtttccgtcctcgtggacatactgaagctgttactgctattgcatttagtcctagacctggatccccgtaccagcttctctcgtaagaattgttctttttggcatcttatacgctgttttgtgtcagttctattcattggttgatatcatgctatttatgtgtttggaaaagatggtttatttcaactggtaagctccatgagccctttataaaatctttgcagatcgtcagatgatggcacatgtctgatatgggatgctcggggtgtccagcttgctccgcggatataagtccctaagcctcatagtcctattggtgattggctgattgctttatattcctagttgatttatatgtcgatttgatctattggaagctataggactgacttcggtatcatattccaggagaaaaccgtggcggttcttctagtaatggtaattttttttgttgtgcattcaatgctgatggatctatctttgtcaatagcagctctgataatcgtgctagagtttactcggtcttgataaatgtttcttgactagattatatatataatgatgattcagttaattagagtagatacttccttggttacaggtttggggtgctagtaagaccaataagaatgatttagaccagccaaatcatgagatggatgttctggctggacatgagaatgttgttaaattacatttcttatcatatatgttatatttggtacctgctcatatttttaaattacatttcttatgagatcctaattttcttatcttagtcattttctgtggttctttctagtgcttgtgctggaagatctggacgaaaatgttccaaattttaagaattcttggtgtgctttctgctgcaattattcgtaaaagtttccttataatgtttttgacactcaataacatatgtatttgtctaggt

SEQ ID NO: 5460 - DNA, 926 bp, Arabidopsis thaliana landsberg
ttttatcgttgaaatggcttcggtgacgaaaacgcgtgctgggtatgcaccccgacacccgttttcggaatgggtgacatgcggcaaccaaattgcgcgaaaccaccccaaacatgaggtttcgacctaaagtagtggattgggcatgttcgttgtgaaaaacgaagaaatggttctggtggcgaaaactcatgctttgtatgcaccccgacacccgttttcggaatgggtgacgtgcggcaacgatattgcgcaaaaccaccctaaacatgagttttggacctaaagtagtggattgggcatgttcgttgtgaaaaaacaaataaatggttccggtgacgaaaactcatgctttgtatgcacacgacacccgttttcggaatgggtgacgtgcgacatcaaaattgcgcaaaacatgagttttggacctaaagtagtggattgggcatgttcgttgcgaaaaacgaagaaatggttccggtggcaaaaactcgtgctttgtatgcacccgacacccgttttcggaatgggtgacgtgcgataacgaaattgcgcgaaacctaccccaaacatgagttttggacctaaagtagtggattgggcatgtttgttgcgaaaaacgaagaaatagttccggtggcaaaaactcgtgctttgtacgcacccgatacccattttcagaatgggtgacgtgcggcaacgaaattgcgcgaaatcaacccaaacatgagttttgggcctaaattagtggattgggcatgttcgttgcgaaaaacgaagaaatggttccggtggcaaaaactcgtgctttgtatgcaacccgatacccgttttcagaatgggtgacgtgcggcaacgaaattgtgtaaaacgatcccaaacatgagttttagacctaaagtagtggagtgggcatgttcgttgcg

SEQ ID NO: 5461 - DNA, 1252 bp, Arabidopsis thaliana landsberg
tttggttaagattgaacttgaaacttaaaatgatatgggcattttgacaacttgataacgttaattaatgaaatgaactagtgtatggctaggttaagtgaatgaggacataactatgtttacttgatgaattatgattgattcgggggcgtaacaatcgggccctaattaaaactttgagaaaactggtaagttcttgagtgttttgtctattgcttgctacgttctcttcgtatctctgattgtttgttcgcatatttatcttattgcatgtggcatgtggggttatgggtggggttagactaacgtttcttgggaatcccaaactcattgagtaattctagattactcatgattctatttgttttgcaggaaaccttagaggaaactagagggagtggtgaacgctaggaaacccgaaatttcattgtccttgtagtgtatgcaagaatgaaaaacacatcatctagaagagttaatagtcatttgtttagtcaaggatttatgcctgattattatgtttggtataagcatggagaagaagtgaatatggatataggaacgagtacttacacggatatgacgtattttagttcgaatcatgaagaagtgagtaatgttgtagaagatccatatgtggatatggtgaacgatgcatttaattttaacgtggggtatgatgataactatcatcatgatgatagttatcagaatgtggaagaaccggtccataaccattcaaataagttctacgacttgttagaaggtacaaataatccattgttcgatggttgtcgtgaagggcagtcgtagttatccttagcatctcgactcttgcaaaacaaggcggagtataatatgagtgaaaagttggtggactccgtttgcgaaatgtttacagattttttaccagaaggaaaccaggctaccacttcacattaccagaccgagaagttgatgcacaatttaggacttccatatcatacgattgatgtttgtcagaacaattgtatgctattttggaaagaagacgaaaaagaagatcaatgtcgattttgtggcgcacaaagatggaagcctaaggacgaccgtcgaagaaccaaagtaccatatagtcatatgtggtatctacctattggagaccggttgaagagaatgtatcagagccataagacagttgcggcaatgcgatggcatgttgagcaccaatcaaaggagggagaaatgaatcatccttcagatgcagcggagt

SEQ ID NO: 5462 - DNA, 1265 bp, Arabidopsis thaliana landsberg
  unsure (1)..(1265): unsure at all n locations
tagagaacgtgcttcagttcctcacttccagatgcgatcgcaacgcagtctcattgnnnnnnnnnnnnnnnnnnnnnnnngaggctcagactcgattagaggtttttattggaaactgttactcgctctctcctgctcggcttattcaccggttcaagcgtgttaggtctcttgtgcttaaagggaaacctaggtttgctgattttaatctcatgcctcctaattggggagctcaattctctccttgggttgctgctacagctaaggcttatccttggctcgagaaggttcatttgaagcgtatgtttgttacggatgatgatttggctcttcttgctgagtcgtttcctgggttcaaagagctnnnnnnnnnnnnnnnnnnnggttttgggactagtggtattgctattgttgctaacaaatgcaggtactttgtagatctcttctctttgtttgtttgtttgtttgttctcagagtcttctagaaatgcttatcaagtgggactttgttttcaggcagctaaaggtccttgatttgatggagtcagaagtcacagatgatgagttggattggatttcttgttttcctgagggtgaaactcatctggagtctttgtcttttgactgtgttgaatcccctatcaatttcaaggcattggaggagctcgtggttaggtcaccattcttgaagaaacttagaacgaacaggtttgtttcccttgaagagctgcatcgactaatggttcgagcgccgcagttaacgagtcttgggacggggtcatttagtccagacaatgtgcctcagggtgaacaacaaccggattatgcagctgcttttcgtgcttgtaaatccatagtttgtctctcaggattcagggaatttagaccggaatacctcctagccatctcttcagtttgtgctaatctcacctctcttaacttcagttatgctaacatttctcctcacatgctcaagcccatcataagcaactgtcacaatatccgagtcttctgggtatgtatctttattgatctcattgtatagtatagtgtaatatcctttaaccgaggactttgagttacatgcgtatcttgaaacttttataatgcaggctcttgactcgatacgtgatgaaggactacaggcagtggctgccacatgcaaggagctccgtgagcttcggattttccctttcgatcctcgtgaagacagcgaaggtcctgtctcgggagtaggcctccaagcaatttcagagggctgtagg

SEQ ID NO: 5463 - DNA, 2221 bp, Arabidopsis thaliana landsberg
  unsure (1)..(2221): unsure at all n locations
aaccttattagcttaaaacactcaaggaagctacttatcgatttatgatcaaccagttcttcctctactagatcctgtagtggactcaattagagcggcagtggataggctaacgcggtcaacaaactttctacacttcatggctcagcacgcgcttataatgcaagaagagttaccaagtccacaagatgaggaaggggaagaagaagatgggagatatcacttcatgtctctcttgttgaatttggtcaacacgtttctctatatggtcaatacctatatcattgtccctacagcagatgactattcaatgagcctcggtgcagcagcaacggtgtgtggtgttgtgattggtgctatggctgtagctcagctcttctcttcggtttacttcagtgcctggtccaatagatcctacttcaaaccactcatattcagtagcattgttctcttcattgggaacttgttatatgcattagcttttgacttcaattcaatagcggttctcttgatcgggcggcttttctgtgggtaagtctctttagacttcaaaatgctcatagtatcacttcttgatggattacttatattcttatcatactgtttttttcagattgggatcggcgagagcagtgaaccggagatatataagcgactgtgtaccgttaaagatcaggatgcaagcttctgcgggttttgttagtgcaagtgctctaggaatggcgtgtggtcctgcgcttgctggtctattgcaaattagattcaagatctataaacttacatttaaccaagatacattgcctggttgggttatggctgtagcttggcttatatacttggtctggttagctatatcgtttcgtgagcctgcacgtgagcctgaggagattcctaagacttcagaagagtctaatcactctggtatgtctatgtcctgaatccttctctttggtagatcggtagaagttatcgatatctaattgtagcggtgtgtgtttggtttgagtgatagaagctgttcaagatgtgaatctggagaaaggtatgaaacaaccacttctgcttacatcagaagagatagaagaacagggtgaagatgaatgtgatggaagcgaagaagcttccgaggattctcgtacacctgcaaactccattttagctgcttatagattactgacaccttcagtaaaagtaaatagagactcaaaatttacttctgagaaactgaaaacgtaagtttgcaattttgatgattgatttgattgtttttttcaggttcaactattgatatacttcatgctcaagtatgcaatggagattcttctctctgaatctagtgtcatcaccacttactactttggttggtcaacgagctctgttgcgatcttcttgttttgtctcggtctcacggttcttccagttaacctcgtcgttggaagctatataagcaacatgttcgaagaccggtaagtttctctgttttttttactgatctcttctcctcaaagtttccctaaagtcataaactttattgtgtcacaggcaaatcctgttggtctcggagattatggtctgtgtaggaatacttctgagcttccatgtcgttgttccctacactgtgccacaatacgtttgctcaggactcatcatgtttgtttctgcagaagttcttgaaggttaacaaaagattcatattacataaattgaccaaaacttctatttcttttaatttaaccacaagatcggaatgtttttttgtaggtgtcaatctatcgttactctcgagagtcatgtcgtcgaggctatcgagaggaacttataacggaggtttgctttcgacggaggctggcacgatcgcacgtgtgattgctgacgcgacgattaccgtcgccggtttctttggacggaatatgcttttgaatgttacactgcttccgtctctagtcatttgtgttttgtccatcgtagctacttgttttacttataactccttgtattagtactcttgttacaaagtttaccccataataaatcaaatctatgcaattaccctaacgattttgaccgttaatctcccgcgttaatagttttgtttatgtcctgatataaattcataaagctcttttatgtcatgtaaatgtttattatgtggtaacatagtcacgaggttgatataaaaccaaattgaatatatttctanaaatcacaacatacttttttt

SEQ ID NO: 5464 - DNA, 656 bp, Arabidopsis thaliana landsberg
caagagcaggaccacaagccattcttagagcacttgcactaacaaaacccgctgaagcctgcattcggattttcagcggcacacaatcgcttatatatctccggttcactgctctcgctgaaccaaatctacaaaatgtataaatatgatcaatgtctcatgaaaacaaaaatatataacacaagtttaaaaagagactcacccacaaaaaagccgaccaatcaagagaagtgctaatgaattaaagtcataagccaaagcatataacaagttcccaaagaaaagaacgatgctactaaatataagcggcttgaagtaagatttattggaccaggcactgaagtaaacggaagagaagagctgagcaacggccatagcaccgataacaacaccgcaaaccgttgcggctgctccaaggctcatagagtaatcatcagctgttggaacaatgatatatgtattgaccatataaagaaacgtgttggccaagtttaacaatagtgacatgaagtgatatcttccttcttctttttccgcttgctcgtctggaggaagcattagtaggtcttcgtcatcttgcatgattaaagcatgttgagccatgaaattaagaaagtttgttgaatgtgttagccttgtcactgcattcttaatcg

SEQ ID NO: 5465 - DNA, 262 bp, Arabidopsis thaliana landsberg
atcattgggtgcatgagatgagtttttttttttgaatgcattgaatgtggattatgggacgcatgaccctaatgagccgaggctcctcactgccatttcaggtcacacaggagaagccaagaaacaactgtatcggtgtccacatgagcataaatggatcgggaattacagactaatcttgtgattgaaacagcttgtgaccttgttgcgaggcgtgaatgcgctagctcttgtggactacgaggtggctcagtgtacacca

SEQ ID NO: 5466 - DNA, 1890 bp, Arabidopsis thaliana landsberg
  unsure (1)..(1890): unsure at all n locations
gacagggaagctctgctggaaaaagagaaggcaaaagtgttggctgcccgagcttctctaactttggatgattttgtctgatgacttgggttctgcatggtgtgtccttgtctgttcgttttagtatatcgtaattagagtccccttataacttaggaaggtagagtgacccttgtcggaatcaagtttccactttttgtaatgatgactcagtaggatttcgacattttgtaatgatgactcagtaggataatgtaaaagcatgcgtctagtaatgaaaaagcaatgccttttggctcatcaagtatataagaaacagatcatcaccggcaaagagctgattacgtgtataatacgctttcaattttcagttttgagcttcatctattaagttcatcaagtttttgtttatttcaagacagatctcactgccttggcttcatccagtgaccagtctggtagagccaatgaagtagttagatgatttcactgttagtcacgatgcacaaagtgtttagacttttcttatggtcgttgatcttataatgggccaaaaattgtaaattgggccgaagtgcaaaagtgaaacccatatatggagaggcggggtttagtttacaaatttggatgtgtggttggtggtgccactcaggttctagggtttcacgctctctactagtttgagcttcaatgggaaatctcgttgataacaagttcacatgggtgattcaaaacttctcgtcttcccaatcaagggtcgtcccttctaatcaattcgttattggtggctgcaagtggtaaacatgataaaccttgtcttttaatgttacaatttggattttctcttttattttgatgacggttcggatttcttttttgatgtaggcgtcttcttgtctatcctgagggattcaataagtctggtgatcatttgtcgctgtttctggaagtggctgatcctagatcattgccacctggatggagtagacatgcacgttatcttttaactattgttaatcaacattctgataaaatctcaaaacgaaacggtaattatatcttacccttattacaacataattaattagtcagataaaccagttaagtaatcttcagtttttatgtcttgtgaggcttgtttttggacttggaatattatatgtttctgaagcgtgtttctgtgttttttttggggtttggtttagttttcaagttttctgccaagttttgaatattgttttcataatctacaggttcatagttaaatttactgattagatgaattctgcttttgtgattttacagaagcaactaagtggtttaatcaaaagattccaggttggggtttgtcagcaatgattccccttactaaacttcatgccaaagatggtggatttcttgtgaatgatgaactcaagatagttgctgaggtaaatgttcttgaagttattggcaaactagatgtaccggaggaatctgaagaggaaacccaagttacccaacctatgaaaaaggtaaaggtagattatgatcatgtggagtctaatgatttgatgatcaacgagactccaccggttagtgaactcatggacgtcaatggttttcaagttcttccttcccaggtaagaaaacttttaagagttttgtagaaatttcaacctcacaagagttatcaaaaatcttgcctttttttttaattcacttgcaggtggattttgtgaagcgtatttttgaaaaacatccagacattgcaaaagatttccgtccaaagaacccacatctgaggaaagcatgcatgaatnnnttgctcagcaataaggaaacattgtgccaaccacctcagaagcaatcaaatgaagatcttggggagcagacaatgcactgacagac

SEQ ID NO: 5467 - DNA, 727 bp, Arabidopsis thaliana landsberg
  unsure (1)..(727): unsure at all n locations
ggatatgtatagacctgattttgaaggtactttgttttttgaatataacttaccacggttttgcgtggagtctatatgcagaatattgttatttatttatgaaatgttatttttacannnnnnnnnnnnnnnnnngtatgttcaaaatatatgttgatcattgctaaaaagaaaaacgattacctcgtatttattattttaaactctgaataacctaaaatgtgtttccattttggctatacaacaaaataaacgttaacattaacgtagaccatatatgtttcgagtttaaaaaccgattaaagaaaacatttgaaagagtgagtaaaattattagtatacgagagatgagagtaaaagtaaactaccttttgaaagacaagtcacttatgttttctcttttaggttgttgcttagacttatccatatgatggtgataacgacatcctctaatcctctcatcacacgtaaattaagctttatcgcattacatatttataaatgataattacatgtatttcctttagtttttcaaaggcgacctatatattgattattgctttgggtttaaagactacgtacgtgttaatatccataccttaagaagcattttaaaaatggaacatgtttcataagactttttttgttttgataagaatttacatgaactaattaacttgtttatgcttcttaagataatcaagggtttgtatgtcacaacacacac

SEQ ID NO: 5468 - DNA, 2537 bp, Arabidopsis thaliana landsberg
  unsure (1)..(2537): unsure at all n locations
atgctgaaattgttttatcttgaaggtatcattgatgaaaaggcttagacatccaaacgttctgctgtttatgggagctgtggcatcacctcagcgtctttgtatagtgacagagtttctaccacggttcggcctcttctcttttgctaatcctacatttcgagatttttgttctctggggtaaaaactctgactcacatcttaagtctaaatgtttcgaaataacatttgcagtggaagtctctttcgtttgctgcagaggaacaagtcaaaactagatttgaggcgacgtatccatatggcatcagacattgtgagtattaaacgtgattttccagttgttgtccaagtttttctaaagtataagctgctctattttggttctttgttgcatttttttgcatatccttcttttccgctctttgattcagtctttcatacaggctcgtggcatgaattatcttcaccactgtagtcctcccatcattcaccgtgatctgaagtcgtcaaatctactggttgatcggaactggactgtgaaggtattgttttcattgttgaaatagtttccactttctggactaccaataaccttatgacgttggtaattctgatggagctaagaagaaaataattatttacctacaaaataccgtccactttcatcagatttcgcagatgacatgagtttggtgggtgaactagaaatggatgtccccagtttaaaaaatattgcttgattgatttctttgtgacacaaatggaaaaatattattctaggtcaacaaaataatgttattaggtctagtatttcccctgtgtcaggactcaagagttgtatcttgtatgagaaaaaaatcgtttgataattaagttactacgacttagactctaaagcaaaaggggaaatcatatacactatattaatgaagctttagataacgattcgtcttttgtgtctatatcagaaaagaatcatagattttaatttcaggacaaactattattgaagtaaaaagggtgtttgtcatggttaacttactttgtcagctcacaggttgctgattttggtctttctcgcatcaagcatgagacgtacctcactacaaacggaaggggaacggtactttacatagactcttactgaattgattcctccttttttttttcttttttttaatgaaatcagatatctcaggatgaatttcattgcttttttatgttctgtagcctcaatggatggcaccagaagttcttcgaaatgaggctgctgatgaaaagtattttctcactctctacttattggttattggttgttgtagctttcatctataacgatgctcttcctactctttaaatggcaggtctgacgtttacagttttggagtagtactatgggagcttgtgacagagaagatcccatgggaaaatctaaatgctatgcaggtatagtttccgctttaatggaaaaaatgcaattggtctccaaatgaaaaatagactagggaatatgaaagtgaccatatcttacttaaagatatacaaggccatattagtcctagtaagaatctcaacgttactaactactgtagctaattggtcgctactcgctattaatatgcatctagtttccatctatcctataaagtagatgtaatcagtttagtatgttggaaactatactacccatttggctattttgggtcaaattaaaaagttatgttttgcgacatttataccaattagaggacttgtttccattgcaaaacatctgttctgtttaagaaagtttgccttttctgtctcctcttaattcctgtatgtaaattatatgcccacacagtaaaacaaatatgaagagaagtctatttataaacttgcaggtgattggagccgtggggttcatgaaccagaggctggaagtcccaaaagacgttgaccctcagtggattgctttaatggaaagctgctggcacaggtacattaacgttctgaacattgcacaatcattgaatataaccttttattgtaatggttctccttgctttaggtgttctacatgtttcacagctgatgctgacattaatttttgtttctattttggtttgtctcacctgcagggatgcaaagctgagacccacattccaagaactgatggagagactaagagacctgcaaagaaagtatacaatacagttccaagcgactcgtgctgcgttatctgacaagtgacaactctcttctcaaggacaactaaaccaaacaaaagttgacccttttcacttatggcttcttgttcctcaacgccgcatcgcttcaagatccaactattgttcacagaaacaaagaaagagagaaagagagaaagagagagttggtctttttgaacaacaacaattggtggaaacatgctgtgctggtgtgccaatgtcttccaccattgaacaaggttatggcattgaaaatntattgaaggatggttgactatggttcgaacggagtcttcccaggtactgaaacaaaatcataaggtggtc

SEQ ID NO: 5469 - DNA, 1939 bp, Arabidopsis thaliana landsberg
gtaggaccttgctagtggacgacagcagcgccgagggggcaagatccgctgaacgtcatggtggccgttcgcctcgaaaaaacaatctcctcgtcgcggctctccttgtcctctccctgaggtggattgagtagcgaaccagtcgctgacttaattcgcaaaaagagagacagaccagcccgaggtagctcttctccaaggagagagaaatcaaaggctcgaactgatcgttctcctaggtcatctcctccacctcgattgatgggtcctcctccccctgtggtcacatctccccctcctcaacttagtggcgagaagactaaccgaggtgtaactcctcgacaggaagatgctgagtctcgggatgctcccctgaaatcaaaaatcgttcttgtgcctcaaaccaaatcactctcaggtttgataaatggccctcttcttcttctttctttacttttgcattgttcgtactctaaataacacatttttatcccctcttcttttatagcaatggaaacagagggtaatgttttttggtgcttcaaaacccgaaaagacgctatcttgccaacttttgatagatggcgtcctgcaatccgtgaacgcttcctacttcatgtttatcactcgtctcgggttagtattgcttctttcatgctttttaattttgctattccttcatgagctgacttgcttaaagtcaggcaaacagcgaactcaacgacatggttgagcattacgatgggttgctgcttagtagagaacaggacatcaacgcatagaagggcaagttttctacccttgaagccgaaatccactcccctctagttctaagcaaaagctagaggatcaagtcaaccatctctcttccaaactcatgaagtcaaactgcgaactgcaagataaatacagcagacacgagaaacttcaaaaggaactctcggttgcccaaggcaggctttccgaatctgaatcagccgcttatgctttgaacaaccaattcactgaacttgaggcaaagtataaagcaattgtcaagcttcgagatgccaagttggctaagtcagcgtcaaaagccataaaggaggtgaaatgtcgcggaacggagttgattcagggggctatccttttcattcagaccgagaagacaagatcggagctggaatcggacatcaaggatcacgaaagcaacttgctcttactggaccaaacccacgaggaggatttctccgaggagcaggaaaggtccgaactgaaagctgttttatctgagaaacgaagtcgccttgctgctcttcccgcttcatccttcaaccctcaaccctcaacaccgagtcaccccctttgagtgaatctagttttgattgggctggtaaattcccttattagagctctttacctataggttttacttatacttttttcctatgttttgattgacttgagctgttttcaccaagctcgagtgggtcggttgatattgctgcaaccgaggtgtctaccataccgatagggattgctcaacctgatcatgttttgcccgaagctcctctggtcgtgaacaatgagacggtgatcatcccggatgatgaatgtgatgtcgggcatgagccggatgctccttccgagcaagtccctaccactgaaccgaatgaaaccgagccgactgacgttaagctagagatggttatggatccctagtcgctgcgtccactttgaaattgggggttgtctcaaacttttaagaatttgaaatttattattaggataagtatgtttttttgcttaaagaggctttttgtttgaacaagatttatgcctaaggaggcttttaaacctttttcactttaatccctagagggtcttgctaaaaatagagtgcgggtttgcaaattccgctcttaaatgcttttgaccatgtggctaagtttggagattc

SEQ ID NO: 5470 - DNA, 840 bp, Arabidopsis thaliana landsberg
ataccaaaaaccgaattaaaaaaccagctgtgggtggaaaaatttacctccaccaccattcatgatcttcagcagcgagttggaagtaagtaagggcaactgttataaaagcagtgacgatcaacaggatgatgaagacgatgaagaggatgctgtaaatggtatagatacgatggccccaaacactggcaaagatgtaatatagctcgatgtagatggcactgaaaggaagaaatccagccatggccatctgcggtacagcactcctgtaccatgggagtggcgggatctcccgaggatacttagtggtgcggactggagcttggaactcagctttgctgtttttaccggcaataccacccaacacaagtaaaggcgaagtgactagtgtccatatgaggacgatcactatgatggttccaaagggaagagcggcagttgcactgtatgcgattgcaacggtgtttaggaagcagaaggtgagaaatagtgggccacagaagagacctccagttagcagcaaatttctcacctgaagaggaagaacggtgagaaatgaaaagcttatcactttaagttgaaaagagtaaagggaaagggtttacatacccaattctttccttcgagttgacagtagaaagaggagtcagtgtatccggcaattccagatgtgagagaatagataacgaccaaaacagtgaagagtgctccacggttgtatggatagaacactccaacaagtgatagcatgaaaatgaacatggtcctgatcccatattaggtatctttcagttaaaaatggaaaagcataactaaaaataaacgaaggaggctgcaaag

SEQ ID NO: 5471 - DNA, 4946 bp, Arabidopsis thaliana landsberg
ggctatgacacagacttgcatagtgaggggactatttatacattataaatggatatctgggttacaactaagattgagcccaacatgttgtcgtggggcagcaaggtcttcttatcagtggatatgacaccactcactggcaacgattttatgttttcgtttatggctacaagtttcttcattgatgaagagaagaaaatcgctgtggtttttaatcaaagcaaagacaggaagcacaacacagctttcatcattggacaggatggatccttgaaagaagtggatcttggagaagttcgaaacagagatctcaaaccacttgtgtcctcttatgttccaagttcaatgcaacttgaatagtgcattttacaaaacccataatctatttcttgcacttttacttgtttctttttctcttttgtcatcttcttctttgaacaatatatagaaatttaattcgtctctcatacttctttttgtttgccatatttgacttcgttttgttgcctttagttgtttaatttacttcttctgttgtagtagactcattgctaaatctctgtttctcttctaacatttgttatgtttgtgttcttgcaaataggcagctctgctgttgtaatttatgtagaacagacaacagagtaagctgcgtttaactttgaaatttgcaagtacgcatgcttagatttgagtttcccattttaacttttgtccttgtcagttttacaaagtgcaagtggctgctaggctgacacgtagaagattgaatgatttctcggagttaagttttgtcctttgatactccctggtcttaaagcatacttacagagtaaccgtagctgaatatcaacctcaagcaagtcatggaaccatacaccttccttcaatccaccagttttgggctggttagcgctctcctagatttatgtttcatataagctaaccattaaaagtttaagagaagcttgtgtagtaagaagacaagctaaatgagttctcagtagccttaattcttcttctttttttgactaaatatgagcacttatagatgaagactagtaatgcattgattatgagaatactaaaaagttaagatgaataatcaaaaaaattatttgggtagtattaaaatcttcaaatgaaacttagtcttaagatttgttgagatctttcatactatcgaagtcatgtagagtggaggtacgtagccaggcctatgagaagagaagagaagagaaggagaagcaagctaagaaactgaaagcctaaaaacttttgaatgttgatgattaaaaaagaatagatacattctatcagcttatgcatttttgaaatagtttttgttaactgtcgtgtagcttgtgtgtaaatatgtcgacgacaagtcaatgatgtcacacacactacacaaaacaaaacactgcttcaaactaccttcaacttcgagtccattactataagcaaaagtcccaaatcaaaacatcaattttcttgttcttgtcagctactcaaacctcaacatgttacatatattttttcagataaaacaaatcattctcatcgttcttatctgaccaggaataattcaatggaagtatgagtttgactcggtttccttttgatattagtcgtacttttcaacattttacctagatagagccgtcctcttataattattcatcatttcatgcttctcatgttacatttctgcaatttttcaactctttgattttatataatcatttgtttcctttcttaatcaaatccatctggctaacattatttagcttgatgcaattaaggtatattatctaatgaggtgatgcttccacgtctttatattattataatccctcaacaatttaaaaaaaagatcctgactttcaattttctctcttgtttcttcttttgatcatcttcaacaaaaaaaagttacgatctttctctccgggtcatcggaatttgagctagtttagctaaagttccgatctttcctctctgggtcgtcggaatttgagctttttaaaatcatgggaaattgttttgccaagaaccatggattgatgaagccacagcaaaatggtaataccactagatcagttgaagtaggagtaaccaaccaagatccaccgtcgtatactccacaagcgagaaccactcagcagccggagaaaccaggttccgtgaatagtcaaccaccaccgtggagggcggcggctgcagcaccaggactaagtcccaagaccaccactaagagcaattcaatactagagaacgctttcgaagacgtgaagctcttttacacattgggtaaagagctaggtcgtggtcaatttggggtaacgtatctgtgcacagagaattccacggggaagaagtacgcttgcaaatcgatctcgaagaagaagctggtgactaaagctgataaggatgatatgaggagagagattcagataatgcagcatttgagtgggcagcctaatattgtggagtttaaaggagcttatgaggatgagaaagctgtgaatttggtgatggagctttgtgctggtggtgaattgtttgatagaatcattgctaagggacattacagtgagagagcagctgcttctgtttgtagacagattgttaatgttgtcaatatttgtcatttcatgggtgtgatgcatagagacttaaagcctgagaatttcttgttatctagcaaagatgagaaggctcttatcaaagccactgatttcggattatcagtctttatcgaagaaggtatattacatcttttgttgtattggtgatatgtcttttggaattggttcattcatgatggtttattttgcagggagagtgtataaagatatagttgggagtgcatattatgttgctcctgaagttttgaagcggagatatggtaaagaaatcgatatatggagtgctggaattatactatacattctacttagtggtgtgcctccgttttgggctggtaaatgcgatgaaattatcggttatttcgattcatatatatttgagaagaatgtagttgcatgtgtgtatgagtatggattgttggctttgggaatgtagaaacggagaaagggatatttgatgctatattggaaggtgaaatcgactttgaatcccaaccttggccctcaatttccaatagtgctaaagatttggtacgtagaatgttgacacaagatccgaaaagacggatttctgctgctgaagttcttagtaagtaaacgatcttattctttgttggttatggtaacttcttgtatacttacttgaatgttgacaatatggttgatgttttaccttttgaagagcatccatggctaagagaaggtggagaagcatcagataagcctattgatagtgctgttctctcaaggatgaagcaatttagagcgatgaataaactaaagaaacttgctttaaaggttagatcaaagattctacaccttgttgccagatttgacagtcctttgtacctttcatcttacagattgattttgacacaggtcattgcggagaacattgacacggaagaaatacaaggcttaaaggcgatgtttgctaatatagatacagacaatagtggtactatcacatacgaagaattgaaagaaggattagccaaactgggatcaagactcactgaagctgaagtgaaacagctcatggatgctgtaagttttgatcaagacaagatcgttcatttacttcttgaatgtttaaaaactcctattcgggtttttgtgattcaggctgacgttgatggaaatgggtcaatagattacattgagtttattactgcaacaatgcatagacataggcttgaaagtaatgagaacgtttacaaagccttccaacattttgacaaagatgggagtgggtaagtgatccttcttttggtatgaatcattttgcaatgtaaatagatttgtttgcattgattgatgagactattactgaaaatgtgtgtaatggatacattacgacagacgagctagaggctgctttgaaggaatatggaatgggagatgatgctactatcaaagagattttgtctgatgtcgacgctgataatgtaaaagccaaaagattaaagctcttctcccttgtaacgtttttcgttttctttctctgacctcaaattttgtttcttgttacaggacggtagaatcaactatgacgagttttgtgctatgatgagaagtgggaatccacaacaaccaagattgttctaacatattttatttgtcttctgtctgaatctaatcaaaaaagacaagagtggtattattattgttgtttaggcaaaaatttaaggatgaaaagagagagagagagatgattgctttcatttattttggtactgctaaactggtcatctcatttggtttgaaggaccaataaaagtatataacagaggaagataacacaatgtaagtagattacaagtagtggaccacataactagatgtatatttaaattatactgattttttctcccagttcaatctttcttggaggattagatttgctaatacatatatcacaagtgttaacaaatctagtgatcagtcatgagacttaaggtccatttctacttgatgaatggtccactgcatattttccagtttctgcaaaaccatgaaagctctcattataattcgtattgttgtattcccacaagtcaaatcaaatttagaaggtgaaatgacttaagtaatgacttgcttgtaccttaacaatgtcatggtactgtctggcaattgtatcaaaatgcggatctactccttgatattctctaagccgagtaacctgtgtgtcatttcgcaggctcggttaattaatcgggagtaaaatgccaatgaagactgaacaaaagggtttagtgctaagcaatgtaagagaggataaagacacaaacc

SEQ ID NO: 5472 - DNA, 1775 bp, Arabidopsis thaliana landsberg
tgcaataagtctccctaattttgggtcacaagattagaactgtatattatccaaaatctaataaaacggccattaacttatgagaaaatcaacaaaacttaattacactttgaccccatgattaattttctcaaaacacaccgcagaaactcttagctaattttcgacatcaacaaatccctaagctcttcctgcttgtagattctcaaccccatcttcacgttcgcttgttgtatcataagatcgttcatcacagaaatgctcgcatgattcacttctaactccaaatccatcaaagcattcatcaatctcgctcctggatgatgatccttccttgattcaactctaaccattgcatcatcacttcccataatcttcacttcgatcttcatcatctctgatgccttttcctcgtatttacaaacgctaggaattgcgtttcgttgtcctgcaatctcctggagttcattgaactgaatctcaatcgcatgtttctccaattcaacgttttcagcttttgatttcagctcgtttatgtaacaaaccgcgtcttcgagcaacgacgttttgtccattttcgatacgtttggtacaaccgctcgtaacgcgtagaatctgtggtttagcttctcacgtctcatcctctctgcttccacgtggttcaacggcttgtctctaccatgcgccggttttctcccgcgcttttttcccttcttcttctccagcatcaccgtcgcgtgagggacgacgttttgaatctgatcagaataagtattagggttccgattttcaaaactctgtttaacattctcgccaaaactcagtacatcgccgcatggagctctcgccaatgtggaagatgacgtcgagaagttcaaattataccggttctgtagataaaccggactaggattcgggttaccggttacagtacttgaacaactgctctctaactgaaatgggaaaagctccgagtttgaattcggggctccggtaaaatctttggatccttcaaaattaaaaaagaaccggatcctattacaaagatccgaatttggtcggatctcctccgtggatgcaagctccaacactccgttatgtgaaggaatacacaagatggtctgtaaccctacatcccctccttgtttagcccgatcacaacccgacccgtaaatcagatccgaaccggtaaccaaaaccgggttatagctagcaaacgccttacccgctaacccggatccgttaccaaaactccacgtcatgttattcaagaagaaccactccatatccgtcacgttggacgtcatcgtcatcactgacgtcgtcttcaaccaccggaaacgcttcgccggagatcatcaagttaagctcccgaataacattactccgacgctctttctcctccggagacgacagaatcgtcttcttcctcctcaacctccctcgtgtcttttcctcgttgccaccagtgtaaactccgtcgccccatttgagaactgcttcaccggaaaagtcatcgtacgacggtttccagaaaatggcgtaactccagggctcgtgggttccattcaacacagcatgtaaacgcttcgggagagttgtctcgaggctgagattcgccggaagtaatggtggcgacggatcggaggtcaagagagcttcgatcatcaataagttatcgtcggtattaatcatcgttgccggagtattagaaagtcgctcaagtctttgtatttatatatctaaactaaacgagaaactatagagtatagagt

SEQ ID NO: 5473 - DNA, 3532 bp, Arabidopsis thaliana landsberg
atacgatgtgaagtgggacgtttcctcagttaaacttcctgcgactattgacccctctactctcgcaagattttttgccttttctttaagagatttcatgaatcgctcaaaaggatacatccatcggaattgcattggcccaccaagagcagtttcatgtagaagatgaatcgacaaatgttctatcacgtcaaaaaaggcaggagggaataatttctccaagttacagagtaacactgggatattcttgtctaattgttctatgacatcagttgtcaatgttcttgtacataggtccctgaaaaattatctgatgcctatcatatatcgaattaatgtaagttaatagtcgtctattaataactgagttaaagaatagaaatagaatctatatatatatatatttattacctgcaattgcttcatgaatatttgccggtagcaactctattaacacaaatggcaataatcgttgcatgaatacatgacaatcatgactcttcatacaagaaaacgtttgaccttgctctacgcattgtgagagtcgaaactcgcacaatagaatttgttttaagggtttcttcaaagaacggatctttgtgagattctcaaagaacaacagaattctcaattaccgcggacggtgttcttgattttattaatgagaaagtaatgattttatcgtacaagtttgatagaatatgagaaataggtgtttttgccttcaaagtcagagcgtttttgatagcctgaagttgagagcgttttttgtgcctccccctttgtttgttctttgaggtgcttttttatagggtccgagaatatcacctcttgcgatattctcggaaaatccctctttatctttatctcgttgaaagagatttgtctttatcctccgaagattctgggatttttgtatctggtgatatctttgaagattataagctaagtctttcgaagtttttctgtctaaaacgagatctttccaagccgtgattaagctggcctcgggtcatgatcgggatgcttggtctgcggtacttgaaggcaagctcccgaggtgttttggagcccgcctcgggatgattttccaagtcttatccccgaggcgtcctaggtcgggtcggggattactttatgagactgccccgaagtgttctcgacattacctcggtatgggttcttgacgagaactccgaggtgttttagtctggttcgggataattcatcgatggctcccgaggcggtgactcataggtcggctcgctatcctggatcaaatccgaccccaacagtttgccccccagctcagtgattcagtagaatgacgagcttcatgaatggatttcccgagccgactgttcgccttctagttcttgttgcttcatcttctcggacggtcaaacttctgttgcatgtcgccgactatttttgaggagtggaaacgtttttcgcttgttcccgaggatcatgcggatcttttttcttctgacgagcccacgcgcttgaatgcattttgaatgtttaatgcggatccgacgcgccttcgaaaaattctatatatgtagcgagccactccttcaatacttcatttgaagttttcgaagaaaataaacaaggtttgcttccttctctctgatcttgaaatttctatcgttttttcttttccggcgaagttccgtcgttcttcttgttaattttgattttgccgggatagaaattctagtttgccggttgtttcccttctcgtccaacgtcccgagccgagaatgagttcttcgcaatcaccgtcgtcccctgtcgattctagcgattcaaaccagccagacgatcttcctccgatctttaaacggagatcagtttggtcttctgaatatactgtttcttcatcgaattcccccgagcagacgactcccttcccggctcgggaagacaccaacgccgacatcgctcaggaattggatttacctgaggatcccgagccgcctctcgttcggaggtcttctgctcctacggtcgatgaagctgggacatccaattggcaagatgcgtccgagcccctcatgccgacggttaagatcgaggattttctttacttcggcctgaatgagacagaggatatcttgcgtcttaacgagcagaaggctttcgagaaagctgagaagaagagtaaaaagaagaaaaaggcggtaatgtcaaatcctctcggttcatcaatgtgtaccgagcaatctctctcggatcttaaggctcgatttggtcttggtgctgtaactttgcgtgttccgagccctgaagagcgagccgacagtcctcctgcaggtttctatactctgtacgagggattcttctacagctgtttcttatggttgccgatcccgagattggtcttggaatatgtgacatcgtatcagatcgctctttcacagataacgatgcggtctttgagacatctgctcgggattttgattcggagttatgagtctgaaactgatattacgcttgctcatctgagaaatcttcttgagatccggcgggttcccaaatccgaagtggatcagtattacaaggacgagccgtatccgatcacttcttcttcgtggctctcggagatgctgttcacgacgaccttctcgggacggttctgacgagatggtgaacttcgggtagttgtagctaacaatttatttgtgtccgacgcggttttatagtttctttttcttacagtagtttttctttgttgcagaacgcaccctcaagttccttgagccgattcgagatgatttcctttcggcttttcacgcgttatcagctcagaagtgcgattggtcgaaacatttctctcgggatcaagtcgaacgagccctccgtcttcttcacggcgtttcctgtccttccaatttggaatcttcggaccatcgtactcaattcttcgtcgatatgcagtcaaccaaacttactttgagggaggtgtacgcgaagaagaaagtagataaagagagacgcttggcaaaggagaaacgccttacggatgcggggctgattttgccgcgggcggcctctcccgatgagactcaagaccggaatgttgctcccgatgttgcggccccggttgacccgacgcctgctgaagctcaagaggtcgatcctaccgctgctgcgcctttgcccgaggcgattgtcgcgctgcctgcgagcgacaaggcggtgggtaaacgtgtgcggacggatgattcatcgtgcaagaaaaagagcaagaagaagaaggcctctagtgccgaggcgggaaaagagctccctatctttgaagatcgggtagcctccgcgaacctcctcggtgggtgcgcctgtcctttgcttcctcctccggatactcttctggagtcgcagaagtatgctgaaacggcttcccacttcttgcgggtaagtgcgtattcaattttttcatttttcatgtctggatctacgatctgtaattttctttctttgttctctaggttgtcgcctcgatgaaccgaatggtgcattcgtc

SEQ ID NO: 5474 - DNA, 1292 bp, Arabidopsis thaliana landsberg
  unsure (1)..(1292): unsure at all n locations
gggacttgatgggaagatatgtgtgttgaagaagatcttgaagggtcttggagtttgttgagtcattgttcgaatccatccatagagaagtagtagaagaagtttcaaacaagcaggaagctggagaaattgatggagagacggctaaagagaaggagatctctgctctgctctatgcacttcacttgaatatgaggtggaagaagtatctgattgtgtttgatgatgtccgggagatcgataactgggacgagaaacnnnnnnnnnnnnnnnnnnagggtgaaaaatggggaaaatatctttcagatggattccctaaagggtctggtgggagggtcatatacacgaccagagatgagaatctggcgaagaaccttgttgttcagaaacatgagatccatcgtctttggccgctatctgatcatcagagtgtctggaagatatatgatgcagtggttcaagataaaaagaaagagtcaccaaggaacgacaggaaatgtatagatgagctgatgaataagtctcgtggtcttcctctggctgctagacttttggctgagcttgatcccgtgttgtttgacgatgaaaaggctgaccagaacggttctaaagatggaaaaaccgactcagtcgacaaccccaattcagaagagagtaaaactactcaacctctgtagagttgagaagatttgagagccctttttcattgtgtcatcaattattgtttctgtttttctgagttgctggtgtctgattgtatttcagttgtatcaataataccagaatctccaagtagagtttcttcaatgcctcaaaatgtttcttgagtttagtgtctgaaagataagagttagttccttgcgtaccttctctagtatctgcggtataatcaaagttccttactcttaccctctttgcacttgtagatatcttgctggtttggctttcaagtgaacattttaacaaagaagagtggattgcttgctttgcttattatgtgatacttgttgtatcccgaaaatttgttttcccatcaagagaaatgcctttttatattggctgatgatagttactatatgtcattttaacatctactggtttctctttgggttgcttaataatgtctgtgtgatttccttcgttttgaagctctagtgagtgtttggctgccggtaatggaagttacacaaaaatgtataacttttgtgttaagagtatcccccaagtagtcgactacccttgctagttgctacatnttaatctatttacaagtttcaaatcgttagcaagta

SEQ ID NO: 5475 - DNA, 1283 bp, Arabidopsis thaliana landsberg
cttcatatatcatccagacactctcagtatccgtcagaggccaaagacgatgtatctcatgttcttctgcaactagcttcttcgccagagtttttttctcatccctggtcgtgtatatgactcttccaccagaccctttcgggaatccatctgaaagatactttccccatttgttctccttcttgagtttctcctcgtcttcctgaagaatctcgttccagttgtcttcttctcgcacatcatcgaacacaatcagatacttcttccacctcagattcaagtgaagtgcatagagcagagcagcgagctccttctctggagctgtctctctatcaatctctccagctccctgattgttcggacgttctagattctttgcagcttcttctaccgcctcatcatggatagttttgagcagcaaacctttagctccaagacccttcaagatcctcttcacgatagatatctttttatcttctccatcattgctaggctgcatagaaacccaaatcctcggggcataaacattcttcacatctttatcattgaagatcgtcttgcataatgctgtcttcccaacaccatattctccgacaatcacaagactcttgaactccttgcaaaccttttggtccaacaagaaattcttcaatgacttgatctcgttatcgaacccgtggattgtctggcccggaagttcagagttggtttccacacgatcctcctcaatttctgccggcccttcttccctcttcttcaaaactcctgcagcaagatgtatttttacaggagttaagacgacgggagtgtcttgtttttcttcttctttgggattgggaggagcgagccagtttttacattggatactgaagcgttctttgaaatctcctttgagtcctccgttctgtggattgtctgaaggcatattcaagcgaagctgaacaaaaaaaaaacgagatcccacgaaagaagatgaagaaaaaatgaaactaggggagagcgagagagagaggtatggtaattatttgaacacttaattgacgaaaaaagaagaaatacaaataatttgctttagtacatattaaaaaattagttatctagagacaggcactttggattgaatatctgcactattagatccaatcggatgtcaatatataaatataaataggagatatatatgaaatactccaaattatgctatgttaaacttatagtataaataagaattaataaaaatttattataggatttttcttttacaaaaagtcttcttttttttt

SEQ ID NO: 5476 - DNA, 425 bp, Arabidopsis thaliana landsberg
ttgaacaccttgtaagacttttgatccaacaagaagtgttgcaatgttttgatctcattctcgaaaccatagatgtcatgggctggaagttcagaatcagattccaaacgatcttcctcctgttttgtatcgtcaccggttgtccttgaccaatctttatatctatcagcaaaccgatgtgtgaagtcgtttctgcctacacttgttaatccgcgcgatgaatcttcttgagtcatttccaagcaaaagctggaacaaagaaaagctttgcaggtgaaatcaacaagttttgccttttccagcaaagaaaaagaagcaggagaagaaaagaatagagcgagagagagatagaaaagtgtgaaaaaattactaagaaaactgttaattacaaaactatgtctaaattgtttttggtttttttttta

SEQ ID NO: 5477 - DNA, 543 bp, Arabidopsis thaliana landsberg
atgtcattactgaaactttattcaccagggactgttacatcacccaattgtttgtgaaatatcaaggttattgacagcaagggtcctatagatctgaaggtgtctatgcaacaatataaccaaaataaatagagaatattataaaaaagagagcataccatttgacccagttttacccatccaagtataccaccgtcctttttggaaggacaaatcgaatactcagccgcaagatcactcatctcctctcctacacaagaaacagttacttgaaaaaacagtagacagccttaatcttctaatacaaacaaaacaaagtgacagtcgagtaatgaaaaattcatatatgtgtcagtatgatatgtgctaaccaaaccccaaaaccaattaaaatcgagtaagcagagacgccattgactatagacattgcgacacataatataagttcagctccacagcgacaaagctcatggcagaaacaactttaaaagcttacatgcctagctacttgtatgttgaaatatcaaacgagttaaaaaggat

SEQ ID NO: 5478 - DNA, 807 bp, Arabidopsis thaliana landsberg
gatcaaaaacatctaaaaacgattacggataagattaaagaactcaatttctgtttcaaagattggtcccggatcttcttcttcaataattttcaccaacttcgagcaatccgtgtcgaagtgtaccgaatcaagacctctatgtaacgcagagtccatagcccaagtgagagcctccagttcagcctgaaggggggatagagctcttgacttacctctagaaccgagtaagattcctgatggagtatcgatcacgaatccgagaccggatgtgttaccatctgctacccaagaagcatccacttgacaacggagttgtctgccttctattatattcatgtgatatctattcgagatatgaatttaattgttcaacaaaaatatttacttacaaaacattacttaaaattaagaatggtacatgcaaaaggaaagtaatagcaaaatttgtatcgcatgaagagttggttgcaaattagatcttgacaatatcgagtagaatttggtctacccaattgtgggctagacgatgtcttcagcgttttattcttatgattttatcaagaagaaaaccatatatataacattaaagattaattcacatattatttcaacataacttaaagcattgtacttactaactagtcatcttttgggctcactagagtatatttcctatttatattggtctatttttaaatactctctttaaataatttatgtaatacgatttaactgcttaattaatttgtgctgcaccaaaactttaatagttaaaattttaaagttatcaactttaaagtatga

SEQ ID NO: 5479 - DNA, 1170 bp, Arabidopsis thaliana landsberg
ctgtccgttgttgttcgggatggcttggagcatagtcggactctcttcctcgttttccgctgattgttcaataatttgcgcaagtctccaattagtggcttccgagattgcgagttgtaaggtatcaggaggtaaaatgtctttattattaaagatcttatcattcctagctttccaaacataccaaaggatccatggaaaggcttacaaaatcttctttgttgctcccaaaccttttgctctccagaggaggaaatcacaatttttcaagatcgactgactcgggaagaatcccggattggtgggaatattggacaaggcccaaacttgcattgccggagggcactcaaagagaaggtgatttatagattcagaaactccgccgcatctcatacacgtacgatctgatccacaatgtcggtctacgagtctgctagaggtcgctaggcatcctgagagagcttgccagaggaaatgtttaatttttctagctgtttttactttccacacttgttttttaaggatctttgtgctcggttcagtgacctcattctcctcatcattccattgcgtcgctcgaagatacccagatttcacagtatagtgacccgactttgtgtaaatccaacaaaagtcatcgacttggaagcgtctgctcggtttgaggctcagaataagaggtatatcgctaggatcgataattgcttggatgagctccactttccactcttttgtgtcaaaatcaattaggtgattgacatatcattgaggatcacgatgagcaccaatatctttcgccggacgggccaggatagtagggatccagttgtctgtccagacttttgtgttaaaaccggattttatgttcttcttaagtccctcttcgagaagggatttcgccgccaaaatgcttcaccatacaaaggaaggggaatttgctggctttgactccatgatattagaatatctgaaatatctaccttttaggacacgactcaagagagagttggggtatcgaagaattcgcccgatctgctttgctaatagcgctatgttgaattctttgaagtcacggaagcctaaacccccaccctgtactggtatacacaccttatcccaagcaaaacaataaagacccctattgttgttcttggtactccaccagaattt

SEQ ID NO: 5480 - DNA, 2706 bp, Arabidopsis thaliana landsberg
ttactactcatggtctgtgtcagtaagtgaattttatgcattatattattcctcgtgggatccatttggttcttctctgtctaaccatatcatgacatgtcatcactctctatccaccagtccactcattttaattgtactttatcttctcagcacaattttatattttattcaaataatggactatataacattagaaggaattaatcttcattagggaataactaaggaactgtttttccaaaaaaaatgaatttaatgacatacctattttgtccaaattttcgtgtttaaaatttagagtttattttttggatttaagtgtttaatttttggagtttatatattacgaatggtaatttcaacatcttagaacgaaaagaaagatttattttcttgtttctttcagaaatatatttcctagatatggtaacataacaacaatagaataacacaagaaattatcatactcattaaaaagcgtacgggataggagttggagagatttcatcacatcatagaacataatacattacatagcgtagatttagggaatggtacaagaacgttttaaactgccttaaccggtgttttgtagaccagcagcaatacccttcatcgtcaagatgagtgtatcttcaagtcctggcgcgtattcgctagtcgggttaagctcgatgagttcttttgctggtttgctcgattccgctatctccttagaaatgtgtggtcgcagagtcacatggtaactcggatcacggattctcttcaatgtgtaagcttgacagacattgagagttgtaatgtaagaatcacgaagtctcagtctctgtttcaagtaaggatcaccttcaagaagatctttgtgtccagcggtctgcaaaacatcaaagccattcagacaacaaatagtaaaatcaataagaagaaagaagtcaagaagactctgtttttacctggaggatgagtttcttggtttcttcgaagttagctctgagtttctcaccaaaaggccagagttcctctgaaacaagaagcttatcgtacaaagcagcaataccaggatctcctttagcgaacaccatttcgattagatcaatggtgactctaaagaaaggccagtgttggtacatatcttggagcatatggaggttcctgacgtctttttcgatcacatgtctaattgctgatccgaatccaagccatacaggaagatggaatcttgtttgagtccaagcgaagatccatggaattgcacggagagattcaatgccaccgcttggtttacgcttcgaaggtctgcttccgatattcatacgtccatactccagttccggtgtagcctgcaacagattttaagattctgtgagttttaagactctgtggcgtgagttaaagattccgagtgaatgtaataatacttacgaggcggaagtactcgacgaatcgaggttcttggaaaacgacagatcggtattcctcagttgcaacaaccgccatttcatcaagcaaagcacgccactcgggttttggtgaaatcggagggttcattccgtgctctagagtagctgctgtgaaacgttgaagtgttctaaagcataagtgtgcctccccaaatgattgctcaatgacttcaccctgaaccgtgactcgaagagagccattaactgtatctggtggctgagacaatatagcaagatgagtaggaccacctcctcttccgactgtgccaccacggccatggaacatagttagcttcactccatatttcttagcaaccttcacaagctcttcttgagctttgtatagctcccaagcagctgagagacgccctgcatctttccctgaatctgagtaaccaatcataacctcttgtttaccgttaatacggtttttgtaccagtctatagaaaagagtcttgcaacagcggcaggagctgcttcaagatcagctagcttctcaaagagtggaacaactctaagtggatttttcacatggcattcacgctgtaaaagctcaaccgcaagcacatcactaggtgaagttgccatagagataatataagctccaaaacaatctgaaggcagctcagatatgactttgaatgtgtccaggacatcagaaatttcttcggttttgggaagatcaggtccgaaaagtggacgtttgccgcttagttcagcaagaagccattcctgtcggccttcttcagaccagtctctataggaggaaccgatgtccaagtgcttggtgatagcatccaagacatctgtgtggcgttcagactcttgcctgatgtcaagtctcacaagggagagtccaaaggtagagacttgcctcaagaaatcaagaaggcttccatcatctatcgggcggtcaccacatgaacatagcgatcggtaacagagctcaagaggctccaagaactgcataaatagaataaaagaacagtaaacacaattgaattccgagaatattattgagggaaacaagtgtaaggctggataatgatagaaactctaatggcaagaactaacaagttgttaaaatcaggaaacaatttagtaaggaacaaattcagagtatagaggttgctcacctgttccacattagtgaaggtagcttcttcaggaatatccgagattccattactcagcaattggcgggaacgctcacgtgtgtgatacagattattcctcacatca

SEQ ID NO: 5481 - DNA, 1944 bp, Arabidopsis thaliana landsberg
gaatatatcttgccgccaaacacagccgtagcacgaaaatattttcccgccaaaacacggaacctttcgcattcctttacctgtcctttttaataattcttgacaactcagccgtataatagttacatgtcttgggtataactcagccgtaacaatatattttgccgccaaactcagccgtagtacggaaatttttccggccaaacgaacagacacggaacctttcgcattcctctacctgtcttttcttttctataaatcagttacttgaactcatcatttagacgtctcatcctcacatcttaacgacatggtgcctcacatcgacgaacagtttctaagagatgtcgaagccgtgctcaccgctcctgatcgtggattgggtacatgggtcgacaaaaccactgttatgtggttcaaattcaatcaccaactagctgtcgcaattggtgatatactccagcgcaactttcaccatgcgtggccgacgtaccggatgattcccgttgttttcaaggcaaggtggtttttcctcctcacggtaagcatcgagtttttatataaagcacttcctgtaaaccgtagaccaaattcttactatttgctctctttgtagcgtatgcacacctgggattcaaggcacacgctgacggtgtggacgcagtttaatttggtggctagaacgttgtaccgggacaatatgcgggtgctgaaacggggatgggcgcgtggtttggataagccgaggtggatgacgacaacagtttggaatgatttggtggacatgtttactgaatttgacccggatgatgtcggtttcatgtcttgaatgcttttgtgtctcttacttatcgtccctttatctcattcctatgaactcaatatgtttctctgttttttttttgtgatggctttatatctcatattatctacgatcgccttctcagtaaagtcagtggttatcgcttgaggtaacttgttaaattttatcataactcagtcatagcgtatgattaactcagtcatagcgtataattaactcatccaaaacattataataactcagccgtaacctatatttccgaagatacaacagatattaactcagccatagcgtatgattaactcagccacaacattacctgtataactcagtcaacgatattggattagcttggccgaagacaaagttccatttcattgcaagctactacttgaaccaaaaaaacgaattaaccctatacgctgagttaaacatcaaacacataatggattccagtagcaaacaaatcatacaaacataaaacaaactagtagcccagaaaaagcctctgttcgttgatttttgggaacattaagataccaaaaacaatgacaatgataataaaggcaagacaaaagcagcaaagtttgatcatcaatttccatttctggttttctctttcgctcctcatcacttcttccttcagttctttcaccatcgcctgtaacgcttctagctcgacagaaacctcggacttggccgcgcttaactcactgtcgaagccggccaatttcggccaactgtctacaaccacttcgtatgtaccatcttcgacccatttaaacagatggtcctgtatattcaatcacatccgcaattaacaacgaaaccaataaaaccctcaaatcaattatatacttacatctaaacgcgtaggacaacggaagtatggtcttccagggttctttgctgacgacgacgtatagatgaccacgtctaatccgcaatgacacttcgatggtaacccacgtccccaacggctgacggattgcgtactcgcaatcgagttctcggaattgctactcatttctttaatttttagctgggaaattcggagacgaaaagcaagaaggagctccggatctgaaatcagaaattggaattttaaaacttaggtttct

SEQ ID NO: 5482 - DNA, 2169 bp, Arabidopsis thaliana landsberg
atccccacataattataatatttattcttttcaattctcataattatattcaattaaaacagacataaatagatgcaatcaaacaaaattaaaatctaaatggcataactgtagtaaaaaatttcaaccccagctttcatgtctttttacacccttagagagtcattctagtaggcactgtaatcaagacggctattagaagtatggtacttgctactaaccggatctcaaccacttttccctcctatttttagcaatacccaacggtccctagccaggctagctttttccggtgcgtttgcgaggtttctgatgaacttctccagcgtggacctgatgttttctccctctgaaacttccttcttgctaccatctgatatatctgctctccttcaggtatatcccctccctctgctttcctggtaaccctgttttaaccctgttgaactgtgtttaaacctatctgcaacttcctccggctgctcctgaacatttattgctccttgaaagtttgtttcttccaactattaccatgttctcatttattacccaaacctaacaatgagtacaagaatccatgctcaccttaaaggcaaaagtttagcaagaggctactcctctccaactcgcaaacgaatctgagctccagacctagatacttcagagcttattaaagcaaatgctctcactctcatgggtcgactcactaatccagcggctcaacgtctctggtctctctttcctttcctctccaacagatggaacctcagaggaaaggctgtgggctcaggtctgggaaaagggtgtttccagtttaaatttgattttgaagaggatatgtagaaggttctagataatagaccttaccattatgaccaatggatggtcattctccaaaaatgggacagttttctgtgactcttttccatctatgctgcctttttggattgaactccaaggtctcccaaaacactactggcaagaagaaatgttaaaaaaccattagtgaagagcttggtgaaatcttggatatggagatctcttcttcttctgtcaaactcaaagtgcttatcaatggactccaacccctaacaaaagagatagtggtagagttccctgatggtagtgaagccttagtgcttcttgattataaaaacctgaaaaatcactgccgccattgtctaagactatctcatgacattaaggattgcccaggtttaatttcttcttcaaaaaaatctaaaccgcccacctctactcattcccgaggctcaggtggtgtctcaaggaattactatacccctgcagacaacttcgttgcatccaaaagccagggtagagggatctctcctaatgcttcctctcagggccacggatcctcttctcataaacattattctgcggtggatagaactaacctcccctctggagaaaggtctagaagtgtctttccgcaaagaagtgtttcactattatcctcagggtatagagcacggcctagctctaaagctcaagtttatcacactaaccaccctcatggtgcgggttctgctaatctggggaatctctaatggcgagaaaaacactcaaatgtaccaagattttcccaggaaacctctgattcttccagaacaagaagaccccctcttgatagagatgtcctctccccggaccctcaaactccacctcccctgcctgctcctctctctacctgcaatcaaagactttctgaggtctcttcccaccagatgtcataccttccaaagatcaagtccttggtgaactgcgtgaagtcactatttaatacttgacgtgtgttgatcccactgaaagcgcagctaggaaacaaagagttattcaaggcgaggctagaaacttgatgagtaatacagctgaccaaataattgaagccgccgctgcttccatttccagtgatgaccccattggacttgcccttcctgcttcccctgagcctcgtgtatctattagggaggatccttccctacctactagttctcatgtagtccacgtgaaaagaggaagaggtcgatcaccactggctaaaaccaattcaaagaatcctgcaaattcctcctcaaagttaattgggagccaaaagccaaaagagaaaatctttgtaggaactcaccaaagaaaggaactggatct

SEQ ID NO: 5483 - DNA, 3863 bp, Arabidopsis thaliana landsberg
gtcatatcaaggaaaggatttcaatgtgcgttggacgaagatgcagaaaagtggggcaattgaagtgaacaaaatgaacataggagaactcaagctggagcatgaaatacatgtatcaaatggaaccatcctccaccagaatggatcaaatgtaaatatgtaatacatatggtgcttggcaaggacaaggaaatcagagtggagttgggtgggttatcaccaagggtcagggttatggatcggagaagagaccttataaagcaaattctatttgttaatgacgcgttaagaatatattcaaattgatttccattttttatgatgaggtggtgaatggaagtttatagatgcaagttgatacaagttgattttccacttttgtaaaaacttaaaatgatacaagttgattttcaccatttcaaaaggctcagatccgtgatcttttgttagagaacttgtcactaagagtgttgcgaacaaaggcgttggaaaaatatacaagaaaagaggattaattaaggtgttattattatctttaacatgataagttacaattcagaacaaccaaaagattacaaagccacaagaaagaggcacggtgagatcagcgtacgtacatagacattttattttacttatgttaaaaccataatctgattatacatatatatataagctccaacttcactcgacgctgcaacaataaaaacaatcaaaacgtataccttaccaaataataaaaattatatcatggtgtttagttagaatgagtacttaagttaattagaaagaaaaagagaggagactaactatatatgtacaacaattaaaaaaaagcttacttgtcgcagttagtgctcaaggaaatgggatagggaatgctaacaccgcactcttcaggaagaccagaggctagacttgggttgagaccagaaatgccctttgcaatggactgtaggcatcggcatgctcgttggcggtccggtgtggtttgagccataccgttcaacttttcaactccttcacaacacagatccggtaccacaccaccttttgaaaggtagttggcacatggagccaagttacttaccactgtgccacatgagatttctgcatctactgatgaaactatgcacaccgtcaaaacgaagcatatgaagaacctgagagccaaagccattgtgtttgctctattttgttttggttattacaaacaaaagtagaggtttagttaagtcttgttttctaattaagcttgtgttttgctattggatgtgagaaaagtgggaggtgatgatgggtttaaatagggattttagatggaaaaaatggtgactaagtatagggtttgttagaagttagatacgcatttactttattcttgtttcttccactaacgagaaagaatgttttgctatagtcaaatgtaaacaatagtacgtatcttacttttattttttatacttttattttgtatattttcgtattttaagatatcatacttttgagcgattcagcagatttgaatagtaatactgataacatgctttgctaaacatacgttagcaaagcataactaatcttcaatatcgtacatatataatcaatagtttgctagctatgtgtacggactatttcagtaccgttcatatttcaattcaatgcaatgagaaactaaggaacatatctaagtgtatcctccaccaatttaatttgtttttagctatgagtactatatctaaattgatctatatatttatcagttactatgtacattaactttttgtcgcctatatctttatttattttaagatatatgttttgattcaaagcaaggtcatcactgtgcatatttttctcttaaaaagttaacagttaaaaggatggagatggcggttactggtttgaaatcggagatttaattatgctaaatctcaattaccgtccaattagtgcaatgtataactgagggacacgtgtatccaacatcaaacatgacaaattgacaactctcccaaccagcttatttgaagaataaaccaggagcagagtttaatatgtaagtccggttatcggagtccttaaaattaaaccaagctggttttggaaattgagcaatatatggtttcaataagttgaagattctgggcctttaacggacctgatgaaagcccaacgcacattacgggtttgagtcaatgactatgacttgaatgtcctaaaggctaagctccaaatgttgaccaaatcaggagatcaattctgacaatttttcactagcaaccatactttgaaaaatgctatctgatttgagagtatcagatgcggtataatgggcttaaccgcttaagtcgctgacgaggaacttgagatggctttgcgttattgcgtagtaaggtattacaacacgatattggacgaaattttgcatgacattagtaacttgacgcaaacgcagagttgataaaatttgcatgacattagtaacgattttgtccaaaaagaaaaaaaaaattctttttttttcttcgatgcataatcaaatcgtgaagattgataacattgttcttagattaaaaaaaacaatgttgttaggtgtttgttatttaattaggattattacttttgttatttaattaggttggtcaacgtaaagttttattttttcggataatggtaaaatttctattgcagatgcagcagcttttactttatcagtatggatgagagatttatttttttgggttaaaggagaaaaaccattgagcatgtcttcttcgtataaatattaattttataaataatgtcactccaaaactaggaacttaatattattggttacttaatagttataaaactcttcacatattattattacgttcgtatgcgttggaggagatatctagaaagaagatgactaataaggtactattatcatagttttagcacatcaatacaacatatgatatgaaaataagacaaagcattgagacaaaaacaaatacatggtaatatcagctaagatatatagccgtattttattctagtacttctggtaaaccatactcttaacgccaaaacgacgacgtaagcttccacttcacttgatgctgcaacaatccaaacgatcaagagaacacattttgtcattagaaaaaataattcatggtctctagatcaagtaaaacaaaactaaatacttacttgttgcagttagtgctcatggagatgggatatggaatgctaacaccgcactttccaggaaggccagaggctagacttgggttgagaccaggaatgctcttcgcagtgggctggatgcatctgcaagcttgttggcggtctggtgtggttttagccatactgttcaaagttttgactcctgcacaacatgaaggtggcaccaacccaccttttgataggtaggtcgcacatggagccaagctacctgccactgtgccacatgagattgcagcatcgactgatgcaactatgcacaccgttaaaacaaggcatgtgaagaacctcaaagcgaaagccattgtgtttgaacttctttttgggtgataacaaaattagttgagtttcgttttcttagcttatgtttttgttgttggatatgaaaaaagtgggagatgatgatgggtttatatagggatttcatatgggaaaatatgatgactaagtagggtttgttagtagttggattcgcatttacttcattcattccttctagtttattctactaaactgacaattaagattttgtcaatagtagtatcacatcgaaaagtatgtactacctctctccatgatttttattttttttatcaaacctctctctaattctaaaaaatatttgt

SEQ ID NO: 5484 - DNA, 1231 bp, Arabidopsis thaliana landsberg
  unsure (1)..(1231): unsure at all n locations
ttgccctgtgcccatgttattgctgcatccactgatgcaacatattaccgtttatcaaagcatgtgaagaacctcaaagcgaaagccattgtgtttgctcttctcttttgggtgataacacaattagttgagttttgttttctacgcttgtgttcttgttgttggatgtgagaaaagcgggagataatgatgggtttatatagggatttcgtatggggaaaaaatgatgactaagtagggtttgttagtagttggttttgcatttacttcatgcattctttctagtttcttctactaacgaaaataattagtttctccagtcatatgtagttatgtttcttctactaaccaaaataattagtttctccagtcatatgtaattatgtaaacaatagtatcagttttcagaatgtacaaagaccaatacgtcaatatatatacagctatactgttaaaaaatatatattcatttatctgcagttaattaaacttgtttttttaattagcatgtttagagcgatgttatactgtagtagacaagagaaaatcgtttaaaaatttgtatcttcgttgtagataaaatgtcagctattatgtgtactatatatgtaataccgtccaattaaatgcgatgtgcagctgatagacacgtgtatccaacactaaacatcacaattctcccatcacgtttactaattatggccattataattagcaaagttcacattttatgacttactacataattgaatgatagaggtgctatatggagtttttctcgatatttcgtataatcattaacataaatgcgtttgtcaacaacaaaaaagatttaataaataatctgaatgataacaaaatttattataatcgtacgccaaaaatacgttttatagccctgcaggaagatttttacgtgaatgccacatcaattcaatgcataattttgtatacgaaccataataggacgaaaaaaacagtctttttctaactatacttgaaaccaattctagactcaagcgggaataaatacacgaaaccgaattcgtcttatgcagtacatagcatgaatgcaatataatctccataacactatcgctctataagccatatataactcatagtcacatgcagtctcatatatttctcatagttacacatattacaaaatgtctttaactttggngtttcctttctacgtacgcatgtgatgatgctttctcgatgtctt

SEQ ID NO: 5485 - DNA, 551 bp, Arabidopsis thaliana landsberg
tacacttacccaatctcaaaattataatttcactccaaccctaagagcttataatatgttttttgttgtttaaaaagagcttaatattattggttataagactcttcactatatgatttttacgtatgagtgtgttggcggaaagatatataaactataaagagaaggtgattaataaggtaccgatactatatattatcatatcttaaacatgttaagacacaagtatacaacataagaaagcaaaagattacaaagccatcaagacaaacaaagacaagtaaatatcagcttagatagccgtcttattttacgtatacgaaaccatactcttcaggcaaatgatgtcgttattccccacttcacttgatgctgcaacaatacaaacgatcaagagtataaattacatcactagaaagattaagtcatcgtctcaagatcgagaaattagccaagttaaaaataataaaactagagagaatatgagcagtactgctcaattaaaaacttacgtggcgcagttggtgctcgtggagatgggataggggatg

SEQ ID NO: 5486 - DNA, 4125 bp, Arabidopsis thaliana landsberg
atttatccctgtttctaaaataatctgcactaaatctatgaaggaacatgactttaaaacctatattcatcaccttaacacagacgtgcacctaaaaattcagctagacactacaaagagataaatttagctagagatttcctttattgcacaactaaatccaaaacagatccatctgatatagattccttgttaagaacatatggaagttcatacaaataactagtaatccaatcaactgaaacttataatcatcttattcacaaagcaccaaatacatagaaatatggttgtgattacaaactctgcatttcaaataattgatcattcaggaaaactctagttctcaaaatcggtgctttgcatccgatcagtaccaacaagagacagcttgttatcatatacatcgatatatccaaacgaatacgtacctgggggacactccaaggcagcttccaaggatctatggtgaaccccatgagaatcaacaaagtatcctcctttatgatcatgtccggacaaacaaactttaacagagtcatacttgtgtataatgttcatcacttcatcaaaattccataacaaagctgctttggatgccacaccagggctcataggcacatgcccacatacgataactctctggtttgaattcgatgcatcctgaagaacactgtctagccattgcagctgtttctccccaacaccaccattatacttcacaaatctccttgcaacatcctcaagccctgcggggctgtttttgtctgtgtttgggttcttttcttcaagtattttcaatgcagcgatagtattaggatgttcctgaggccatccaacagcactgatgtcataaccatctaacaccacaactctatactccggggttggtgagaaatcataataagcattgccatcacgacctgggatcttcagcaacggaagcaactcttcgcgggggagattgtagaggcagtgattaccaatcatatgatacacaggaccgttgaatttctcgaattcatggactagtttcttagtggcagccaaggattgatctttgggacaaaagccatcaacaatgtcacccatgttaataacaaatttgaggttaccatgttggttccaagtttcaacagctctttgaaggacaaggatgctgtttctgtaatacctaggaacacctaaaaaagagcggccatcagaaatatcagcatactgaacatcagcaataacaccaaatgagaagagaggctgtctggctgcagaacccatcaacctattgctctgtgaacatcaaaagttatgttagaaaaaactttcacaatgaataacatagtttagcttcacatataaaccctcaggactaaaaagccacgatttttgaaaactggcacatgaacaagtttctgatctcacaaatttgagctgaaccttttattaaacagtagttgaaaaaatcacaaaagaaagggtggaacaatgcaattgcaggtatatttgtaagaatctaatcccattcgtcagaattgttttcttaaatccattgtaatagagaaatcgtagactcaatggtcgatatcggcgtagatcgtgaaaataaaacgaaagtcgtatggaaaatcaacgacattttggtaaaagacagacttacgacagtagagtttcctgcgaggatcagacaaggaatgcgcagaggtgaagcagaatcggacaaggcggaagaagttctgggtaaattccagagaagatagctaaacacggaaactcaagtgaaactggagaattttcttacaaatcgtgtagtttttctttacgctggttaaactacatgctgtttctttccgacgaatgccaagaagagaaaaaaaaaaacgccccgttaatttggtttgggttattgtatcactaattcttatgatgggctcatcaatggaggagtttctttagtttatattttagttttggcctttcatattttctttgcaacttatctcttattataccatttcttcttcaatatataatccaatgtaaatgcgttataaaatccattctcttagcttggtgttatgaaatcattcagtaatgagtagcagcattttctctttatgcatatacctctacttgtagcagcactttctctttatgcatatacctctacttgtagatagaatccaaaactaaaactcttttgaattgaaacgatccagtttacaaagatagacaaacaatcgcctatcacggttaaaaaaagagtgatcttagcatatttgttaatttatatcagaattcgtggggttgtggggtaaagacttgctacaaatcatacatatttcattccctatttacactcgtcaaattcaagtcccgctatcttctccttgcgaaaaacggatgcctcagagcttcacgagcggttattctctctgacggatcaaatcgcagaagtccttgcaccatatttattaactccccggctgagtggtccacatgttgcattattaaattctgcaatacaggcatcaccattattttataaactaccataacactccacccaaactcaaaatatcaacacttgaccaacctgaagccgaggaagcttcaatactgccttcaggctatctcttgaggttgccccatctggccaatccaaacgacctcttctcacatatttctctgagtgccggctttaccaaacaacccaaaaataaatccagttaaacacccaacaatatatacaatcacttcagaattcagaccgtgtgttttattcaactcactccactttcttcagcatttgttgaggaaacggcccaagaacacgctccatcatcgctagatgctccaggttttcatgtgtttggaacaatgcttcaccctacaaatctcaaatctttcaataaaagactcccaaacattcattaacaatcaactacttcagacacacaccgtgcacaactccactatgatacatccaacgctccaaacatcacacggataactccagccaagacctgcacacaaggcaatgtttctccataagtttgtgatatctaaaaattttaatgagtttttataacaagagctactcacctaaaatgacttctggtgccctataatgtctggttgatacaatgtaggtttggtcctggcgctcataagttgtgctaccaaaatcaatcacctttattgcacttgatttaggcactcttttatagcatacatccctttgtaatcgggacccctgcatcaggaaacacaaccaaattccttcagcacttaaatagttggccacattaaggtcacacacagttgcattcgagatataccttgtactcgggaatcttcacatagtctgaggagactaacagaatattttctggtttaaggtccgtatgaatcatgcgcaagtcatgcataactgcaaaacaaaaatagacaagaaaattgccataagaaatgaaaagagctgaaattcaaaaactaatgatgtaaccatctcagtgacaagcaaaactcagataaaaatgcacgagcatgtagaatgaaaagactgcaaagactacacacatgctacacattccaagagttgccagccaatctcacggacaagatcaatgggaaaggagcgataattgtttttccgaagaaaatcgtataaactcgatccaagcttctcaaatacctgtagcaaccattttaagttcatccacaaaattcaaccccaactatttcccaaaccggggaaaatcatagacatcacaaaattgactaaatacttacaatacagatatggttacgatagtcaaaccagttccgaatttgtacacaactgcaaggaatacaatgatttaacctttgcaaaaaagaatcttggaaaactatgcttgacttcatcagattagtgatgcatgaagaaaaagtcaacaggcagtacataccgatcgccccctttgacatgtttaccaagctgttgcagcatttcaatttcaatcatagcagcctcacggtatttcttcacagcgcggtcaattttttgtgacaccatttccaaactctccctataacatcataagagctggtgaccagaagagctttcaaagacgatttagtaggatc

SEQ ID NO: 5487 - DNA, 1704 bp, Arabidopsis thaliana landsberg
attccctaagtatcccccttaagtatccttaaccattgatgttgcttttgtttgttgtctcgggctatgtgaaacctctgtttcaatatgtctcgtctggttatgaatctgtacactcagttctttggccaaaccgtctgatggattttgtagtcaagtcttcatgtttgatctatgtaatagattacacttaagtaaacaacttcatttttattctatgcaatagattacaataagtaaacactatttcttctatctgaaatgttctaattcttcaatttaagtctcctataaccgctactctattaggtaactgcatgttggcaatatcttctctaggaagtgtttcctcggtctgagagttactgaagtctaggaaatgtgtggacgaggactctctgtttttacggaggacaaggtaactgatggcagctaagtaagtggcaatgcctgagaatccaagaactcctaagaaaacaatggctacaaggttcatgtgactatggagaagcaacttgatgaagctgcttacaagatagtaaatgtttatacccataataagtccaccaattatccaagtcaccgatgaaatctacaagaaacccgcaggttatgttagatttctttccttctattgatgttatgactaatgtatatgacagaagtgaagttgaatattattaccacaagtgaattggcgtgtgagcccattttggttttactgcttgtgaatttgagaagtgggactaaagcaaatgggagttcaaaggataagatcatctgcaaacatataagatgattgatgttaataaagtatgtatgtgattaagagatcggatttaagttatggaagaggttataccgaggcaatgatgattaactttccggctccagctgagccacctatcaaagcaacgatcaaacttgggattatagccaagcatctggttaggaagtttctgagccatggttctagtcttaaatcaagaaacccctgaagaaaataagagaaggaacaagattcagacacaagttagggcttaggagcatttttctagagtttgatcacctgcataacgtattgtccagcatatgttccggttatggttgaactctgaccggaagcaagcaacgcaattgcaaatagctttgagctccatttacccacaacgttctgtgagacaaccagaataagtatatatatatcctctaataatgtgagaagttatgcaagaaattgaagcaaaagatataggattcatggatttacacgtagcagaaatgaagctttgtttaagtccaaatcttggcaactagctcgatcttctggactcaaatctgaggcattacaaactgcaccactcactgatatcacagagacatttatgagaaatgccaccataagtgctaatccgctttctatcaagtaataccgacaagcttcctgtaaatgagaacagggaacttaaagactcacataacgtccatgaaaatgtatgtatgttaggtgattagttaccttgatgccggttactgaacgaggaattttcctagagagaactaaagctgagtggagaaagagattgtgcctgtgaagaattaaaacagatgagtattttcgtaatttgtttgagggatagagagacagagagttgcttacggcataaccatggcaccgaggagagatatcgctaaaccagggct

SEQ ID NO: 5488 - DNA, 1084 bp, Arabidopsis thaliana landsberg
  unsure (1)..(1084): unsure at all n locations
gatgagttttttcaggtttgggcagctctcaagaaaggcgggcaatagttgtaatgatgtgctggagaatgcagccttcaaatgagataggtgatggaatttgggaataggcccgagttttgaataacgacatatgacctgcaaaagagaaacagaatgttattaagtgaggaatcattccatagctagaaaaactaaattgttaatcacagagaaacattatttacctctagagtacgttgagagatgatcatctgtcttacactcgatataccagtgagaacgtcacggataatatctctcggttccaaggaactgtagccaaattcagtatcaagatttaacttgaacaatgaactcagattctttaccatgattgtatcagagtgcctatttataaaactcatatactctagttttggagcatcaatctccaccgaaataggtatagtagtcatcatctccaaatcaaacactaaacgtaagatcttcagtgtcagagacttcacatgtagaagaggcagatctggtattaccatatcatgaatccttaccacggtaagatcttcaagaacaagacaccctgcgatgagtttctccacaaccaaaggagcatcataaccgtaccaattattttctagatgcatgatcttgagacaaggtagagaaacaacaaactttggattctcaagctctacgcatacaagctttaaagacaccaatgtcttactcttataaatgttcataggcatggaatctttgagaaagagagaaggatttttggtctcgaaatctaaatgttgaatcccgcgatcaaccgctgcggcgatccactcctttaatctgnnnnnnnnnnnnnnnnnnnnnnnnnnnntatttgtcatcttgaacttttgaaggcctgacgcactgttaaactcaagaaatctttcagtgtagttcttgatgatatctctgtaagggaaagggaagtcaacggagtttaagtctagacctggaccttcacgccaaagatttctccatctggtaaataaaaacttgtcttaactaaatctttggttggaagccataaaagaatcggagt

SEQ ID NO: 5489 - DNA, 856 bp, Arabidopsis thaliana landsberg
tcagaccaggtctcagttgtttggagtaagaataaagcatctgcaagaggaatgaaaaggacacatgtgagatttgtttacagagaactaaatagttatatacgcatcacagagtgtatatatttatacctttgaagtcgagtaacagatgatcatatgtcttacactcgatatcacggttaaaaaatcaccgatgatatctctattccttaaatactttggtgccgtaagactgccatagccaacattatccttcgtattaatgtcgatagtaaacaaagaactcaggttctttaccataattctatgaaatagactctcataacatttcatatacttgagtcttggggtatcaatctcaactgaaatatctgtagcacctgtactattaatcgcaaaatataaaccaaggcttttcagagtctgagagctcacacgcagacgcagcaaaactcatcgagtcaaaacatcaaaaggcttaatcagctcaagatcttcaagaacaggacatcctgagatgagcttctccacgaccaaaggaccatcctcaccgtgaaaaatattctccagtttcaagatcttgagacaaggtagagaaacaacaaactctggattctttaactctacgttataaagcttcaaagagaccaatgtcttactcttgtaaatgttttgacgtatgaaatcaactctgttacaagtatgcatataaacatacaaatgttgaattccacgatcaaccagtgtaccgatcaaccccattaatcgatctaaataaccaatgtgttcgaaatacgttatcatgaactttagcaggcgtgacctgaacttaaactccacaaatctgtccataaac

SEQ ID NO: 5490 - DNA, 636 bp, Arabidopsis thaliana landsberg
  unsure (1)..(636): unsure at all n locations
tttaaatatgcatacttgtaatagagttgatttcatacgtcaaaacatttacaagagcaagacattggtctctttgaagctttataacgtagagttgaagaatccggactttgttgtttctctaccttgtctcaagatcttgaaactgatgaatatttgttacggtgaggatggccctttggttgtgtagaagctcatctcaggatgtcctgttcttgaagatcttgagctgattaagccttttgatattttgactcaggacgttatactgtttctgcgtgtgagctctcagactctgaaaagccttcgtttatatttttcgaccaatgggagtggtacagatttttcagctgagattgatgctccacgactcaagtatatgacattttacgagagtcgatttgataggattatggtaaagaacatgagctccttgtttagtatcgaaattagagccaaatctagttatgagtatggcggtcttttgaaagcagaggatccaagaaagagagctattatctgtgactttataaccgtgatatctagtgtgaggcatatgatcatttcttngagcattctagaggtattattaacaatttattgaattaaattctgatgaaaaaattttttcacatg

SEQ ID NO: 5491 - DNA, 537 bp, Arabidopsis thaliana landsberg
gtaagtcccccggaatcagcaaaattgatatcataatttgcattaaaaatttctcaacttgtcataatttgcactaaaaaaaagagttgcaaaaataagatttggtaatggatcataattaagaaatcgagcagcgatctccctttttagcttagcaagctcctgcctcacaataccagccctctgcaaaacaatattcatatattagaggttattcaataacactaagatgcgtcttaatacaatccaaagcaaaccaggatcataaacccaagaagacagcttaaaccacaactgaaacggagggcaaatgaagcagtgaatactcatctgcatttgcacaaagtagagttgactaaaaaagcatgggtggatacaaagaagtaaaccaaccttgattatggccaacatgatcttgaacctgtcaaaatcattgagagcagctcttctcttctgcacaatgagtttcctaccccatgaactcttctgccactagttcttcacatctgcatataactttagagctgagatgaccca

SEQ ID NO: 5492 - DNA, 2341 bp, Arabidopsis thaliana landsberg
atggttggtttttaatcttttacaatttaagttccttgtgaatgttggactcagctttttgtttccatgattcttgtgccaccattatttgctgtttatctctacctgtttgtgaatgtttgaatatgttgttagcagatttagaggaccaaaagaaaggaaagtatgttctaatccgtgatgatgctgaggactctgagttaggacaattctataagccccttccttgcttcggttttggaatcggatggttctcgtgagtactcactcactcttttttcttattattatcgaggatatattgtcttgttgaagcagaatcttttacctctttatgttaggtttcttctaggattcgtcttcccgtttgcgtggtacgttgctacatttctttatttgatcagctattaccatagagatcctcgggaaagatctggtcttgctgcctctgctatagctgtgagttctcggatccaaatgcatttcgttcttaaaagtgagtaaaagaggatttaccaacgtaatctattttgcttaaaaattgtatgcaggctttgatattctctgttgcacttgtgatcaccgtgcttgtgcttgttttctcgggtcgctagggtcttgctacagattgcatattctttctgagtttcaaaggaaaacagctagcttctaagtctgtttccacaacaagttaaaaaaacttcaatttgatgaagagaatttcggtttcgaagagagtgtactgctagtctttttagaatcaaaatttggtttgctttgtacataagtcagtgtattacatttaaacaatcgaaatgtgatatataactcttggagatctatgtattgtaagccagacaataaccctagccaaggttatgtacttatgtctggttcttatcttccttcttcaaagctttttctttctttcttattgaccctcaagaaacagagaaaagaatggaactaagggtagaagctttgacgattaggatttgtattgcctctatgtcgtgttgtttgaatcatcatctcatcatcatcaattattttataaaagctgcaccttggaacctcacatccaaacattgcggaaagaagccttttaaaggactataaccgacgaagatactcgtgcaaaccaaaccatttggtgaatcagatagatcttggaaagacaaacacatgagatttctgaaacaattttataagagagttaaaaaaaaaactgcagtttctttcctcctaatacactctcatctctaatcttcaatctaatcaatggcctcaaattaacaaaagagttaatgtcaatccacaaatggttacaatcttaattagtgtctttcaagctgagaagctgctttctcttgaaaaccaagaatacaacaacaataacctgcaacattgctattaacccaacaaagactagtcccaccgtcttccctttgtttaaaccatctcttttcggtttctccggagaccgaggaggaggaggatgccgccgtggcaggttcttttggggaggcttcggaggtggttgtgacctcggtggtggttgaggcggcggcggagaagacagaggcttaatcatatccgtgactggaggaggcggtggaggaatgcctgtttcgacgctcatattgacagctggcggaggaggtggtggtggtggaggaggaggcggcggtggaggaggaggcggtggtggtggaggaggagattgtggaaacaaaggtgggtcttgtgattggacgaggaggaaacaatgaatggtgaaaaacagagcgagaatgaaaacatagaggctccgagatccgaagagagattgaagaaaacccatttttgatgagattgaatcaaaaaacggtcttctttgtcttcgtcaccgaatgtggcatctgtagaaaaaagacatgaccttgtctctgttttgttcaagtctccgtttgaatccaagattttgtgacaaattgaattcaaaagagtctccaaagaaaatggatgtcacgatggttgattggtggaacaattgacctaagaaaatactttgagagagggtaaaattttcccgggaaaattcagagggaataacggattaaggctaaatatggtgaacatataaaagttagttaattttccgggtaagaaaaaggtttagattttgctagttagttataattctaacaaattgtttataaaaaaaaaattaaaataccaaaactgtccatttgttatatcccaattcccaacaaaatcctttcatggaagaagtacaaaatttttaacatatgattttaacttattgagatagtcccactgaacgttattttaatagaaa

SEQ ID NO: 5493 - DNA, 1380 bp, Arabidopsis thaliana landsberg
  unsure (1)..(1380): unsure at all n locations
aaaaattgtaatagtgaaaaagaatatgtgtagccgaatcaatccatgacagaaattcatatttacataattttacgatttttgtcgcctacaatataaaaaatgattttgatgtctttttttttttttttgtataggaggtaaaactatcgttatatcgtggcccaaaaccttttccagattaggacgataacatttgtcatatactaatactagtcatttggtgatagaataatatatcgagatttttaaatatctgatactcctatttcaaattatatactgaagtattatttaaaggactaaattacgatctttgggatactaatctgatctcttactagattcttgaaggcaacaccaacttatgacaaacgattctcgccttattctattttttttttgttttacagttttactctaataaagtttgttccgacgagacaacaacgacccttatgccaagtaactgtcaccaatcacactcgcttttcaaagtcttttgtctctttgctttccatgtagtttttatcatttaatttgagtcttattatgatatttcattacaacacgaaatactaaaactctaaaagcttatggccaaactattcattttgaaatttcaaacttcaaaccaatactattccaaaatttattataaaaggttcacaatatttaccggaaaatgtattgatgattatgtgtcaacgtttactagtttttgagagaatttgtttgtactcttcactaattttatttataaaccagaaaaaaatgcaacagagaccagctgagctagcaaaacttctacttacacaagcttcaagctggctcccaccgcttcgaaaaaaaaaaaatctatatgttttcacaaaaatatctcctgataaacaaatttaaaagaccctaaaatctggctctgcacaataaaccaaaccgcaaccggttttggtttaagcctggtttaacatatccgccgaattcacgaaannnnnnnnnnnnnnnnnnnnnnnnnnnnnnggcaatttaacggttgcttttagttccaacgtaacggcgttaacaatatgaagctccgattcccaactctcctcgtcgtgaacaaacgacataatgtaaccgtcatcttctccgtcagattctaaccctctaggtaagaaaaaaggttcaccaccgtattttttaccgccgtaaaagtgatttttcacttctccggtagaaagatcaactttagcgaatcctgagactttaggccacggttcagctatggctaggtatgcgtaccgggttttcctcccgagaagatttccgtttaccataccagcttcaagattcatctgaanccgaaccggaattatagttctgcgtttggatttcccg

SEQ ID NO: 5494 - DNA, 1164 bp, Arabidopsis thaliana landsberg
tacaggtcactaatcactatcactcatattaacatttataagatcctacaaaaatctaaaactaacacaaatgtttgtttcgataaatcttccttactgatgaacgttccgtggaaaccataaggcactctcgacggaagcgttacggtagcttcaagcttcatattaacggcgtttatgagttggagttccgatttcaccttctcctcgtcgtgaacgaacaccattatgtaacctccgtcttcttctccgtcaccggaaggtagaaacagaggctctcctccgtatttcccctctccgtaaatatactttcgaatctctccggtcgataagtccactttagcgaaaccggacactttaggccacggttcggttaaagccagataagcataccgggtttttctacctaataaattccggttgaccataccagcttcgagattaacttgttccgagataaccggtctacgtgttgattcccctgttttaaggtttagccttatctccgacaaaacactctgaagtgtttcgtcgtgttcgctgaaaattgaatcaggtggtgtcatgcatgatccaatcacgacaaccttgtctgtttctggttcttcccaagagttccatagatggaaacaaaaacaatctggtacttcgatccattgaatcgacgaagcatctttcgcgtttttattcaaaatcccgaatcttgatttcttcttctcgtcgtaaaccaccggagaaccacctcttatcatctccggcaatcggaataccacttgttggtctggaatcactacgaaattctcagtgatcgcgaaatcgtggatcatcgttggttgatcaagcggaatctcgacgtctggtgatttctcaccgtcggatgtgaatctgaagtattttaagtaaggctttgaaacgacgtcgtagcttaaagcgaagagttctcgggtttcgggatcgattttcgggtgggctatcattgttgattttaactgaccgtcgaaatcgtaccgacccgaagtttctaaatctccggtttgagtaactttgacatggtacggtaaatcgtcttcggacatggctaagagatgaccattgaaataaactaaaccggcgttagcgacaccgagtcctccggtcgggtcgactaacccaaatagcccgcgg

SEQ ID NO: 5495 - DNA, 1060 bp, Arabidopsis thaliana landsberg
aggagatcgaaatgtgtatgacatctctatctcactgatgattattttattatccttctctcttgcaaatttatcaatttttttacgttgttatgctctttgtgtagagtacgtgaagcgccggttaatgatgatgatgaaatggatatagatgatgtgattccggctccacaatctcctctctctatgttcaatgcagctagaacaattggccgtcctcccttttcgcttttggattcggactttgctagacgtgtatttgatagcgatcctcttatgccacgccctccgtttgttagtcatcctagagaggttaggcagatacctatagaggttaaggatagcagtgggccatctggacgatctagtgatgctcctactattgaagatgtgacagaaacagctcatgttcagggtccagtaactacccaaggaactgttattattgatgaagagagtgatgatgatattccttttgcaccaatgggacgaagtaggcaagacagacctgctggttctgtagccaataataataatcaagattacaatgatatagaagaagaaatgatcagagctgccattgaggcctcaaagaaagaggctgaggtaagcttctgtaagaaaattggctgtattggggttttgtcttagtgaagtagcaaatttatgaggttttttatattttcttatagggatcaagtaaccctttacttgaagagaggccacttcacatggaagatgatgatgacatagcaatagctgttacaatgtcattgaaggtctgtggttgtctcctctcttttatttttgctgccatctatctttgatcacttttaacacaagttagtgcagtcagcggaggaagaagttttgcgcagtcaagggtataaggcctcaacctcggaagtaggagcttctgcagtgactgctgctcaaggacctcaggatgcccaagccctgaacggaaggtttgttggttcttctctgtaacgctttgctactgggttatctatgagctaaaaatttgcagatgcaaaaacatctgtcaagcactctgacc

SEQ ID NO: 5496 - DNA, 4052 bp, Arabidopsis thaliana landsberg
gcattgttgtgttttctctaggctatgcacaaggcatcaatacttgggatggatatccaggatatgctactactacccctgaagccatgcatgtgccaccggttagtatgactttccctatttatgttctatcttcctcttgctacttaattaagttagttattctttatcctcaggttgtctacaatgtcaattcatctcttatgtaccaatatcctggttatggatttaacccttatccttctgtaatgttggagggacaaattccagtctccccagcttattaccctcaaccttttggtgcaccttctgcaatgcattatttaccctcagatattgacccaacatctgctgcttatatgattccttacgggcaatatggtgtagggaattattccggaaatcaaggggacatctctttaacatctcatataccttatcctcaaacgatgggtatacttgggccatacgaccataatgcttcacaggttaatactcttccctctttagttttaactattatgggcttatgtacataacctttatttggtttggttcggtaaacatttgcttactaggaataaaactgcataaaagtgccactggttattagtatcactagttttttgtgagtccatctctttagctttgtcgtgcaagataatgaatacatgctgacacactggaagagccatgatattttctcatatatgattgaactttcagttttgttcttccctgtaatggttttggggaatagaggtgtctttggcatacgccttggattcaaatcagttcactgttttattggctgatcacatttctttggcaccttttatcaggtagcgttgcatgggagcggggttgcttcaagctcttctttgggaggttattatcatgtaggatcttaccagaatcctagctctaccccctcatattatggagttgataatcgagtcagattaacccctgacataggtaaaagacgagagaaggatcagggctctatatctagcaccagtgatctgtatggtaatcgaggaccacgggcatcaagcagggtaaagagcaagaacagctccaaaccttgctctactattggtgattcagcaagcgattcaagtacagctggaccaaatcccagtttgtacaaccatccagaatttgtgacagattataagaatgccaaattctttatcgtcaagtcatttagtgaagacaatgtccacagaagtatcaagtacaatgtctgggccagtacaccgcatggcaacaaaaaattagacactgcttatcgggatgctgagaagatgggaggaaagtgtccaatctttctgttcttttcggtatggcttttccactgtccaatctctctgttttctttctgtatggttttttttcgatgtagtagtatatataattcctgggaataaccaaaagcgtaattgataagctgcttcaaggaaacagtaagcttaaccaaagtttaaaatcttgcaggtaaatgctagtggacaattctgtggggtgtcagaaatggttggacctgtagattttgaaaaggatgctggttactggcagcaagacaggtggagtgggcagttcccagtgaaatggcatattgtgaaagatataccgaataaccgattttgtcatattcttttacaaaacaatgacaacaagccggtaacgcacagccgagattctcaggaggtgggcattacttatttttttgtcttatgatcattgattcaatgctctcttggttgcggtgccatagtgatatttgtcttggtgtcactgtgttaggttttatgtggacaagtcttgggcaatttcacattatcatgtatgactaggtgtatatacccagtaatagggaaatccttgcatatgtgtattaggtcaaacgttaatagttggtatagggatttggaagctacttaattatgaggtacttgaaagttatactttatagtctcccagggaattaaagcttgcactttttgcgttgggttttcttgagtgggatattaagcaaaaaatggaacatagaagagtaagtttttgtggtagggagagagatttggaacgcattaattggatgttgcatggatttataactaaattgattgatgaactgtaacaggtgaagctacgccaggggattgagatgcttagaattttcaaagaatacgaggcacacacatcaatccttgatgatttcggctactatgatgagttagaggggcaaaaggtgggagaagatggaacaaggaaaaaagctggggaagaagagacctccgtggagcaattatcacagcgccttcaagctgtcaaagtagaagatgggaaggaggaggaaaaaaaagagttaatagctgattgatacagtaatagccactcgaaggagacattcttttggtaacaataagcaatggggttctcttttttctatttgggtggggatgtatactagaatggtcgggctaaaaaaatccaattccttgtaggcttgtaagcaattattgcttttgtagcattgtatcgtaaaacggcaacgtttcgccttttaacaagagactcgggttatataacaaaaaataaatataagtcttcttcttctccaatggcgtcttcttctcttgttcgaatcgctgtcgtcggagacatcgtaatgtttattatatcttctctttatctctcactcgctttctttcatcttgttgatatgtctttatctttttcttctcctgttaaagcatggcttctggaacctagatgaagatcgaaaggctctacgagttctccaggtcctttgatgtttccttctatctttctcaagctctctttttctattcacacgtactcgtgaccctaaatcctcttctgaacctgatttgcagccggatttggtgctcttcacaggcagcttctctgttactgacgtcaaattgatttccttttttttttgaatttctccatttctcttcacactacctctaatgattttgattaaagttagaacatttgaatccaattccaaattctgtcaggtgattttggtgaagaaaacgtcccactggttcaaagtgttgccgctcttactttccctaaagcagtcatattggggaatcatgatgcctggttcacccaagattttccaaggtgtcttgccactacctaacccttctctgaattaccgtcttctagagattttggtcttgtgctttgatttttgatcgtggatttctatttttggtatgtttctctcaggaaagaaaaacaaaaacaaaacggtgttcaaatgcaactcgatatgtgagtttttttccttatgtgactctcatgctatatcaactaatacctatgatcagttactgctttgaggcttatgtcctttgaatacctcgctcgttgtcagtttcaccctacctatggattctgcttgctcctccattttttctgctggtctttttgggatgctacttgtaatgtaacacgctgctgcactggttgttaatttgttattatgttcagcctagtctagtttgtaatgagcatcctgcccaatcccaaagttaagtcgtaaaggttcatgagacctatctcggggaaatagatttagggagagggattattggtttaacccaaataattgttttcttttggtgttcttgatttgtttgcaaaaaaaaaagttggtttttctgtttgtgatcctttagctctatcattattcatgtaatttttggttttggtttactggacacagattctgaaaagttttcttatgtttccctctgcaaccaaacagccttggtgacgagcacataggatatcaacgcatggacttcccatcttttaagctcagtattgttggtggtcgacccttttcacatggtggggatcgattgtttcggaaaaatctgcttgtccagaggttagcatttgacttacatggcaggaatttcatttatgttgtgtatgaagaatttatttggtcaaaatagctttcatcttgcaaaaatagagcctatgaatgaatttag

SEQ ID NO: 5497 - DNA, 2443 bp, Arabidopsis thaliana landsberg
  unsure (1)..(2443): unsure at all n locations
gacaccaattttagtactctgtctcatagatctttagaggtgtacgatcatgtacaccatattttcaatcatctatgtacatcattttgtatactattatactcactctatcacttcttacaataatattatatattgatttttacattattgtcgtacactaatatttgtacaccagtattaataatatcacgtatactgtcggctgggattaaataaaaaaatgctacatatttttgaaatatagcaaaattagtctttttagattcacataaaaaatttaaaagtcattatgattatatggtaattttttatgaagaattattatcaaacaaagtaaaaatattaagtaaaaagaaaaataagaaaaagtaaaatttgacttgaattttgtctttatcttactacataacaaaataacaaaatgttatataagtcatttctaaaatctctattagacaaaaagttgtattagagaggaaagagaaaattgtttatttctcttatttctaaaaaaactacctactttgcaaattatttgttgaaaaagacattcaacttcaagggacgattttcctctcatagcaacaaaacaaatcacctcaaagataaaaacttggaacataaaccaacgaaatggctccgtctaatgatcatttgcctttttctagtcctcacctccgcttcattcttctagaattcttcacctaagaaagctttcagagacgaggaaatatgaaatgtaccattttataccgtcctactaaatgtgtctgtctcttacagcaagagatccgttccgtagagaagagagtagtgagaggtggtacagttcaaaggctgaggttaatctacgaagcctggagcgcacgctaggtgctcgacgaaatgtcacactgagaggtcatcacgtgccatgcacatgaccatttctttatctccctcttgctcagccaacagttgtatataaacgcatctactctgttttcttctcgtgaacagaacagtactctcccaagaaaagctgatactttttttctcttttctttctcagtctctcatgaaagacaaagaaaccaccaccattttctcgagaaaattctgactcccttggatacgatgatgatgaagagtacagacgaaagtgaaacaaaatggaagatcgacgatgcagccgaacttgctagaacttctgggtcgaacgggacggcatttcggctttgaaattaacagagaaaacgatttctgatcatgggaatcacgaaaagtgctctagtcaccacgaactgcaaggtgatatcttctatgcccaagcgaagaaaacagatgacaccgacctcaaatgcttatacttgtttgcttctgtcgatgcgtattcaatggctactcttctgtctcctaacgctttgactttgaggtcctttcgtggctatgctcgttcgctaatcaagttgggtgatcagcttcggataaacaagttttatgagaaagctgtgnnnnnnnnnnnnnnnnnnnnnnnnntaacgtcacctcaaggaaagtctacggaaggtggctattttaccaagataaagacagaacttcagaattggatagatcttgcaacaacgaagatgcaggcgactgtggctgtttctgatataggtactatggataatcagaaagaacctggggaagaagatacttcttttgatagattgaagaagatttgggttaaattggatgacaagaccaaaataaactttttggtagtagactttgaaaagcttataggctatatacaagataagcatgggacggaagtaaaagagcactttcagaaatgtatacccatcgccaataatcttcgatggagatgttggaagtgccacatttgttctcaggttaactactgttttacggattgcaagatgcacatcttagataatcatgtgcacaactctgaacctgactttagtgctcgtcctaagtgtgtggatgagattttggctgacatgatatgctgtggggattggaagcctgtggatacagcggaggcagaaaatcttatcaaggatagagctaagcgcggggaagagtttgtttatgttaatggatggcgtagtgattggcctgaagcgaaagatcgcgagcgggaaaacgtactcaaacagtttgccgaggttctaaaatcttcttgtgccaaggagaattgtactctttcatgtaccctttgggactggttgagagattacacagaagagaatctggaactacctggagttcctgggatctatcttgatcaatgttgcttctttaagaaccctcaatgcatctgcttcttagatcttaagcaccttgaacacatccctctgtattttagacagctcaccacagatgttcgcgcgagtttagttcccaaagtagtgaatcagtctttggaaaattcccacgtcaaggaaaa

SEQ ID NO: 5498 - DNA, 4449 bp, Arabidopsis thaliana landsberg
atgtggggtagcccagccagaaagtcctgccccgaggatcttcagataagagataagaacgtaagcatgctgcaagtcagtgatctaaccaaaatctgtgttgcaaaacaaagtatatcttgcatgaaaataacttactcgaagcttctgcccgacaaacaatttgccagcattcagctgctttgttagtacgacatccagagcagcattcatcgagtacctgtgattttttttaaaaaaatcatatggaaatgagtcaagaaaacaggtaacagaatagcagtagcaatttcataccacccatcagtgagttctactttcacattgctgcaactatcagaacaatgtgcttcctgagaatcattatcggtctttggattaatagctgatatgcagagcaccatcattgaagaagctggagcatcaccactcagaatcctcttgattgcagagcaatgaccatgattgacctctctctcatatctattaagaaagattaaccatgttagactttgcatgagtttaagtaacgagttgtgttgtgagactgggaaacctgtattttagttcctcaagaacattggtgattgtcagaaagtttcctctgcatttggctgggtagtatatgtcgtagcatgcaagtttccagactatccacctatagtgattagtgacccacctagtgcatatgtagtgatagataagttaatagatatagacatcaatactcactgtctatctaatagagtgacaatcacatgcaagcttcaaacgaacagtcacacactttttctgatataataaacatataacacggttaacatttcaagggacagagaaagtactttctggatgcatgttgtaaggaagcaccagactcagccaacatttgaagaaaagattcagctccaaccttgtttgaagaagactcatgacagaatacatatttatctgcattacttgatttgattcttctgacatggtctggcacataatccatctaaaaaccacctcgtaagtgtgtttgagtagaatgaagaaaaaagctatgtaacgcatgaacaggtgaaagggacaaaaagaatttaccctggtcgtagctgttgaatgcattccaaaaaagtccttgatatatactcttggagacttttctggataccttgtagaaagcacctttttggaagtaagtgtatcacacgatacaacagacaaacctgataatagacaggacaccaaaactataaacctgagaaccaaccaattagattaacataaaaaattcttaaaaaaattaatcatatatattaccacttgaagcttgcagagcatgtttctttgaaggagttttaaaggatgaaatccttggccttttgaaaggagaaacggagactgtctttcccagccttttcttttgggtactgtcttgtttattgtatgcataagctgtatctctgcgatttgttatatcaacaagtggctgatcagcaggccttccaggttgcctacctcttggaatgaaaccgtttaccttggaattattcactgccatatctgatgccaaagacctgttatttgatagtccatgtgtagcattcagagcacaatcggtctcatcaacagccgcatcaaatttcttgatcaaattaccccctgaagctaggttctccaagttgactgaactaaattgctttgaagatgaccaaagaggagatacaaaactatttggcgtatgtttgttgcttgtcttttcttcatgagcaatataacctctgttggcacttccattgtttatagcaatatcacttaacctttcatctttctctggtgtaaaaaattgatcacctccagctacatcatcaaagaaagaccctaattcagggtcaccaagaaggtttctggcacgttttaacgcctcagctgacactgacaatgattttccaccagcagtctgaaactttgttggaggcacctttaaagatggatttaagacttcagatctcttcccagatacataatcctcatattgtcctggagttcctgaatgatgcttaactactgtagcatcaaactcctcatgagtttttaatccggaccacccatgttgctgggaggaagaagacgactggttcacatggttaaatccattcaaatcatcttcttctagtcctaacaatgccttggctcttgctaaaccggcagaagatacattaacctttttgttggaagctgtctgaaaaagactgttgggaacaccaaacccactctccctgggaagaacgttgtctacacaatcaaaaagaatcttattaacaaataaactatgaaaaaatgtcacttctaatattcatcctctaaacgaagtaagatgtgtgttgattagttcttcactattcatcatttcatctgataacaaccaaactcaagaacctggaagttgaacggagtagcagcacaaagaacaagttcatatgtaaacgcgcacacagctatactggaaataagactttaaaaaagaggagataagaacacacctgagtcaataatcttatcacttcctagaatagacatagctttggcaattgaagactctttcaaagggacagatttccccgaggccgtcctgaacattggcaaagtttcagctgtatccacttgtctcatttggggaattgagcaatttgtgttccgcaaatctaaagtgtagccaagaacatggaacattcaaaagattttcaggaaaccattttcaccaacattaagtaacaattcaagggaattcagaaacaaatgactagtcaagggaattcaatactgtcacataaaatacctgaataagtaaccttctctgctaaaatggatttggctttagcaatcgaagactctttaagaactacagacttccctagcccagtcctgaacattgggatttccccaggcatcgcttcttcccgtgctataagcttcgagcatccttgaagcatcaaataataattcaatctcctttgagtcacatgacaaacacgattcgacaaaaaaaggaagaaacgaagaatcaccttggagcaagagatcggccatggaaggtagaggagctgtcgattcgagcgccttggttggcgtagaatccgagacggactgaagaatccggccagcgacttcccaccggaaaccatcgccgctggaatcggaaaataattgccacgtcgacatttattcagttctagggtttccaagttttccgactcgtcgttctctgattcagccggagaactaaacctcgcgattcagaattgcctaccacaccaagagggaggagtcgggagtgcggaaattttatttttatattttctgttttctttccccccaaaaccatcaccaaaaatccaaaaagttaaaagttctgacaaaggcgggaaagttgaaaaagatttgggccgaaattatgagacgcgtggttttattttaactttgggcttggtttttacggacatagcgttccaagacaagtgtgatattgccacggccttttattgcggtaactaacggcacgaatgctaacccgaaatcgttccaaacaataattgcttacgtggacattttaaaacatctgttcaatggtcattggtgactgacttcaatgaaaattacattgcaacaatagccaagtatcacagaaagttacattgcaacaatttccacgtcaaatttctaaacatgcagaacggtaatttacacggggaaggcgctgaggaggcggagggtgctacggaggggatcgcaggaacaccgatgaatgagaagaatccagaggcggcatgatcttgctcgtcgaggagagtggatgatgctctataaacggccaacaatatggtcgacgtacacctaaaatgtcttgctacgtggatgcaccactaaacctttcaacttttttgtgttttcttttcttaattaaacacaagattaattaggaaattttgtgtttcgttccgtttcgtttcgatttctggtttcttgtttctattactcaaattattgctcgagtgttaggtttgcttgtatctatccttgttttttccgtgattatgtaatttgattggcccttgtagtcgagatgtttgtagccttgatggctcggggaaactcagagagagagttggtcccggttgcattctccgctgtcttactgataccataaacaccgtttgatccatgattgcctctattgtatacttgatgcttcatgatatatgcattctccatgtctctgtttcatgtttacgcataaaaatattatcaagcctcaaacttgaattcggttcaaaatcctagacatccccaagaggatcataaacacagtttagacttgtttttcaattagcaaacagttgcttgataagaagtcattcctacagctcatgtgtccacaattctctctctttactacaacac

SEQ ID NO: 5499 - DNA, 1918 bp, Arabidopsis thaliana landsberg
  unsure (1)..(1918): unsure at all n locations
taaaagaagttggaatctgcatacttaagaacgctaaacagttcaaactgttgttgttgactggaagatgctcccacctcgtgctacttttccagttcaagcatttgaatgtttggaatctgcaagcaaaacgataggttttataacacgagtgcgagaaatatcatcaagaatgcatatggttatagtaagcctagctccttacgtgtggtttagtttgcaaggctttaagtgttgcaacaagctcttttgtgatgagactttttctatgttcgcactgcaaacattcagaggcgagtttgaaaactaggaaagcttcttctgttgagaactttccctggagatttggattcatcagctcagtaacaaactttccgtttctcctcacaggagcctaaaaataggaggataacaactcagtaatatgtgtcttgtgtggcaagaaattaaggattactatatcacaactaatttactcagcagaaatgtgacttgtgttgcaaggaattgaaaaagacagattctctaaggattaaagtcacaaagtcaagatgaatggcttacatggtttgaaacagaatggcttacatggcttggaggaattcgctttccagttagcagattcacaatgatatttagtaccaaatcaatgtcacacttttagggttcacgattcctacaataagaatattttatataacatcacattcagatatgaatagtatgaagagacaagcaagaactgattacctgttgttctttgacttcaacatatccattaagcaaataaaaacagttaagcatacttaattagatcattaagaaggcataagcttgaaaatgttgtttcgtataccttatcaaacagaaccgagtaagcacttaagttaccgtacgataaaacatgtattattccaataatccaatgcttctattcgattgtacgggaaattattatatgtatctttgaaaacgccttttatgcaccaagataaggacataaaatttagttaaatcacaccgttttcattacaaaaatgtgatatcatcttatcatgggcatatatatatattttacaggttttttttgctcacacaaaaattgttcatacaatcagtaattactttacctcagggtttggtctcctagcttttgtacccatcatactcaatcacgagatggtttgacatcacacgacttacgctatacataacgattaatgaacataatttagtttttctttcttttgtctcggatcgatcaatgatactgatcttatatgatatcaaaatcttatagtactggcagtgagattaaaaacactaattttaaacgacattattgttacatgtgtagataggacctgccgtattcagacgaataacaaatgacaaatctaagaaatagaggaagagagagagagaaagagacgtcgtgcgcatttatagtataaagtataaacctttgattattattgatacgttatttatgatttacacgaggattcaactattttcaaagagtttgatgacctttggtttggtcatgtcattgtcccggacgcggctaatggggatcggactatggctccccaaatcattgagggccgttttgatcatttaactaagcgtctaagcccgacccgttggatatcaatgtacatattaatatattatatacacaaatattcaagtttaatcattaaatttggttgaatgatgaaacctaagatgaatgatttgtttcttctgttcgctctttttttttgggtttgtttttatatcgatttagataatgtgtaacattgggaagttcacaacctgtctagttagcacccaacttatgacagtcattttgtcatgaaataataaaatgacgacattttggacatanatagcaatttcatgtgtaagaata

SEQ ID NO: 5500 - DNA, 492 bp, Arabidopsis thaliana landsberg
taagggaaaggatagttaagattcaaagtaaaagatccgtcaaaaagccctactaacacagaaagttaaaataccaaggccattcttccaaacaaggaagttgttatgggtggcttcttgcttgccgttgctccggcgccagcaggtttaagacttttttgaagtaaaaacagtagtgccgatgtgtttgtcaaccaatacgccaaatgaccattgtcatcttcattctgaaaagaaaaaaatttcagtagagcagcaattgttacttccaaatgataagacaaacaaaaaaaaggcttatactcctctccactagatgattagtgtatgataaaaggatataagagaacatacaacatatagtgtcaaattagaaagcaacggctagttgaatcctatctcaagcaggtgacataataagttatgcaaataagtctttgcatgccctatgaattaacagccattttacaagacatacataagaatcctcat

SEQ ID NO: 5501 - DNA, 494 bp, Arabidopsis thaliana landsberg
ggaacttttactttttccttacataattatctttcaatatggtttgcagcgaattgagaccatcaatagggctcgggcagtgaatagcaggagaatcttttccaagagatctagcagatctttgtatccctccttttgaaattctcggtgcctgaagttcaaagttttgacagaacaggacttgttacaatagtaaaacacatttattatcaaggtgcaacgcaacaagcgagtggtcacagcattaggatacaacaacgtaaagtcaggacaaaaatatatagctgcagagagagaagtcaatgaaacctgaatgcacatagatattaaagctgagagctctttcttcaagttatccctaatcatcccaaatattttctccacatatgctgcaagctgttgcttgaaaagcagagccgggtattttgcctccactgggcggatcaccgcaagagcagcagcttcagccgcagcagcaaggtttggtgatgagc

SEQ ID NO: 5502 - DNA, 2320 bp, Arabidopsis thaliana landsberg
tgccgcatcaagttatcaagagagttcagatagctatcaaactcttccgggttaacatcgataggcgagtgttagacttcgaggaccccattcataggagagacataaatatggggaatagaaacatcttcttcctcatagttaactccacgcttctttctcttgttactagtctttggtgcagtagcaggttcactctcctcctcattcaggaagttcaagtccacagcaccaccgcgctgctggatcgaggcacgtcttcccgattgtcgagatggttttggtttggcagaggattgaggtccaatagccggagttgtggctcctttcttcttcttgttgctgctacctcggggagttgattttggtttcgcttcaacaggttcataagtttgtggcgtcggcattggctttctcttcctttggctgtatcgagaatttcctttcccatcctgagcattctcatcattctggccaacctcagtctgtacttccttcggtgtctcctcaaaaagagacgcagcatcaactacagaagagtaatgatatcactgattacgttcatctatgaacatctgcaaaatcgtaacctctcttggacagctataagatcacctgtatttgcaggctggaagagagctggaaccttccagctaaaagaagcaaagaatgcatcagcatccatgccagggaaatccgattcgagataacgagcaagttggggtttgcttgcgaaagactttgggacatgcttttgctgaagcctttgagggagaataagaaacctatcctgatgataccccatagcagtcactctcctcccaactctccaagtccatacatcaccagggcttggccaatcaacaggggcatacggcaaaccttgaccagttgaaaccggaggaatcgcaggaagttgattgagatcagtttccccatgagtgaaagcgctgttgtctacacttctctttccattttcctttgcctgagaaggctctggatcttcaatggcctcttccctactgaaaccgttttcccaaaagtcatcgttctcttgctgagtggcgtcgagatgatctgaatcattttctcggtaagttgaaagcgggacaggttcattgtctcggtaagtactgattgggactggttccgtatcaaacctgcatgcaaatcaacactagagaagatgaaagagaagtgtgataaacacaacatgacaacagacacatatcatttgccttgtacgtagcaccattaaaacatgtagacaaacaatgtattatacacttcattataccgtagtgttgaaacaagcatactcaggcataatgaataacaaaatatggagacttcaaaccctaaagacacatcctttatggtagcagcaattagaataagaaccctaacttttgctcaacgtaagtttcacacaattcccaaagacaaaaatgttcctctaaacaatttaatcttctctcatctaaactcaagaactttttgtgcttaggtcagaattttgaacagatatcagctaaacactaatttggtctcatttccggacataaacccatcaaaaggtctaagttgttcaagaaatcaaagcaaagattcagacacaggataaccaaaacaaaccagagacaaaacaagtttttgttcacatttataacatagttatcagaaaagaagaattacccaggaggattttgaacaatctcttgcatatctatcggagaatagataggagcagacatgaccactcaaaacctaatttcctgcagaagagaaacacccatttaagcaaaattgagaaaatggagaattcggaatgcaaaattatcggtagaaacgtaaaaagctatgaactttatgtggtaaagaagcagtacgaacaattttgaaagcagatctaacctttttgcactctcgcttctgcttcttctactttttattttctgactctgtagatgtggtttagttcctcctctagctgagatcaagatgaaacacgaataaacgaggaatcgcttgaaattgactattgtgcccttatgttggacaatccctttttggagggttttttttttttttttttggttttcatgtaaatgacttgttgtacggtaagtctttttgtctttagtgaccgattttaccgtaatcgcactcacgtaaattagtctttcatttgcaccatttctactttgaccaatttatagcctagtggttcatactaatgatgttattgccatctctctagtttttatttgcatattacacgaccataataaaattgtcaagatccaaatacatggagttt

SEQ ID NO: 5503 - DNA, 873 bp, Arabidopsis thaliana landsberg
agtgaatcaaagtaatgtcctttatgtaacatgagaagaagactaatctctaatcttcttcgtttcgttgatattgtgtagccttctgtttttgttgttggcaataaaagaaaagatcgaatctttgatgatctcttattttgtaagatcaacaagggttgtttaaggttgtatcaaacaagataacgaaagcacaaaaaggtctaatttttttcatcaactaacggatagtttccatagtacaacattacatgaaatagacaaaaggccaagtctaaaataggtttcaagactcttgcaacataaaccaaaaagctacatgacacaacaagactagctaaaggttatcggggatacatgaggaggctagatttagaggaagaagcctttgagaggagtgaatttagagaggatctctgcttcacgtttaagcgcattgtctttcttgcattcccattcaggcttcttcaaattagctgattgaacttcctgtacgactttcgggattgagttcgctaccattttttgaccatagcttagatcaaccctctctttctccttggtcccgatgtaccgcttcaattcagaccgtctggcttgaagttgagcgatttggtcatcgatttgacggattgtctcagagtttgtgtctacttccatttggatacttcctagtttttccttcaggtcgctgtattcgtatttaagcgatgctaccttggctttgttgagttccagagcagagaagaacctatctgcttcttcaatcacccctttgttctcttggaacacttcgctgaaggtcggaatctcttccatcagcttcaacctaactatctcttcagcagtaaggtttggatctttccttagttt

SEQ ID NO: 5504 - DNA, 597 bp, Arabidopsis thaliana landsberg
aagccaaacgcatcaaagtaacaatcaaattacattattaattaaggttcatatcaacaacgtaaggtactcttattatgctgcgggaaagaaaacacaaacccccttataaataacactagaatttcaaaccagaaccttggagttgctcttggatgatgatgtctatcttgttatccatttcatgataattcttccagtcactgacttccccttttcggaaataatccttgtgatccacgttatttatatattttcgggttttaatatataacctccaaagtccaaaccacttaggttacgcaaagagcaaagatatatctaagatctcgtccacggatccactctcttcttcttccttagtaaaaggacaccccaagaagtccgcaagtctcttgatttggacccgaggctcttctttcatttcctcgcatctcatgaaaagaacatgcttgggattttctaagctaactctccagtagctcagaacatgttccacatgcttgggatcttgatttcccacatgagacacgagtttctgtttagctttaagggattatcataaaattgatatgaatctaaaataccttaatgaga

SEQ ID NO: 5505 - DNA, 1595 bp, Arabidopsis thaliana landsberg
tcctggttgatgatttcttgaccttgggatggatcagctttacaaaaaaataaactatcgtctgcaaacaggagatgcgaagtagaagggcttgcgcgtgagatttgaagaccttggatttggccattccattccgcatctttgagattcgccaccaaaacttccgtacacaagataaagaggaacggagaaatatgatcgccttgtctaattccccttgttggtttgataaaacctcttggtgtcccatttaggagaactttataagagactgaggatatacaaaaattaatcaagtctacccatttctgggtgaaacccattttcaacatgagagctcgaagaaatgaccattcaacacgatcataagctttactcatatctgttttaattgccataaacttatctttacaagatgaattagttcgtaacccatggaacatctcttgagcaataagaatgttatccgaaattagtcttccttcaacaaaagctgattgtgtttccgaaataagattcggtagaacagtcttcagccgttgacaaagaatctttgaaatgactttataccccacattacaaagactaattggccgtaattctgtcatcctcgttggacgctccgtcttcggaatcagacatatatttgttgtatttaaccgtttatcaaaaaccccctcttgcaaaaaagaattaaccaaactcaacaaatccgatttaatgatagcccaagatttttgaaaaaacaaggctgtcataccatcaggacctggcgctttctccggatggatcataaataaagccgctcgcacctcgcattccgtcgcatctgctgttaacaaatcatttatccgatctgtaatcaaaacttgaacttctcccaatgcttcgtcaaaaacctgagggttcgcagtagtaaacaaattttgaaaataagaaaccgcaatattctgaatatcatcatcctcaatagaccatattccattttcgtcatggagtcccgtaattcgatttctagcacgcctctgctttgttaaagcatgaaaaaaactttgaattattatcccctagtttcatccatagacttctactcttttgataccaatattgttcttcatcacgataagcttcctttaatcgtaatgttaattcagtgatttcctctcgagacctgtcatcatccctttgagccacatctaattcggcctttagatcctcaattgtttggcgcccaaaaggaattaagctttttcgccattttgaaattgcccgcctacaatttgttaatttctcaacaaattgtccctctctaaacacagaatctagattccaaccttgtgaaatcgcctctaataacccatctttgccaatccatcttttatcaaaccgaaaattttgtttcccacgtggtatcttatccgcaatcgttgcaatcaccggagaatgatctgaagctaacatagttagatattcaatgaaagaattactgaataaatcatgccattcttcatttgctaaggccctatctaaccgacatcgtattggtttcttatctcgccaacctctccaagataaccaatctccaaaaaatggaa

SEQ ID NO: 5506 - DNA, 4205 bp, Arabidopsis thaliana landsberg
gcaatatcgttgaggtactttcactgactcttctcttggggtgtttcacattccttatatggggcttttggttttggtatgtataacattcctttttgttgagtgacacaattgtactatgcttttgattactagtagtgttagcctgatgaattccttgaatctttgccacagtagttcagacattttaccatcaaatttttttttgtgtaatgatggaattaggatttgatctattatccgtgctttctagattcttgagatgagtccagaggatgatgcagaggaagatggagcgaatatcgatctggactctcagaggaagggaaagtgtgtcgttctaaaaacatcaactcgtcaggtgaagttttagactcttatatcaccgttagagagattttcagaactagtggggaacaaactctgactactagtgtagtgtttgtataatgatctcatgggttaattatacttttcagaccatcttcctccctgttgttggacttgttgatccagatacattgaagcctggggacttagttggagttacaaagatagttacgtgattctggatactttaccttctgagtatgattcaagagtaaaagcaatggaggtcgacgaaaaacctactgaagactacaatgatatagggggactagaaaaacaggctagttgatgactctcctgtttcatgtttccttagtttttagtatctctggtacaatatttgatgttggtgactctcctgtttttgtaattaaacagatacaagaacttgttgaagccattgtgttgccaatgactcataaagagcagttcgaaaagttgggtatccgtccaccaaaaggtgtactcttgtatggtcctcctggaaccggaaagacgttgatggcccgagcttgtgcagcacagacaaatgcaactttcctcaaactagcagggccacaacttgttcaggtatgaaaactagagtaaacgtaactgattttgatcttgttcctgtgatattttttgaaccaaacggaaagtaactttttttagacttatgtatagatgttcatcggagatggagcaaaacttgtccgtgatgctttcctgcttgcaaaagagaaatccccttgtattatattcatagatgagattgacgcaatagggacaaagcgttttgataggtactctatctagagtcatgtcataactattttattttctttctgatgactaatgctgacttttaattggcttacagcgaagttagtggagaccgtgaggtacaaaggacaatgttggagctgctcaaccagcttgatggattcagcagcgatgatcgcattaaggttgttacccctcatattacccctgcaaatgtctatttatttagtgaaaggcatgaaaaactcataattttacaaacttaggttattgcagcgacaaatcgtgctgatatactagatcctgcccttatgcgttctggtcgtttggatcgtaaaatcgagtttccgcaccccactgaagaagctagaggcaggatcttacaggttctgtatcctttactgcatcttttcttttttctttctttatttctatgtcgttttaaagctaaaattagagagcttcatgcacttagacaagtcttgctgtgattttctatgtattccgcggataacttatcttgggtactgttttgtttttgcataatgttggcgatggggttacagatacattcaaggaaaatgaatgtgaatgcagacgtcaattttgaagagcttgctcggtcaacggatgatttcaatggagctcaactcaaagcagtgtgtgttgaagcgggtatgcttgccctgcgccgggatgcaactgaggtatgcatatatctttcgtcttagtggttgtaactttaggatgtggatgatatggaggaaatggtaaatgtgtgtgcaggtgaaccatgaggatttcaatgaaggtataattcaagtacaagccaagaagaaagcaagcttgaattactacgcctaagtcctcttttatgtacactcttctttctcctctttacattatagaaaacttcaagttgtagtctcaacttttgaatctagaaccccttcaaagtgtggttataattataatagatatcagcttgacatattttgcttattattttctaatgatggtctgatggatgaatagaatcgaaactagaaattttccttgtggaactcaaacttggtcgtagttttcctagagaaatcttgagccagtctctttaactctcctatgatgcatgtattaccacagtagaaaacccctactaacaaaatagaaaaaggaaaatcagttacttactagaaagattctacaatagctatggaattgttgtaatagctagtgacataccaactcgttgattgacgtggttgactgcgacgtgcttgaagacactacgccaattgggtcgagcgaaatgggttcggacccgagtgcccgatacgatgtcaatgccgctcttggcgtggtgcaatgactgcaacatggtgattagtgctgacctcgcatctccttcctcatacacgctagtgcagtaattatgtagttcaatcatcccctcactatcatactcagctacctcgttcatgacctcactgaaccattccaatgatccttgctctcttgttacccaataaaaataagctcgttttgtggcaacatagttttttatgtgttggttagtgcctcgttcgatggaattctggttcttgatgttgttaaggacgtccctgattatgctgattaatggcgtcgctccgatccctagacctactagaagcaatacatcgtagttccggtaatcttgtgcgggtgcaccatatggaccatcgattaacagcctcggaaacctttccatgtaaaattcattagaaaaattgctcatgtttttaaatcatgattactcaaattataaatcaaaaactgtacctggttatattgttggcttgacctatgtcagctatgaagagcccactttgacttgttgagggaagttgacaaacctatggttttgtaattaaacaaatcaagtacatatatcattaattcacaaatgttactcttgaaaaatagtaaccttggaatataaggatttgagttgcgatgtccagtctccgagtgtgcggatatgaacgctgaggtaatcatccccggaagccgaagtaattgaaaacggatgcctacacaaaattgaaaataggttaataataaagttaaaatcttatgcttgtacaagttcagtggcattgtattgttgatataccattgtaatggtgagacgtcagaacagttaatatatatgtactgtccacttgtgtacttgaaacctttaggcttcgacatgtaaagtgaaagtacatttcctggatatactgccacctgaaaatcagtttgatgtcaatagaaattaaaaaagtgaaatatatccttgatttttgtctataataacaagaatgcatgtatattattgtgaacagatcatagaaataccttcaaaaccttgacagccttggcacctggtctaaatgcacgaatcaatcgttcaaatgcatatagtagtacgggaactgccagatacatccacgtctgtccaaaggtaataataacaaaggatgctttcatcaacaaaaattatcatatgatcttttcgtctgattttctgaacactccgtgattaatcaagacgcaagaaaaaatatatgtatacgtaccgtcttgtggtaccattcctttgagagataaacaaaatagccatgcacgatgagaagaacataaacgatgacaaacaaatggtgtgagtaccaaaatgcgttgaaaccagtcaatcgtttcaacgattttggtaggtttgcccggtttcgtctgaaccacgactgcgccaagacgtaggccactaacataagaaccaccatggtaacaccggtccacccgtctgtccctttcatgaaccatccataattttcaggcctctcgtctccgaaaaactttttcattggctcaaactctacattttttgcatgcagcaaacgcgggaaatcacatgccaagtgagatatagcgtgcaagcctatttccaaccgcgatcccaaatgcaaccaacctgcatgggacataaagaattaagcataacccaaattaatatttgtttacaaaaaagt

SEQ ID NO: 5507 - DNA, 559 bp, Arabidopsis thaliana landsberg
catcaaatctttatcttttctacataaaaatattatttattaattattagtaataatatacaactaataacaaaacactctcaagctcattgtttgcgttggagagaggggcttcggaagtcgcgagatatgacttacttattctacaaccaattattccttccaaaattattttattttttagtagaactaaagttatttttttagtctagaaaattaattttcaattttttttatagaaattgattattttaatactccctcaatttatattgtttacgtatctacacgtattaatatattacataaattgcttaaatcgtatgtctttttctacattaaaaagctatggaaaaaacttgaacaaactttagaaaaccgtaatgaagaatggatgcttattggggttggggactttaataatatattatcaaatggtgagaaaatcggtggtaaattaagagaagagtggacatttatggactttccgaacatggtttcttattgcgatcttgaagacatgagatcacgaggagatatatacattgggtgagaggag

SEQ ID NO: 5508 - DNA, 3513 bp, Arabidopsis thaliana landsberg
tgctgaccctctctacagtttattttcttcttgataagtgtgaagagtcaagctagagacttaaaacaagctcacttgggaggaagtcccatgactatccttgtaaataatttttactttcttgttatttttgatttgttttggttgtgtttgtggttctcagaaaaaaaaaaaagaagtaacatgaaggtagagtaaaaattcaaaacttttactctactgatgatctagaaatcgagtacattggtcgagtttgagtgatgtttaaaacccaaaaacttttaaaccattactttactcgaccaacagaagctacaaagtcttccagggagtcttttaagtttgcagaggattgcgggatttcctagagtttttctagtgaacagagaatacagagaagagacaagaagacatcgagggacccgccgctgacgcccatgttttccatgcaagagaccaagagacatggaatctcttcactcccactcgatctccacgcaaccccatcttcactcgatttctcctccatcactcgaccttgttttctcctccataacccaataaactcaaccccatccttcttaaatcaacgctcccttttcttctttactcgacctcgtcatctcctcctcaccacctctcattcatttcgttcactcgacttcgtcatttcccaacatcaacaacgtcactcgactccttatcatcatcttcttcatcgcctcatcacactcggccacatctctcttcacctttccatcatcaccgcttgccccctctctttttttaacaactcgacctcgccattccgttcactcgacctccgtcaccaagccgtcttcaccacttctacctcaccactgggccaaggtgccatcgttctcccatctctcaagtgcatcggccactcgacttgcccaagctcacttgattcaacgctaatcctcgtcgttttcaccacttaagctccacggcttcactcggctgtcaataaccactcgatcacaagcccgctttcgtttcacagttcactcgaccgctcctctattttcacggtcaaacagtagctgctctcctcctcttcaagctcaccaatcaaccacaacctcactctaaccacaaaactagcttcactcgataagcaaaatcactcgatcaaccgaaaaaaaaaaataaaaaaaatttcaaaaccgacggtttactctattacatcactcgaccggttcacttgattggtttgtgtttttggtttgctgttactagcgtattaacgtttatttttgagttttgtccgttttcaggtttcatcatgagtaactacagcggagaatcctctatggaccctgattacaatgtagatgaagctgagtcctgatccgctagactgagagagcaacatgtttaccagagcttcagggatgaattcgaacgctctgcagcccgacgtaatcagagaagagctgaaatcaccagaggaaagagggcgatgtcaagtagatatgagctgattgatgaggatatcgagactgagtatgagccagagtcatggtgcagggagacgaagctgctgaacaaacccgacgaggttacagtggaggagtatatcaggttctttaagatgaatgatttctggggaacgcggtatccgtgctatgagactttagcccagctggggttactggaggacgtgcagcatctgttcgagaagtgtcatctggagacactcatgtcttacccttaccctgcctataaggaggagacaatcgagtttctttccacgctgcaagtggagatgtatgagggactcacagactttgagctggataccatgggattaggtttcttgacgttctcagtggatgaacagcggtatcagctttcgatcaagaagttggaaaaactgtttggtttccctagtggaaagggaaccaaacccaaatttgacagagaagagcttaaggatttgtgggccactatagggaacaatctaccgctaaactcggcgcggtccaagaacaaccaaattcggagtcctgtgatccgctactttcagcgatcggttgccaacgtcttttactctagggagtctacaggcaccgtgtctaacacggacatggagatgatagattatgcgcttatagggattctccggcggacgaaggggaagaatgtcttgagaggcgatctcaataacgcaccacctgtaatgcctctgttgatccatctgtgtggatacaggaagtgggcgttgacgaacgggaagaagaaggtgagaggagcactatgcgtgggtggcattgtgacgccaattctcgaagcttgtggagtaccgctcaaggaaccagggttagcatcgaggatgatggacttggatcatttgcgcagatgtgagttcttggagtttgacatggctggcgactttcaccgctataggttcgagcattcatcgattagaatcgccaacattcttctcccctgcattgatgctactaggattctcgagggcaggaacattgacttcaagcctacgcttgaagatctttatttcgagggcagtccgccaactgaggagatcagtcacaccgaaggagctacaacagaagatgttgatgagacagacgatatagatgaggcggagtttgacacgagtatgtatcatttcagtgagcacatacttccagagagggaaagcaagagtttgagcgaagctcacaggaacaacaacaagctgcagaagtggtgcaagaaacaggataagttactcgctaagtgcctcagggctatcaggtttctgaaggacaagatcagctgctcctctcccactacagctattccgcagggacatctccctcaggacatgccctcgaggagatatgacgcgcctgagccaagtcggcgcaggcctgagcctagagaggaggagattccgcatgtcccaccgaggcattcatcattcgagcctcgtgaatgtgggaggaagaggaggaccagactcattcgatctagcagcaggagtaaacgacttcagcagtctcgtagtttacgcgaccgcggtgctggccgcagtagaagaagagaggtcgagtatcctcagagcggtgctggctgccacagagctgatgagatcgagtacccacctgctggagctgatacggaacaaggcggttcgtctatggcctgggagcaatcacatgcagccattgacgaccaactctgttcattctttgactaaggtaagcgcctcacttcaccattgtattatatcatctgttgtgatttgttctttattttgtttctgtgattggatttgtcctgagtactctcttccaagtttattcacacagtggtctgtgtgatttaagtttgggggagggctcaggaagtgtgtgttgcattgtatatattcttgagtctgcattcatctaaggcatagaaaaaccaaaaaatttaaaaaatttaagaaaatgatttcacaaaaaaagagtgttcatgtaaatgcattacatttaggat

SEQ ID NO: 5509 - DNA, 311 bp, Arabidopsis thaliana landsberg
tggtagagtattctatatggtccacgactttggagctaaggtctgaaaaaggtcataggaggacgtggaaaaacctacgcttgacattaaacaatggctcttagctggtcacactaaatcaccacacagagccttagacctggaacactttaccctaaaccttaaccatcagccttagacggtaacaactaatttaaattccaagatgcttatggacgtatagccatgatacggaacgataaacaacacatgaacgacataccaggctacaagaacgcagaccaagcttgttcttgattctcaaagatgaa

SEQ ID NO: 5510 - DNA, 2624 bp, Arabidopsis thaliana landsberg
  unsure (1)..(2624): unsure at all n locations
gcgggaaacccttccacttcctccacgactaccgaggcgattccgtcatcatcaccagtttgcgtaaggtaaattcaatttacttctttcttatttttcacacatcatttctttctaagaacaaagttactccccgtttctctcatgtcaacttttcttctccgatgaattttgatgctgagagacctgaatccccatcctttgacgagggcggctcttgcaatgacatatgcactcgtcctaacgatatccccggcgcacactatcagtccacttgtactcttcaatcgctcgaacgattaaaggaacattggtggattccgcctgaaattatggcgggatcgaagatgtctaagcctatggaatctccggaggaccaccgttccggttatttttatgtctacgagatatatttcaagggttgcggatagacctttcctcttcccgaagccctagtttggtacctagccgccctcaaaattgctctaccccagttaaccccaactttctccgaaccattttagggatcataaccgtcgcgacggagaccgggtacatattcagagttcccaaactggtactcaacgatcatgtggagggctctcgcttaagctttgctctattggctgcctcctactcctgctgaggcgagcgactagggacccacatgagaaacgtctgaagtacgactaggctgcgacatctaaaggggctccatatgcgatcctctactgtcttggtcctcgaacacaaacacatannnnnnnnnnnnnnnnnnnnnnnnnnnnnttgctcatcgtaatgttgttcttcttagtagaggcaattgatgtaagtcaaattaatcctaagaccactctctcaaataagagattgattgtaggattttagggtcgaatttcacaatgctttttgacaacacaatagactaatgttatcgaattaagctaaacaaatagattataaaataaagaaataaaatcaagcaataacatattgagagttgtaaaataagataataaaagcgttaggcttagggtattctcaggaaatagatgatagtagatcaagcnnnnnnnnnnnnnnnnnnnnnnnnnnnnnnnnnnnnnnnnnnattcttaatacacgccttcaaaccagactcatcaaatagtagttcttgtaatagatccctatggtgggtatacctgttatctgagatcaagttctaggtggtcaatctaaaactagcattaagaacaaacaaagatgaagaatcctacaataacttagcaagttggcaatctaccaaatcatctatgaagcaaacaacatgattagtccacttgtactcttcaatcactcgaacaattaaaggaacattgctggattccgcctgaaattatggtggaatcgaagatgcctgagcccacggaatcttcggaagaccaccgctccaattatttttgtgtctacgagatctatttgaagggttgcagactgacatttcctcttcccaaagccctagtttggtacctagacgcccttgaaattgctctaccccagttaaccccaaccttctccgaaccattttagggatcataactgtcgccgcagagacctggtacatattcagagttctcaaactgaacgagcttcttagcgtaagaagttcgtcaaagaaaactggctacttctcggcatacccgaatgccaatagaaacctcatttctcatcttccgaacaaagatgagaactggtaccatccttggttcttagtaaagaaaattcctgcttcgattgggagcctttccaaagtgcttccatcgaaatggtccacaaaacttggtagagattaggacataaacatacttatcttatgtttgattacccgttcctttactaacccgagncgtcgttttttttttttgaaccttcaatcaccccgactcttccgactgagaattcatcgagttcttcaaagtggttctccaaggcgaaactctatggaactcgtttacccctgaccggttcatagaagccaatcgaaagcttaaaatgagtcctcttgagcaacttcatcatcttctgccgcctcctcccctacctcaaggaaaatcagcccgggctattgcttcccggcgcaagacgctagccaaactgatggtcgaggcttgcgaggcaaacaaatcattccttatgtcttctatttacgaaaaggaatatagcaggactctgctagttgatgatggcagtatcgaaggggccaggtctaccggcgctttcagatctagtcctcgccgtgagggccatagtggtcgctcacctcaaagagatcgatcccctcgccgtgactctcctcgaccttcttcccgagattgattgagcagcgaaccaattgcagacttaatttgcaaaaagagagatagaccagcgcgtggtagctcttctcctcggagggacaaatcaaaggctcgaactaatagctcccctcgatcatctcctccaccccgatcgatgggtccccctcctccttggaagggcaaattttcttccctcgaagctgaccttcgctccctctctgattctaagcaaaagctggaggaccgcgttgaccatctctattccgagctcagaaaatcaaa

SEQ ID NO: 5511 - DNA, 2836 bp, Arabidopsis thaliana landsberg
catctacctttttttactccaatgtactctggccaaaccgaagtcgtgtgcaacgtggcaatgtcctctcctactcctgatcaagacgacgaccatgaagattgggtagttggcatcaagttcttgggtagacagcttagcctctgcaggcctcgtcatgaccttcgttggactaacatcctaaccccttttgagtcgtgggaagtctcaaaactcatgtattctaaaaaagaccaacggttctatttgcttgctcctggaggcaactacttatgctcctgggatctcaacttcaaggaagacaagaagcctaagttccatgagttggtcttgcacaaccttcccaacatgccacgttccctctggaagcagttagattcctacggcagagaggatcattgggtggagtcaccttccggcgaaagtttccttgtcaaatggtaacctaattttaatatttaaggaattttgctgaaacaaaaaaaaaaactaaaacactcatatatttgacttgtaacctatatgcaggttttgtgaatactcgcctgaaaacaccagtaactggtgcaagtcaccgattgtaatggtgttcagagaggaagagacgaaagatggaaggaaaaacatgcgttacacagatgacattggagatctatgcattttcatttcgaagggagaggatttctgcgtcaaggctagctcttgccctggactccaacctaactccatctctttacatggccgtttgtttgcgattcttaatctcacgaaaagaaccatgggttgctacgaatatccccaaggcataccaaaaaggattccctatttaccctactggcttcctccgttttctccttagcgctctagttgcttcattagtccttattgtgtggtttgttcttttaggtttggattactaagatcatataattatatttttctaatctgagataattgaagacttcatttggtatttggctggtgtctcatggagtataaatctgatgtaacttgtgtcttacaatatttcagaatcctattttaggttgtgttcccttaatttatgtccatgaatatgatatgattagagtgatggtttggtggctaaaagaaatgtttcatgtaaaaaacaaatgaagtgaattgtgtatgtaaaatagatttatagaagagttaatccattgatcataagaaactcctaatacaatcaaaagggaacatagatgaccgatccataattagatcttagcaagtcgagagaaagagtaaaaccaaagcaaacaaagccatacaatcctagcactagctagaagctggaggaaaccagtaaggggacacaatttgattcagtgcatctttgggagctcgaaaaatagagacatctctggtggtaagatcgtatatacctaagccaaagccaacaaaatagatggagtttggcttaaggccaggataagagcttgccgggacgcaaaaagcctcgctctttgaaacaaagatgcacaaatctccaatgtcatcagtgtaacacatgaatctttcttccgtagtctcctcctctctaaataccatgaacctctgcgtttcataggtgattttactcgaataagccaaacaacccttggcgtacctgcatgcaaaaaaccaacgcatagatggttcagtaatcatgtataattcatctggtagtagctataaagtaatatagatataccatttgacaaggaaacgttcatctccggagggtgactccacaaagcgttccgtcctacaagaagaaggaaacagctccgacagctctgagtcatacttcaacgactctggaaagttgcgaaactgcaactcatggaactctggctggtcggctttgttgaagtcaagatcgtaggataacaagtgatggcctccaggaccaggcaagtagaacttccgatctctcttggaatacgtcagattcgaggttggaaagtggtcagaaggggtttggaacttagtccaacgcaagtctcgacgaggcctacagaaactcacctggtcacccaaggacttgatgccaacaacccagtcttcatcgtcatcaggacaagaggacattgccacgttccagatcacatcagtttggcaagagaacagaggattaagtggaggcagagttaagagcttggggtttgatttgcatgcccatgggttcaaagagtcggtgatgagtacacaacggtcttgtgtgtccaagaagaatgcccatcccttggaagctccgatccatttggctgtcacgatttcttctggaattggtttgtccgtaaggttgagtaactcttgtttagcagggtcgtacaaaacgatttctccgatgttgacgacgccttccgacgagggttttgcactgagactaagctgcaaatagggacctgtcgtggaggatgaaaacgaacgaacgctcctcttgtgaatctgccaaagtaattatttctcttctcttaaacatagtacaaataacacaaatgaaatcaattttcttctctaaaacatagtaaatctcaaccatccgatccttattcttgtttttttctttctttatgacaaatcaatttgcttaggtataaaagacttctagaaaagtatagctagcatgctctcttaagtcttaacaaaaagagaagaaaaaaaacatgaaacaaagacagaacacaaaagcaagaaagagcttacgaggggagagagcttggagagaagccgagacattattgcagaagaaaaacccaaaaattaagttgatgtattttggagtctctctacccttaattcaaagagggagagaaataagcgtggatag

SEQ ID NO: 5512 - DNA, 940 bp, Arabidopsis thaliana landsberg
  unsure (1)..(940): unsure at all n locations
aaacgaaaaaagtgacaaagtgttaataaagaataactaatttaatagtatgaattattgttaaacaacactaaggaagaacataagtttgtagttggaaaagaataatcattagatggcaagttaaaaatgtgaagataaaaaatgtcaactgttaaagatatttcggccaaaaagatttacatacaacattttcatcaattttaaaagtataaagagagaggtgtaaataaatatagttgggtcagaatttattgtttacttgtttatttttcagtcaacatagttaacatattatatcgtttgtgaataatgatgggtaaaaatatagcaagattccaaaaaaacgaaaatgtcaccaaaaaggaaaacaggagagaaaaagcttgctacccacacctatttctctctcttctctaagggtagagagactccaaaatacatcaacttaatttttgggtttcttctgcaataatgtctcggcttctctccaagctctctcctctcgtaagtgcaataatgtctccggacggcaacctcggacaagtcctgttgttcaacataccagatatgaagttagtcacagcggacaaaatatatcccgacgagctttatgacgcccagttggtgggagcttcccatggatggggacttttctccgatagaacaaatcggtcggcacttatcagcgactatttgaacccctatgcttccaagtcaaagccannnnnnnnnnnnnnnnnnnnnnntactccaatgtactctggccaaaccgaagtcgtgtgcaacgtggcaatgtcctctcctcctcctgatcaagacgacgaccatgaagattgggtagttggcatcaagttcttgggtagacagcttagcctctgcaggcctcgtcatgaccttcgttggacaaacatccaaaccccttttagtgtgggaagtc

SEQ ID NO: 5513 - DNA, 4720 bp, Arabidopsis thaliana landsberg
aaaatgtccaacatcagatggtggacttgatagttgataccatgctgctttgtcttcatgaagtgatgaagagaaatgatttcccgggttacattgacattccttagatatggagatggatctgaatggatcattccaaagggatttgctcctgctgtgttctctcagaggaggctctcaacttatcagcccgaaagagagtcaatgtaaaggtaaaaggtctaaccaaaaataggtaacttcaatagctactttagacagtgactattattaacatgaccaaaatcatagaaagattaggcaaaaagtaacttgaggatttgattgtaaaagtttaatgtcaactttttttctatatgtactcatggttccaaaagagtaagtatatatacattagttaatcctgtactccctcagataatacatacattttaaaatactttgaaattcatataaaggatatgtcgatatctataaagtaaaaaccacttatgcaacgagcactagacttatcccgtgaacctatcaaccctgaaaaaatatactttttcgtagctgaaaattctctagggggaccaattgaaacttggaatccatcttccaaaacttgtccaattcagataagtaaaaatgtattattgtattagtaaagacatgaaatggtggttgctcacaagcggcaatgatgcaaaccaaaccaagagtgatttgctctgctgtctaatagtgttgtcttagcactaaaattgaaaaacaacaaaagaatttaagacaaaaaaaaaagaaatgattgttaatccaataatccccggaaaaaggaaaaaaaagtacagtgagaaagcgataacacattctcagcgtcagaagcttacactgctctatacgacaaaaacctcacctgcttcctcctctatgagttagtgaatactgactgaataagttttcacaatcctttgcatacatcacaaaacggcatcgttttgatgtcgctctctccttcttcctcgccggctccggcaacttccccgcctgccatgtcattacctccggcagattccgtacctgacacgtcatcacctccagctcctcctttgtctcctcttcccccaccattgagctctcctccgccgttgccttcaccaccgcctctctccgctcccaccgcttccccaccgcctcttccggttgaatccccaccgtctcctcctatagaatcaccaccgcctcctctactggaatcacctcctcctcctccgttggaatctccatctccaccgtctcctcacgtctcagctccttccggttcaccgccattacccttccttcccgccaaaccttctccgccgccttcttcacctccctccgagacagttccgccgggaaatacgatttctccaccacctcgttcacttccctccgaatcaaccccgccggtgaacacagcttctcctccaccgccatctcctcctcgccgccgtagtggccctaagccttcgtttcctcctcccatcaattcttctccaccaaatccttctccgaacactccgtcactcccagaaacttctcctccacctaaaccaccgctctcaacgacgccatttccctcctcatccactcccccgcctaagaagtcccctgcagcagtaactcttcctttctttgggccagcgggccaattaccggatgggaccgtagcacctcctattgggcctgttatagagcccaagacgagtccagccgaatcaatatctccgggaacgccacagccactggttccgaagagtctacctgtaacgacgtcgtatcaccgatcatccgccggattcttatttggcggtgtaatcgttggggctcttctactaattctgttaggtcttctctttgtcttctacagagctaccagaaatagaaataacaacagcagctctgctcatcatcaatccaaaactccctcaaaaggtataaactttgagatcaatttgtttcagactgtcacttaaaatgtaatgtaattgtaagttatgatcttttttgcttggatcagttcaacatcatcggggcggtaatgctggtacgaaccaggcacatgttatcacaatgccaccaccaatccatgctaaatatatatctagtggaggttgtgatacgaaggagaacaattctgttgcgaaaaacatttcaatgccatctggaatgttctcctacgaagaactttcaaaagcaactggtggattttcagaggagaaccttttgggagaaggcggtttcggatatgttcacaaaggagtgttgaaaaacgggacagaagttgcggtgaagcagctgaagattgggagctatcaaggggaaagagaattccaagctgaggttgacacaatcagtagggttcatcataagcacctcgtttcattggttggttattgcgttaatggagataaaagactcttggtttacgagtttgttcctaaagataccttggagttccacttgcatggtaaaatagatatatgatttcatcctttttgattttgtctttagttcattatgttgagtattgtgagaatatgtgttgtagagaacagaggaagcgtgttggaatgggaaatgaggctcaggattgctgtaggagcagcaaaaggattagcttatcttcatgaggattgtgagttgtttctcttcataatgggaatgacaatggccttttttgggttttcgacactgatattgatttctggtgcttgtaatgcaggcagtccaactataattcaccgtgatatcaaagcagctaatatccttctagattccaaatttgaggcaaaggtgatctgctctttaatcttatcaaagtttggtttttagaacagagtttgcccattttcggtttatagtcacaccattttgttctatttaacaagattacatgtagcttagagttcttgttctcttcaggtctctgactttggactagccaagtttttctcagacaccaattcatcattcactcatatctctactcgagtggtaggaactttcgggtaaaacaccatccatccatgctttatatgttgcgtcattgtgtttaaaaatattaatttacggtttcaagtttcaagtttcaagtttcttccttgttgtatcgtaaatccagatcaaaagatttattgattactaaatgccttgtgcaccgtctatttggtatgcatttaaacagatacatggctccagaatacgcgtccagtggtaaagtaactgataaatcagatgtatattcctttggggtcgtgcttctagaactcatcactggacgtccatcaattttcgccaaagattcttccacaaaccagagtttagtagactgggtaagtcaaagtacatgatgatgatgatgataccattaggttttctttttcccactagttattagatgaaaatgaaactccagtataactgcaagcttgaaacttcattagactgtaaattttgattattcctcaggcgaggccattgcttacgaaagcaatctctggagaaagttttgactttcttgtagactcaaggttggagaagaattacgatacaactcagatggcaaacatggctgcttgtgctgctgcttgcatacgccaatcagcttggcttcggcctagaatgagccaggtctgagatttagtttaaatacatgtattcgtccatatatccgaaaggaacaagcctaatccatgaatacatttatatcttgaaaaaaacttgaataggtagtacgtgctcttgaaggcgaggtggccctgagaaaggtcgaagagactgggaatagcgtgacctatagctcttctgaaaacccgaatgacatcacaccacggtatggaacaaataagaggagattcgacacaggttcaagcgatggttacacttcagaatatggagttaacccttctcagtcgagcagtgaacatcaacaggtgaatacttagttcacaggttcaatagggcaagtttcaccacaattattgggttttcggatacagtcatcttgggttaacataaaatgttgtaagaaattagactacttcattcatttgtagttaaggggtccgaagaacactgcttgtgttttgttaaatgtataaattggttgtaatattggggcacaagtttaattatgttgcaaatactttgtttgcttctgatctaacttctatttctctgatttccagtttttagctttatgacattactatggcaatttatactcttatgttttcataatatagttttatgacattactaggacaagataatgtatatgttttcataatagttttattattagatagtaaatagcagttttcacattatatttaggggtccgtaataagtctaagcttgcacatttactgagcttccatcacctcttgtgttgtctgtgtcataaacagtgaagagtaaatttggagtagaacaaacaaaagtcaaaatcaggaaaagtttaatgatggatctgcggcacttcgtaacattcatgaagatcattaagagcaaattgttgtgattcattaatgtttttgatacagagttctttcatgttctaatgatgtgccaaggcattttggggcttgggacaaaaaaaataaaatgtggcctatctaatttagttgaataattatttttaaagaacctaaaatataactagaagagaaaaagtgagctacaatacaaaatc

SEQ ID NO: 5514 - DNA, 2940 bp, Arabidopsis thaliana landsberg
tggtgtaacaataaagaagctgatccaaaaaacgattgcagtatttgcaatacccgaaaggtcggcacatgctattatttctgtgtcgagtgtgatcaaaggtaccacaaagaatgtgttgagtctccactagagatcaattatccttcccacgtcaaacattctctccaactttataatgtaaaaacatttgagcattgcatcttgagcacaaagaaagcagaagttttgctttattattgtgctctttgcgacatttatatgcatgtcctttgtgctcaggcaaaaatcccttttctcatagaccaaccaaaaaagcatgaccataccctcaccctttttcctagacaagcttccttaacatgcaatgtttgcggtttggtagataaacttcatctcacttacgtctgtcgttctatatgcgattttgtagcccatatagactgtatccataacccacaaactataagaatttctcgtcatttccacggtgtgtctttcacttcttctcttccatcaggaaaatggtgttgtggaatttgtcgccgagagattgacagtgattatggggcatacagttgcaatgtgtgtaaggactacgctgttcacacaagatgtgcattgcgtaaggatatatgggatggcattgaactcgaaggagtaccagaagacaaagatgttgagcttccgttctacaggatagctgatggaatcatacttcacttttctcatggttgtcatatgaaatttgaaaccaatggagtttacaaagaaaacgagttttgtcaagcttgtgtccttccaatcaacgaggaaaacttttatgtctgtgtgaaatgtgactttattctacatgaaaaatgtgcggatgccccccggaagaaggttcatccattacatccacatccaattgaacaaaaggttgtccatgaaaaccatgaattcgaatgtgctgcttgtatgcgtaagagtagtggttttggatatgtgtgtaccatcaatggttgtgactacgagctagatgcagtgtgtgcttcggcttctgagccatttaattatcaagtccatccacaccctttatttctggctttagacccaaagaaacgacagtatgccacatttgcaagtcaacaggagttcaaaaggtagtaaattgcattgaatgtgattttatcatatgttttaagtgtgctaccctaccatacacggtaaggtacaagcatgatgagcattacctcacgttttgtcgtggagacgaggcaagtggctcagattggtgtgaattatgcgaaggaagcttagtcgttggaggagaaaaagggttctataagtgcaacgagtgttgtaccacacttcatattaattgcttacttggcccagatccatatttgaagccgggtctaactttcccattgtgtggcggtgagattctttttcaacgcaacaattctgcttctcggccaatttgccataagtgcaatatccggtgtccgtatccaacagttttggaatacagattggaaatgtcttctacttttctatgttgcattctccacctataaatcttcgtgtttttggaatacagattggagatgtcttctgtttgtcgaatcacgagcagaacattttcgatatgtatatttcgattgtaatatttttttcttgtttgccgataccaaccttgtttcttacattctataaacgatgttgcattctcctgaaggtgaaaaatacggaatctgtaaagtgaaaccgagatcatttggattttcgacattcggaacacttaataatatactcatctaatcatattaacttgatgaaactaactagttcttacctcttgatacttatccgcattcaataaatgacctatttctaactcgattcacgttctcttgagtgcacatactcggtaaaataaagacttatattaatgtagtatgtcaaatgattatacatatagtaaagatgtatgtccaattcactttagactcttctctaagtcgacgcattttctttctggcgtatattagcatgtcaccatcaatgagcttctaaccgcaactctaaccgcaccgacaacactcagttgtctcgtctctggtctcagctctttaatttcagtatttctacaacttgcttctacttgaacacccacaaaatatgctgtctaaaaaaagcagaaatcagtaactgtactaattactttcagttctacatgtcatatccgggttttgtatcaaggccaaaaaatgaaagacaaaaggatttggtaacaggaagtatgtagtcatgaagggatatataccttgcctgaagcattacgaactggtgagatgtgaagaagattccaaaatgagctcttatcttttctgttactgataaaaaacatatatgatcagcccaaaacaaatcaaagaaacaagattcgatcgcaaaaatgttttgaagaagtaaatcttcaacctgtaatttagtatttgcactgtgcatgattgtccctttaagatgcattccttcatctgaaccaaataaaacattcacaattatcaatcatgccatatactaattaacaagttaaaacgcaatctctacctcgtatagtactgaggaatcagtatcaaccccactcagaaatctacagttttgtcccaacacttcctgtctcttgtaacctacaaacattgatataaataagaactgtgaccaaaatctaataacggtaactttatttcttcaaacctagacacacttaccggtcagtgtcaaaaaggcatcactcgcataaatgataggcatgtctggtaagcatggattggttctgcaaagttacgagaacaatgtcaatatcaaaatctattgtagcagactgtaactccataacacaataaaaaaataatgtactcacaatacgaaactttgtttgattctaccgag

SEQ ID NO: 5515 - DNA, 1134 bp, Arabidopsis thaliana landsberg
cgtcagttgatcatgatcccgtactacctctgtttgggtgcaacattttagaagctgatccagagaacgattgcgttatttgcaaagcctaaaaggtcggcacagactattattactgtgtcgagtgtgatatgaggtaccacaaagaatgtgtcgagtctccacttaggatcaattatccttcccacgccaatcattctttccaactttactcttccaagaaaagattcaagtattgcatcatgtgcagaaaaaaagtaaacggtctcgtatattattgtgctctttgtgacatgtatatgcatacgctttgtgcccaggcggtaataccctttttcatagaccaaccaaaaaggcatgcccatatcctcacccttttcccaaggcaagcttccttaacctgcaatatttgtggtgtacttgatgaacttcatttcacctacgtttgtcctatatgcgattttgtcacccatgctgattgtatatatatcccacaaaccataagaatatctcgccaccaccactgtatctctttcacttcttctcttctaaaaggaaaatggtcttgtggagtttgccgtcaagaagttaacaggaagtatggtgcatacacttgcaatgcgtgtaatggctacactgttcacacaagatgtgcattgcgtaatgatatatgggatggaaaagaacttgagggagtacaagaagatgaagaagttgagccgccgttcaaaaggatatcagatggaataatactccatttttctcatggctgtcaaatggaattggagaccagtggagttcacgtcggcggaaacaagttttgtcaggcatgtgctcttccaatcaacgaggaaaacttttatatatgtgtggaatgtgacttcattctacacgaaacatgtgcagaagctccgcaaaagaagtttcatccattacatccccatgcacttcaacaaaaggttgtccatgaaaatgatttattcttatgtgatgcatgtgatcgcttatgtaatggtttcggatatgagtgtccgttccagcattgtgaatacacactagatgtagtatgtgcatcggcttctgagccgttcccccatccaggccatcatcacccataattcctagcggtacgcc

SEQ ID NO: 5516 - DNA, 639 bp, Arabidopsis thaliana landsberg
  unsure (1)..(639): unsure at all n locations
tataaagtgtcgcccaccaatctttgcactcatagaatccttcttttcctccaattgctaactttccctcacataattcacaccaatctgagtcacttgcctcatctccatgacaaaatgtgaggtaatgttcatcatgcttataccttatcatgtatggtaaggtggcgcattcgaaacatacaataaagtcacattcaatgcagttaagtaccttcttatcttttgttgacctgcaaatgtggcacattggcttctcttttgnnnctaacgataagaataagggatgtcgatggccttgataatcaaacggctcagcagtcgaggcacacactatatctatcatgtacttgcaattgtggttgatacacctatatccaaaagcagtactcgtacgccaacaagctttgcagtggaagcaattgtcttcataaaaaattagtttaaggggatggggatgtaatggatggacctttctacgnnnnnnnnnnnnnnnnntttcgtgtaggatgaaatcacatcccacacatacatacaaattcccttcattgactggaagggcacaagctngacaaaacttgtttccattgtaaactccacttatctcaaaatacagatgaatgcgatgagaaaaatgag

SEQ ID NO: 5517 - DNA, 742 bp, Arabidopsis thaliana landsberg
catgattatggtgcatacacttgttgtgtgtgttgtggctacttttgttcacacaagatgtgcattgggcacagatgtatgggatggcattgaactcgagggagtgcaagaagatgaagatgttgagcctccgttcaaagggatagctggtggaacaatacttcacttttctcatggttgtcaactggaatttaagacaagtgaagtttacgaccaagaaaagttttgtcaagcatgtgcccttccaatctacgagaagaatttttatgaatgtgtagaatgtgacttcatcctacatgaaagatgtgtagaggctccccgtaagaaggtccatccattacatccccatccacttatacaaaagtttactcacgtagaaggcggcttctcatgtcaggcgtgtaatcgcatgagtaatagttttggatatgagtgtctcatggaagattgtggctacaatctagatgtagtgtgtgcctctatttctgagccgtttgattatcaaggccatcaccaccccttatttctgtctttagaccccaaagaagagccaatctgccacatttgcaggtcaacataaattcaaaaggtattgaattgcattgaatttcaatgcgattttattatatgttttaagtgtgctaccttaccatacatggtaaggtataagcatgatgaacaatacatcacattttgtcgtggagatgaggcaagtggctcagactggtgtgagttatcgaag

SEQ ID NO: 5518 - DNA, 1358 bp, Arabidopsis thaliana landsberg
atcgtgatcgcttcatctatctttgccaaaaaaataattttgatatctttgaccttttatctctttcaatggctgcttcatttcaaaccaagaaccctctaagacccgtcaccaacatcccaagaagctatggtccaacgcgtgtacgtgtcacatgctctgttactaccaccaatcctcagcctaatcatgagaaacttcttgttgaaaaaggcttcgtgaatcatcctttgtccaagaacaacgacccgactctgcaatcgacatggactcatcggttatgggttgcagcgggaagcacaaccatttttgcctctttcgctaaatctttcattggagggtttggttctcatctttggctccaaccagctttagcgtgttatgcagggtacgtcttatctgatctaggctctggtgtttaccactgggccattgataactatggtggtgcatcaacacctatagttggagcccaacttgaagcgtctcagggtcatcacaagtatccctggacaatcacaaaacgtcaattcgccaacaattcatacactatcgctcgagccataacttttatagttctaccactaaaccttgcaattaacaatcctctgtttcatagctttgtgagcacatttgcattttgtattttgttaagccaacaattccatgcttgggctcatggaaccaagagcaagcttccacctctcgtggtggcgttgcaggacatgggactgcttgtctcacggaaagatcacccgggacatcaccaagcaccgtataacagcaactactgtgtagtgagtggggcatggaacaaggttttggacgaaagtaacttatttaaggcattggagatggcgttgtttttccagttcggtgtgagaccaaactcgtggaacgagccaaactctgactggacagaagaaaccgagactaatttctttacaaagatttaaagaatatctgaatatgtatgagtgtgtcgaataaagagcatgtattaggtttaagtatcagatcttgtaagctgattaaacctccattgttgatgatcttttgtaagcatgcaaacttcaataacctgaactactactttttacaaataacctttctagtctctttttacatggcggaaacattattcatatttttaaaaaaatctactagtacagattacaatatacagagtatcaccatgaacatgatgaaccaaaacaacatagcttgttacaaaaatagcttacaaagccttcttctttgtgtgcttaacacaaatgaaggcataaacaggaatgctgacaagtccaagagagaccaaaagccagatgaagtagtcaagatgttccttattaaggtcg

SEQ ID NO: 5519 - DNA, 558 bp, Arabidopsis thaliana landsberg
  unsure (1)..(558): unsure at all n locations
gccttggctctgtgtcaaaagtaacaaaatcctcaagtcacttcaatttaaacttctaagaaacatgtaaaaaattgttttctttttaggaagaatgtatggtctgattataaccagagccaactccaacatctagttatggtctttgttcagctccgtgggaaccgtacgaacaagctttttcttgccaatagtgataacctcaaatccgctacccaatacctaaggagaaaatcccaagatatcagcaagatcagttcaaaaaatctgaaagaaaaaagaaaaacacaagtgagatagaaacctttagcttgctaatagctcgtaaacaatcatcttcagtcacagcttcacgatctttcttccttctctgacgaagatggttgcagagctcttgcaagccctgatcaaaccnnntccattatgttganntcttgtannatcatgcccaaacccttcaaaaattaaaaaatttccctttgggaaaaaaaaacctcctatttaatgaattcacgaaaattctaaaaaagagaaaaaagtacacaatatatttatagc

SEQ ID NO: 5520 - DNA, 4007 bp, Arabidopsis thaliana landsberg
  unsure (1)..(4007): unsure at all n locations
aaacggcagcgctttgaaatggaaatcattgatacgtaatcaataagttacctcttagcttgtttacgagattttcagcaccggtgtgacgtttatacgggtgccattctgactataaacgacatggcaacgtaaagcctggattctcagcagcttgctagctctcttactggaggtacctgggaatggaaaccaaaacaaaagaattttaacggaaagctacgaagattagtgaagacgtttctaataatgttgcgcctggttaaatttaccgctgcaggctttttgactgtaaatgtgtagcagtagtcagttgaaagatgctcagcaagagtgacaatctgctcgtcattgtcagcctttttctcgttaagcgaagatgcccaacggatcaaagtcttcctcagcccttcaccgccccacctatattctatgtgggagtggtagtaaaagtctacgacaaaaggaccgtcttcgttgttgagggatgtgtagtggagatcacttccgctgttacatatgaaagcgtcgaaatcattcgggtttaagcctcctgacaccaagaaagattgtacctcagagatcgttagagatgtcgacagtatgaacccaacagatccttctgctctttccttttcaaccgcatcaagaattctttttgtagcctctagcgtgtcttcttccccatcaaaatcaagagcaataacaacaataaacttccttctccgcactgctgggaattttccagagttaacctctgacctctccagtgatcccattttgcggctatctttgcctttagaccaattttggacagcagcttcgattttgctcttcctatccatggagctcccttcttggttcatgtaattatcattcccacttccatcaaatgaaaactttaagttcaaggatatatcctgtatatccctcaaagaatcactaggtgactcgggttctgaattatcaccgccatcatcactttgccactgtggatgtcttggtttgaagctggttatgcgagatagataagttttgcagtgctctggccaagagaattggtgaatgttcttcaacccgttttgccgacactttgcccataggtgcttatcagcaacaagcttaagaagagcttcagaaatagactgctgatcatgaggatccacaagaaggccattatccaggacctggtagaaattttccaaagtacattttagaacaaacgagcaggtatgtaatagtctgggggacttcaatgttttatcgtaaaaacacatacccggtgaatatctacaggaccaccattttttgtagcaaccataggtaaaccatgagctgcagcctagaaggaaaaaagaaacaaattttatccagatgacaagaacgagtcatgaaatatacacatgtgacaaaaagagaatacaatacctcaattagagtaagtccaaatggttcaatgatagctggattgatgaaaacaccctgcaaaggatccattaacaatgttaatctactaaagaggtgaatgaaagcaaaggatacttattattaactgtgagaccaactctgctagtacctttgactttgcagctaggcgatatatgtctggaacatctgattgtttgtgatgtttagggtacgcaacttgaccgtagagatcatacttgtcaattagcttcagaacagaaaggagaacagaagaacttgtgctcgacatttcatcaatcccatctcggttgcccataataagtgcctgcaaaccagaaatatggaagataaggaaaataaaatggtgatcaaaacaagacagaagacaaacaaccaaagttcaaagaaatgtcttcacagaagtccccatatggcatttacataccaggttagcaagctctctcagtggacgacattctccaaatgccttcactaacgtcgtgatgttcttttttgggtcaggcctcgcaagggcaagtatcataggctttcgggaattcgaaaagaaacgcattatctgcatcacatgtagaatttggaggtctgagtaaattgcttaacggaaagctaatgtgaaaatattatttacaagaattaatctcattaaggtgatatagattgctaattaaagcaaagaacctcagcccatattggtggatctggagaagttggatgttcctcgttcccatctgtgtcttccatatcaccaccatgtgggacaatatgattgaactccatcccaggtggaattttctgaagaagaagtaaaaaacagagtacatttttatgatactacaaaagagtcagaaggatagagtattaaaaatgatctactgtgttaaaacgtaaattaaaaggcatgtctatacaaatccagagcaacaattttgctgcagctaaacgtatcactcatgggctatggcctaaacaaatctatcagtaggttgtcaccaaataagatctcccaatagtaagcactaaagtctcaactgtggaaagcatatatttcagacggtgttaaccatgccaatggtcaaggatgaagaaaacagcgaaggtttaagttacttacaaccatgcgaggcatgaaccgtccatagcagctcacattccgcttgattctggctctcaatttgcgctccaatatggggtcaaatccatcatacagtctccattgctcatcaatctcctgtcgagtgctagttattaccatttcagaaacatcaagagataattcctcaccctctatccgacgcataatcttgtacgttgaatttatttcttcttttgaaaggcggccttgtctcaaaagctgctccaatttatctctcccgagtgagtgaccagtaaggagcataggcacatttagtgcacccgacagcagggcagtggcatcaccagcatcagcatagtgtccatggatggcagaaggccaaataggcttcccaacaccaacttgctcgccgagaacatttgacatttgcatgatgtggctcatannnnnnnnnnnnnnnnnnnnnnnnnnaggccatagaagttcttttggaatatacttgtcctttggaccaaatggtatcctcacaatataagcaccgctactctcccccatctcatccgagaaatcttcagaatctctaggagtcagcatttccgtaggttcaccataactatagtcaacatctggtgaagacacttgtctagtaagcaagtcaaccctataaactcctggcattgaacccagtgcacgtgcaagttccacaacatatttaacctgtaacgtaagaagcagtaagaggaggactagcctacctttgagccatatttcaatcacttaaattgtccatatcattaatcaagtatcattacctgtccaccggtgtcagagtcgcggccgagctccatgttttcaccacgtatgagaccatgaagactgcatacatactgaatgttaaacaactaacatacaagtttccatcactactattacaccttctcaattgaaagatcagttgccatatgtttacttactcagagtatatgttaaaacagatcctagaaggtgagcctaaatataactcgacttaaccaagtaagaaaattacatacggaaacagaacagaacaaacacatgtaaaaagcaaacgccaagaaaaccagagtttgagcacatacctaatcaaaacaagatagagcttatttcccttctgttggctagcccataactccatggactcagcagaattaattctgggcaaccttggtttggtgctttcaccatgagtagatatatcactgatgatatctcctttttctccctctgaaaactcctcagacatatcagctgttgcctctctgcgacctttctcacgttcaagcctgcgcttagccagcctctgtgctttttttcctcatgctagacaaacataagaatgaaaaaaaacaaaacatcaattctcaatacgttcaagatatttatgtatcanaaccacaaagttcatcaaattcataattcaacgatc

SEQ ID NO: 5521 - DNA, 2846 bp, Arabidopsis thaliana landsberg
tggacggtgacggtttggcccggagcgggtttgggaccgttgccgggtctgatgacttgcttctccacacccatctctatatcttctctctgtctctctcactgtttcgcgttctttgcagcttcgaatctcggagtagcttttgcctatatattttgttatttatcaattatcatgctgtttgatctaaaccctatctgggcctaacaataatccaaaacccaattcgatgaaatttaggcccattatttattctttctcaaaggtggataatataatactgtaccagaccgaattaagaagcagaatctagcccaaaactattttttacttcggattcatcaaattcaagcgcagacttgtagctatcaaaatttccttcgcatttttgaaagatacatggtcaagaagacagagcaatgtagatacaacgaaccttcttcatcacaattacagaaaaaatgattatgtagatatcatgtttagagcctaaacggctaaacagttccatcattaatgtcttaaacaagcttttatgaacagacaatggaaccttcactgcgcaactggagcgtataaaagccagataacgtgcacgaatcacctcttggatagcttctgtatcttctagattctgcagactactcattacaggtaagtgagaatacctagctactatgactacacaaaaaaaactctacatagccgtttaggtctttaccttagaccccagcaagaaattcttgacaaaaagcttacttgttttccttacctttcaaagcatcaaggatgaatgaagcaagcaatgtgtgttgtcactttccctcttcgtttgtcagtccagaacacaacaagttatctagtgaatgaacagaagcagcaattacgacatggaaaccacctatgttttgcaatttgctgctctatggccttttgagttggaggaacataattcttttgcaacaaaatgaaacctgagcaggataagtaactcactttactttagataaggcatttggctagtaaggttttatagtctaataaacccgagaaagataatcttaatgcctttactcagaactcagaagcagaagactatataccagaaagcgacgaaagcatccgaattttgagcaaaataacatcaacagattccaactacagggattccaaggaatcaaaatgctagtatttccactacagttaaacatcaacaggaaacataaaagctaaggcctacaacaacgaaacacccgcaacctaaacaaagagaggaaaaagccttacttcactaagtagccttgatcttatcatctccaacaacagaaagtatgggcaaactattcaagaattcatcaagtccctcaaagaacccaatcccttccatattatctacctccctgttacttccgatcccattgcctgcatttcccccacctgccacaccaggctcttccacttcattactaaactccacattcaaatccaacctccccaggttcttagcgcctgttcccattcgttttctagtaatataactccctggtttagacataaacccagttgaagaaccaacagccgcagcatttgaagcaattgaaaccgcgtgattggtagcactactgatactttctacattttggacttcttcaactccatgtttcttgttacttctcacatatgtttctttccctttcccaacattcgtcttcttattcacttgtaccacatcttgccaatcaccatcatcaccagcgtcatctccatccgaaatcgcaacataaatgtcatcatcgtcatagtaaatcctaggaggacccggttcctttctcttctttggttcaccatccaacttttgcagaggacaggcaaagagaggtgaaataggtgaccaacttggagcttgaaattcaccggaaaaccccaatggaaacaaagcccatgagcaaaagtaaacgtcttcgtcgtctttcttatccaccggaggttttggtatcgtcacagcttgaaacgctcttctacattcttgacatttcaaagtacattcttcgtaagccttagggtactcaaagagtacaaagcagtaagggcaagcggtccagaagctcgtcgccataggatccgtcgaggtcccagcctggctctgagaccgcggtggcggatatacggcggtgctactgctaggttcccactggaaattttgatgcgattgggtttgaggatggaatccagattgaccgagttgactaagttgcaattctcggtcgtagaatgatttcttgaactgatcagagagaacgaaccaagcatcggagacgattttaagagctcgatcggcgaatgggagacgattaacggaaggattgaggagaagagcgagtctacggtattgagtcgcgacgtgttcagggttttgagctaaacgaccgagtcggagaacggcgtaccagtctggcaagttggaatcacctaaacgagtctctccggcgagaagaatgtcgcagattgcgaggatgtagtctgcagcttctgctcgggtcgggtcagcttcgcatgcgcggatcgcaaatgtctttgctccttgaagatcactagacgctagaagcttctccgatgttacaagccaccgatccgcctccactctgttaccaccaccaccgccaactccgccgcgtccgcctaccatatcccctatttctttttgttccctttcgtttttcctctctccccgttgaatttatttattattttatcggtaaagagtaaatacagatctaaaaattaaaaggacgaaaacatgatggatcgtcaatgggccggaacaacaacatgatggatcgtcaagg

SEQ ID NO: 5522 - DNA, 626 bp, Arabidopsis thaliana landsberg
  unsure (1)..(626): unsure at all n locations
ttctgaaagatagttaccaaacacattaccaaatgtcggagaggttctacctttagattttttgaaagtcaacgatttaatcatcacatttccagtactaaagctgagtgcagtattaacgacagtggcaatgccctccacggacgtaataacctcatttggatagtccaggacaaactgcaacagaaaaagattattatatatgtataagccgttattcaggagcatggatagatagatagagacaaatatttagagttgaggagttatgacctctccttcttgtactgcggcaacaattttcggcccgtgctcacgggattcgactttgccgtcgttatcataatcgaaccgaacacaccgcacactatatccatcataatatatatgcacctttcttactccttggaaactaccatcatcccaaaggttacctgaaccaccattcttaggaagcttttcacgaaaactatcttcgtattccaatttagttagaggaagtgttgtgaaatatgctccgagagaatataggttcttgccagcatgtccatgaaacccaatgatcttattaccagtgcatccaatngtaaacttcacagcatcatcgtcatagtagcccataagtt

SEQ ID NO: 5523 - DNA, 1827 bp, Arabidopsis thaliana landsberg
cctttggggacctcaaaaggtgaaaagcagtatggacaagctgtccaaaagcttgtagctgaaggattctccaaggtctcagcttggctctgcaatggcgaatcttgaaatttctccgattgaccagtttgactcagctgcaactctcgatcgtaaattgatttccttggaggatcagagaggacataccaagcatcggagacgagtttaagcgcttgatcggcgaaaggaagacgattgatattgagtttgaggagaagagtgagtctacggtactgagtcgcgacgtgttcagggctttgggttaggcggctgattcgaagtaccgcgtaccagtctggtactttggaatctccgattgtagtttctccggcgaggagagtgtcggcgatggcgaggatatagtcagctgcgtctgttcgggatgggtcagcttcgcatgcacggatcgcaaatgtctttgctccatgaaagtcacttgaagccaagagcttctccgatgtagcaagcaactgatctgcctccgctctgttattctcgccgccgccgtcgcttaccatatctccgttactctttttgctccttttttatttgtttgcgttaaatacagagcttctttgccagtggaccaaaaggacctcgtatatacataacattttcattattaatcgtataagaaaaatgcaacactaagggtatttttgtcattaaaaagtttgcatgcgtttgtcgatacgtatatacgagtttatactttatacggtcgctaaatacttacatggtatacaatcctatttaactttttttttttggttcaggtcaaaacgattgtcattgtaattaggacatttttaccacctgttcgtctaattatagtaagtttttgtaaccatttttatacataggaaccatatatattcgaataactctcccctaacaatacggttttaatattcaacgtgaaaaattgtcatggggttaaacggtaagatcggaggtggtggtaagactgtgttaacagccacacatcatcctctatttctttttcctccctcacacttgtgatctctccaaagaaaaagtctattagagatcgatgaaggattaaagacgatcaataacggagatagagatcgattacaataatggatgaagagtatgatgtgattgtccttgggactggtcttaaggagtgtatccttagtggcctcctctctgtcgatggcctcaaggttttctccttgattcataattttcttttaccattaaattgtttttgtgcatcacatccagataaagctttaggtttatgtttagttttcgcttttgttttattatagttatgaatatagtatgcaaaattgttgcatagtatgtcatcaatatagagttatgaaatataataatccaatttataacatttgatcttttgaatgagtttttgttgttgcaaaacaaaaagcgaaattttgtttcatagatcataggtaatttaaatgtggcataggaaacatatacaagttagtagatttattttcaaatatgtgcaatcattaacgaaatatagttttttaaatttaatcttgggatctaaataggtactacatatggatagaaacgactactatggaggagaatcatcctctcttaacctcactcagctatggaagcgttttaggggaagtgacactcctgaagaaaatcttggagcaagcagagaatacaatgtcgatatgatcccaaaggtacatatttgtgtactgtttattgatggtgaatatgcgggaattcatggatatatatatgtattgcttattgatggcgaat

SEQ ID NO: 5524 - DNA, 2840 bp, Arabidopsis thaliana landsberg
gccagtatgttgcctcattggcgagggctctcatctattgccatggcaagcatgtgatacacagagatattaaaccagagaatctgctaattggtgctcaggtgatgatataagctttaccttttcctttacatctatccatttgattatgaaactagctaatattattattcatggatccttaactattcagggtgagctcaagattgcagactttggttggtcggtacacacatttaaccgaagaaggaccatgtgtggcacactagattaccttcctcctgagatgggtaaagttgaaggcttgctaaaaagttagttctggtgggatctaaattctttttaacagtgaccttttggattgttttacagtcgaaagcgtagaacatgatgctagtgtagatatctggagccttgggattctctgttacgagtttctttatggtgtacctccttttgaagccatggagcactcagacacatacagaaggtaaacagcatttgaaatctacaattatagtctgtttcttgtggggtttgtttgatgatatttgttaccaccaatgatctatatcaggattgtgcaagtagatctcaagttccctcccaaaccaataatctctgcatctgcaaaggatcttattagccaggttatattctataccttcaatctaacagatacactttgatgcaagtgctagttattgaatctgaagtctcacatattttctcaattgtatgtatagatgcttgtcaaggagtcttcgcaacgtctgccattgcacaagcttctggagcatccgtggatcgtgcaaaacgctgatccttctggaatctacagagtttaaaaacaaaacgcttactgttctcgccaatctcgaccaaaactgttatctagaaacccaaaactgtattctttcttactattatttttcgctaattcatgttccaaataatgtgtattatgtagtatgtactaatactatatggcattaacggaagaaggaaactctataaagagttgttagctgaaaaatgtttctaatttcacctatgacgatgagaacttctagaagtttctccatgcagttccctgcacattagccaattcaagtttcaagagggagggaaggataaatgcaacagtccataccacatatgagtaatgtgaacccaaagacggtgagtttgatgaaatggtttgcctatttgaagggttatttacaacccgcgtgtttatccgtttccagaggcaagataatgacgattttttacaaaacaatgtcaatggcattactctgtaactttttacaaaacaatgtcagattttgttataaacttctaaattaatagtagggattagtgcagaatagtagagatgaacttctcaggcttggataagaggttaccagagacgaagaagataacaagtcagaatatcattaatggtgatgcaaaaaaaatcaaatgacggaatgtaattttgccaaaaaatttttgctattagtcggtaaactccgtggttcctttaggagggttcatgaagctggggtggtttgtagatgacaacattcgcacccacattctatctgtaatcacaactttgttctgtctttcggttattcgctgcgcagagaaaaggaaagaaacaaaaaaaggattaaagctcgatgatccaatggcaaggacatatacttaggcgaagagaaacttacgttaaagggaatgtaggtgtgccttccattaacaagaccagagacaaagccggtatagccagccattgcaccatggactgcgctttgggcaaggagagttgagtagacgttgtcagatgcattggctggaatagctcggatcatgtatgtcggatctgaaacatggtttgagtcatatttctaattcatgaatctatgtagctcgacttgaatttggggaggacaaacgtaccaatgtatttaagagtaatgtccattacattgtgcttcgcaaagtattcctgtaacaagagccagagaaggaaacaactgtaataaacccacataaatatcttgtcttttaggtgaaaatatgggactgaatctcgttggcaataatttaccttgattttaagactcatccatagtcctacatctttaaggagcttgtttcctgaagcatcttgttgttcaatgctctctgcaacaagatcctgtcctgctccttcagcaatcactataaccatgtggccattttctctgagacgttttgcaatgaactcatagagccctcctttgccttcaaggtaaaagggtgactcgggaatcagacagcagtcaacatctcggctagccagagtagcatacattgcaatgaaccctgcagtgtagaagctgtaagattagataaaagcgtagggagtaacatcataaagaagatacttctgtggtctaatatttgtatgcattactgctctcctagattcttctgtgaacttaccactgtaccgacccattagcttgacaattccaatgccgttttccacactggtcgcttcaacatgcgctgcattaatagcacgttgagcctcctcaaccgcagtatcaaatccaaaggacttgtcaatgacctagatcagagatactatcatcaaattgagcttcttgcgaactaaccaaaataggagaggaggttaaggttgagagtgcagactacaataatgataatctaggacttactgggatgtcgttgtcaatggtttttggtattcctgcaactgcaactttaagtccacggcgcctaatttcctgcagcatcagtcaaaaaaaatttgcttcacaagattaaagtgcttgtgacgtttg

SEQ ID NO: 5525 - DNA, 2000 bp, Arabidopsis thaliana landsberg
cagatcagtcgttcctccacttccggcgcaatatttgctggccttgaaagtcaatagcatcttgtttgtataaatgtcagatctattagagttaagtgagttagtgtgcttgctttctccacccgaggtctcgttaagagtaagctccgcaaaaatccagaactcagcccaagtgtccgtcatatgattatgtccttaagtatttggtcccaacttgatactgaacgaacttgaccagtaaaacttcatctctcttgttatgcgtaggctgctgagcttattagacaaccgttgcttcaaccgtatatccagaagattcatttgaaagtgaatgatccaggaagtaatgtgttacctgcgcaatggccagaatctgaatccgccaggagaaacagttttccagaacagagaaggcgtcctgctggcaaaagccatagctttggtccaagcaggtttaggggtaacctagaagattctgtttcttccataaaaaaaactgtgcccgcatatctgaatcgtgaaaggcaagtggtctatgttacagaatcagactacagagggaaaaagagaagattacaagttaatcgttaggcagtacattcggtatgtaccagagagagcttcggcctcacctgtgagacctagacagcctaggagtgaccttggtcaagtaagtgatccatttaaaatgctcttctttactggttttaccgattctttgattagaataaaagaatggtggttcctatatgttgcagcttcctgtttcatcacaacttaaaaaccgaaaaccagctgctttgatacgtagagcctccatgcctagctcaagaaaacctgcaaaagaaatcaaagactctctgtacatttcgaaaaccagttttctccaccagataaattctcctgatgtgtcaatgaacgcaccaagaattgacaagattgagtttccgttagcgtcatacgaggaagagccttttgtcccggttgtgcgtgggaagaaaaagaaagcatcgtctagaggttcctacagtccacctccagagccaccactagactgctcaatcacaaaagacaaatttactcttgaaccaggccaaaacagagaaggagcgattatgaaggcggtgtatgaagaagatgcatatctggaagacaggagtgaatcatctgatcaaaatgcgacagctggagcatcaagcagggcttcgtcgggtgtaaggagacaaagatttgatcctagctcttatcagcaacgagccgaggcattggagggattgcttgaattcagtgcaaggttgcttcaagatgagaggtacgatgagctcaatgtcttattaagaccatttggtccaggcaaagtttcacccagagaaacagcgatttggttgtccaagagcttcaaggaaaccactactactaagctgggagattgagagacggatttctaattctaacctgttgtgacttgaaaattttccacctttaacagtttatcaagaaaattgtatcaaagtttaactacctaggttgtcttctttaatgagtagcggaccctctttgtctgatacattgaaattctggaaaaaacttggccggttaccaaaattctattttggtgcttatttcagacaaaatttcctgaacttccgcacaaatacatgaatgtacacatgtttaaaatagacaagatagaatcactagttaagtgtctgaaacagagtaatataaccagcaaatggctttatacgcagtgtgtgctagccaggaggagcggatgttaatcactagttaagtgtcttgtgatatgcaacctgcaattaaagaagaaagcagtattcagatgttgagatttctttttgactttaatttgtaaacttagaagtaccaaattcaagtgaattcaggaatatctgagattcagcagtttgagtacttacagaagttgacgtcttttatagttctctgattgccattgtggcataacaagaagatgggagagt

SEQ ID NO: 5526 - DNA, 1172 bp, Arabidopsis thaliana landsberg
  unsure (1)..(1172): unsure at all n locations
aaaccccaaccattaccagcttcgagtatcaagatgtgtaatgattttttcgggcaaagatttaattttgatcccccttttaatcggttaggttttgattttttttgcatttgtttcgctttttttttttcagttttcgattgcagcgatcaatgatacggagtccacagagaagtgggaacctttagctcctagcaaagaagctcaggttttcttctgattcagggcttctttcttctcaatttggtataaagaagttagattagctcattgttgaaaaatatattgaactgttttttttttaaaattgccctcttcaggagtttcatctgtcacaaacatatcatgatggtcttctcaagctgcaagctaaagactatgacaaggctcgggagctgctagaatctatccttaaagatcctattataaccaactccaaagtaaaatcatcttcttcacttactctgatgatttctttggatgatgaatgaccttcttattgacattatgtccaggtggagactattgcaaacgacaatnnnnnnnnnnnnnnnnnntcaagctccatcgttttaattcatctagttattggttacatgtctactaattgattttgtctagttcatatatttttagttcattagtgctgtggtctcgcctataaataatttctgtttgcagatttttggctctgaagaatcttgccactgtctttcttgagcttggttcaagtcactacgagaatgctctaaactgttatcttcaagctatagacttagatgcaaaagattctgtgctctggaaccatcttggaaccctatcatgttctatgggattactgagtatttcacgatgggcatttgaacagggacttctctgcagccccaataactgtacgcactgttctcctctttctctctctgtttttgggttcacattactcatatgtggtatggactattgcatttacccttccctccctcttgaaaattgaattggctaatgtgcagggaactgcatggagaaacttctagaagttctcattgccgtaggtgatgaagtttcctgtctttcagttgcaaatctgattttaaggcattggccatcacattctcgtgctttgcatgttaaacattgtattgaagacacagattcagctccttttgctccct

SEQ ID NO: 5527 - DNA, 2911 bp, Arabidopsis thaliana landsberg
gtgttggtggctgccggtgtggtgcctgttggtatggtgttggtggctgaaggtggtgtagaagaggccagaaaagctactaattctggatctttatctttcatgtacagaacaagcatctcgaagcatgagatccgcttatgagattatcgttggtcctcatcccgtcttgcattctcagtgtcgtgctcagctatcttgcggcgtagttgttcttaaagtttcaaagctgttgatgaagaagagcttgcataactttctttcattttccctttgctaagtgtctgcacaagtgatccaagaccaaaatggttgcccttttgatctttttcagtacactaaaacaaagagaaaccaatgcaaagtcaatcaacataacaggctaacaacaaagtattaaaattagataatcctatgatgcgatataaagtgaatgattcacatacaaattaagggtgtcatagaaactatacctggagaaagaggtccccatgagcccactgttcagaggaattcactgaattttctggaccatcatcatctatttctatcagtcgctcttcacatgtcttcttataaatctcaggtactttttcagcttttgcatcaacatatgacccgtcagctcgagtgtgtgttttcataaacacttccccaaatgctacagggcgcccatatagttcctcctacaatgaaattgaaacacattaaaatcatgtaactaatataagaaaatagtgaattgtttggatgactattagaggaatgttaccaattcttggtgaacttgcacaaatgatttctgaccggatacatgtttgtggggaccaagaccgccacgaccggagtttctacactgtgaagcactttcactcctcaccattgcctgactggtgttccaatgaacccacatctgattccaaagtttatcacgaatcaaaagaggttgtgaaccactcctcttagcttgactaacaatgcccttcatccgcttctgggctatcacttcgaaccccgctctaacagcctcagtaagcccatgatcccaatagaacatccgctacatagtacaaataaaagagataagttagcacatatacttagtaaatgagtaacaatatatatttgaaagataaaactgaaaattttaccaggaaactcctgaaatatctctctcggatgttcaaaggagtgaccttccaaatgaagtatggaccatcaaatttcctcctaaatactccaccaatcgccctagatagtttacctttatgcctgttaaacctgtaaaaaaacagagaagagaactaatctctgtaaagacaagaaaaagatgcatctctagcaaaaacagagaagagaactagtctctataaagacaagaaaaagatgcatctctagcaaaaacatagaagataactagtctctataaagacaagaattcatccatctctagcagtaactagtttacctttaatgctaactttttaaactctagaacacatgacaaatcacaagaactaaagtaactagagattgctctaaactctaacagtcgtaaaatgtttgtaagcgctaaatgtttttatgttttgttggggtcggatttcacccaagtacctgagccggtcaaatggataccatcagcacttcgggagctaggcttggtgttgttccggttcgggtgttactcaaggaaacacaccctaagccgggtgcgatgaaacattgtgacccaggggaacaccttagataaacgatacttggctcgggtgttattccagaaaacacacctgagccgagctcaactatatctcggggatcgcttcggttcgagcccaaggtagaatatccacccgaggaggatacttatacaaattcagtgaagggtcaagatatcatttccgaaaaatccggtgaaggatatcaaaaaatcttcgggatattatcgaatatggaagttttccgaaactcccaaagaataaggaagatttccatatagaaaatatcccctatcgccgacccggagataactggaaatcttccaaggaatatcgcgagaggcgggttaccaaggtcctatataaagcgcctcgaggaacgaacaaaggggacacgcataaagacgctctcaacttcaggctatcaaaacgctctgactttgaaggcaaaacacctattttttacttttctaaacacttgtacgatcgaatcatcatcttttcagtaataagatcaagagcaccgtccacggtaatcaaataattctgttgttctttgagagtctcacaaagatctgttctttgaagaaaccctaaatacaatttgactatgtgagtttcgactcgcacaattcggcgctagaaggaggggaaagagatttctcttactccaagaacacagaaccgatcgatcaagcaacgatgaccaacaaccagatccccgctaccaccgttgacatggagggaaaccctgttcctccaatccagacaaatgctcccgaagtcgccgctcccgcagtcctagcaggactgagaagcatgatggcacaactccagaagaaggggaacgaccaagagcaagcaaaccgattcttggcccaacagctcaaagcggctacttctcaaggacaggtcaggaccaatcgctttggcgcacgacactttcctgatcggcgagcagcggtagatctcaatccaacaagacttgtgttcaacacacccggtaacacaacgaggccatttcggcaaactcctccagggctcagcgaaacccgagcagaaccagtagcctcgggagagaatatgatggattaagggaaagaagccgacccgcgggatccaattccccgagccgaagttgacgaggttgaccagatcgaagtctccgatggcgaagattggaagaaagggtt

SEQ ID NO: 5528 - DNA, 1000 bp, Arabidopsis thaliana landsberg
  unsure (1)..(1000): unsure at all n locations
ctttcgaagtatacaaaatgactaaagactattttacttaactcacaaatagtacacaggagagctctaacagattgaaacgtgaacctcacctggaaagaaagtactttctttcatcacacactaaagtcttcaaaagctgttgaaagttctttacttgtttcaaaagcgaccaaggttcctaagaattgtttagctcagagacaaacttccaaaaaaaaagatattaacctgtagaaagcttttgttctagatcttgaactcgcaacaaacatcgcaacttccctcaacaaaacattgctttaggatccagaacaaatatggtcatggtctttgaacaatgttaccacataatctgttaaatcttctgcttttcaaacatggaagtgaatttcaacagaaacaaatctagctccactctatgaatattgaagcagttttctgagaatccggaaagggcctataaatcaaaagagaaataaaacacctcatgtaggagagtcttgaactttgaatagtatactagtctttttggatccttctaaggttacattagcaacatcaacgaccttggagttatgaaaaagcctagcaatgtctcttacatcatctccaccacattcatcaaccgcaaccacacaaaatccgccacgtctcaccgtcctctccatctcctccacgaactgccacggaaacagagcttcagctagatgtgcagtgaaggcaaaatcaaagacaccgtcgaaaaacggaaggttatgaggatcagctcttttcacaagaggaatcgaatcaaccaattcaactgcngtaacgtcagaaaatccgatctgagaaagagccattagagcatggcctgctccggcggagagacagaaagctttggtgtgattttgaatgaatccgagatcgcgaaatcggaggaagtaggtagagaaggagtatagacgcgatttccaagctccagaggaccagattcgagcgttcttttttgggagag

SEQ ID NO: 5529 - DNA, 6202 bp, Arabidopsis thaliana landsberg
aactcctctatgctttttctcactgggggggagccaatcccaggaaatgatattttgtcttcattctcctactctgaacacccaagcctgttttgctaagccttcgcatttaatttccaaacttgatcaatgtggtagtcaaaatgttcagctgataatccacgaggttgagattcttcttctcgggtctcaaccttatcttctctagcatggctttgtaaccaaacttgtacacattgaactctactttgattttgcttgtcaaaccagcctggatcacgaggtcgtttacccaaaattatctctagtagagctttaaccctctttacaagcgttgcatcaattcccttggcacaaagttttaaaaacttcctaaaacacaccattatcctcagtttaagctcaaaagtaactaatgggatcttttcccttagttcaatggtacttgaccacgcttgcaacactgaatcataggaaacaaaccacattttctcctttctatactcgcagctaagccactttttaattgctgacagcgaataataacatactttactcaatacttgtaggttatcactaattgccttctttggaatgaagctagatcttgctggaattactaggcagtaattcttgtgtaacaacctttgtataacaaacctgtccaattgagcttgttcagatttatttccaccaagcttccaaacgtgattagcaagtcctgagcgaaaaggtagcttcagcctattaactttctttttagacccaagacaaaactctttcacatcttgttttatgacccactctaaactcctccactgagtattttgcagtaaactcaacactctatcccgtccgtaatactttcttacacaatcccgctgaacactgtgaaccagtaatctaccatgctcccaaatttgattggccatagaaagctcataaagcggttttcctgtcatagtctgaatgtttactcttctacgcccatgaagtttcttaaactgtgacaacatctcctctttattctctagaccatgatatgtgagccgcaaattatgtgttctataatcacacagaacctgtctaacctccaaacgaccacgctcccatacacgactagctcttccaagatcaattggttctttaatgacgttacaaactccaagactaacatcatcaacaattctatcacggccatagaaaaccactaaccagtctagttgaacttgttcagctgtgcttccacctggttcccacactcggttaacgagagaaaattcagaaaattgtcttttagtctcgaacatgctatcaccgttacacaatcttgtaatttgtttcttttggtgccaggaatctttattgcaccttgtgaatccttctcagcttcagaaatgttcagcttcatactaatttgcatatttgttctcattatctcccgatcaatcgtccttgtaatgtgatttggatgcgtatagctttcacgtatgtgcacacgttccatttcgttcccatgatcctgtgcaggttccattatcatgagatcatcatgactacaaggatttaatggatcctgttgtcgaaaaccagaaccaaaattcccatcaaacacaaacaataagctgatgtgttccttcacactagcattttggtccaatccatccacccttttctgccctctatgaatgcttgtcctcaccaacaatcttttcacttggaggtgcgctctctctgccttcatattcactaaacgatcagcaccacttgagccattaaacattccatcgctctttagagcttgcaaaagatcaccttgtgatttctttttacgagccttgtggtagctatgcttgaatcgaaatatgtgaactccttggtgtcgattctcctttggatttgcaagtgacttacccaaattgccataagaagcttcgtggggttgagaatccaccaactgctcgacgaaagtacccaaaggttcaggaaattctttacttctgggaacgcacgccacatgttcgacgaaattcccaagagagctttcaggcttttcctgggtttgctgaagctcaactgcttctctttcctgtttcataatcacttttatctcacggatgttggattgcatcacatccagtcggtcgcgtatatgaagcagaagattgaagtcctcttgagttaacaaaaacattttcaatagtcgagaagatcgactctctcaatgaaagcaccaatgataagctctggacttatctcttaaagtaaacaacgtaaaaacataagaaaaacagagtaaataaagtaatgcgccgattgtcgacggagagtatgagatgagaagagaaattgatattgatattgttgttgattgttttgataaccattacagagaaagacagagactaaataccaaagcgtaagagacgatggcacaactgtaaatatgttgacctatagataaatatgggcttaaaggattatcatgggcttcgatcttcatcttcaactcccaggcccagttctcaagtatccgggtcataacacaatccttttcgcaaaacagaatcagtcacggaaaatcgaagaaacaaggaagaacgaacaaaaatgggctttttcagagaaggctcggattttgattagcaaattctatatattgggcctgagaaacggcccattttgttactactaatacgcgcgtaaatgtaatcaaatcaaagataacgaaaccaacgagaaaatgccaatattttactttagaacgactctttcatgaatcactttgacaacaacaacaacaacaactaattcttagatatttctttgcaaaagtcattaattaaacagttttaaaatattcacttgcaaaagccattgatttttttaattacaacctcacaagacaagacaaaaacccaccaatattttaaaccttaaatgaacgtaattaacctcctaatgggctacaaatgcttattaaactcttgtcgtttttattacattctttgaccgtatggtcttctagttcttcctcatcgctgccgcattgcttgcaaaccaccttgcacttaaccacactcccatagacataaaacccgggctgaaccatagctctaaccagactcttaaaccgttccccaccggtttcctccatgtaaatcggatcaaaccggtcatctttctccacacgaaagatttgcaaccccgggttcactgaattagccaaaagatgaaccaaccaaacactctttgacgcaccaaagaaagcctgccataaaaaccggttcaatccaagtagttttgaaataaaccattattaaccgtttggttggtttaacatttgcttacctgtaaaagcggttcaggccaggcacggttccagctaagcatcgaaacgacgtcactcatcttccggtcacagaaacggctaaactcctccgagaaatgcttcgttcctctgctcaacacctcatcccacgtcagctccatcaagacgttaaacgaagcgtaattggattcacaacgatcaattggattcaaaatccgggtcgacccgtttttctgaaacccaggagcttcgaaatcctcgaagaaggctctgctcagaatcgcttcgaggtaaaagatcagacttttagggtttttggcaaaagagttgatctttacatcgaaaggttgaagaagaagagagagtctctcgtaaactttgccaccgacggttcgtagctgcgaggcgagagatctacttaaagctctgatcgaagaacgagattccgacacagagacgagaaactgctgaatgatcctgtcgttgaatccgtcttttcgaatcggaacactctgttttttgttgctgcattcgtcgagacctgatttgagattgtgacagtaaatctcgagtttattgagtttcttctctagctctgccatggatgatttcaacctagaagcttctataaccgcgtcttctttcttcttcgtggcttgaatcagtttatgagaaagctccgccacagctaaccgccactgttcttctctagaagcatctgcggcggaggatgaggaagagcgcggtggaagcgccgccgttgcagaggaaggtttggggcttctccgtgtgagagattggaagatggatttgattatgagattggggctagagatgaaagaagggttgttgtggctttcgagaggtacgacggagaatttgtcacggtgagagtggtgaggtcgacacttgttgcaggatacggcaccaccatcgtcttcgtcgttgtcgtcatgtcgttttctggtttggggtttgccgttgtggtggagaggtgttagagtgtgctggtggttgttgttgctgttggtacagcggtggtgctggtggtttggtgtggcggaagaaccaccgtcgctgcttggtgttgctctgtttctgtatctttcttcttggaggtcgtcttcttcacattccagaatctgagaacacagagagagaaatgaaaattatgctaaattgagagaaaaacaatacctttggatttggaagaatcttcaagtgacatgaatatgagattctaatggaatcattgagatcaaaggagaaaactttagaggaaaaggtaacagaacatgctccttttgccactgttccttcatttttaagcaaaaacaagaagatttcgagctataacctatcaattccactatttttgaaagacagaaagaaaagtttttgattttgtgacagagcaaagacaaaacaaaaactaaattgaggtatgtgctgtcttcttccacggggaacaaagaagagggattagagttttgacttacaggagtgaagtgaagggattggtgaagagatggaacaggagatttggaaggagaagatgaagacgaaggagccatttttttttgttcttccttctttgctctctttttttctggtttgctttaatatttaactttaattttatgtatacacatatatcatatgataatataaattattatcaagtcaatttgtaaaaaagaaaaaaaaaaaaaaaaaaagagaagaggtactagaatagtgatgattatttttattttggttttatgccggtaaactttggtcaaatattaaaatttgtttccatcttagttcaagatcaaaaccaaaatgaagactatgctcttatagacatgttttgttgtcgttgctctaatagacactatcgtttcaatattatatataccatacaaaaaatatttctatttcttttgtttatacatttgaatcacatattatctgtttccaacaaaaatcacctattattcaacagtatattcatttgaaaacaatagtatatgtttcgtataagcttgacatagaaaatttatctgtgtaaaacttgcatgtgttagaaaaccgtcaaaactttatattagcactacacttgacacatggtttcgataaaaaaaaaaaaaaaaaacttcaaagaatccaacttttattgccgagacaaattagttacaaatcaatatataaataaccagttagttacttcaaataaaaagatagacttcatttaaaatggaagaaaaaatacttgaatttgaaatttcatatatgttaatttatagattggaataattatattcaagacattcgatttttgattaattattagaagataaaaaacagataaatttcatagtaactatagtttgatcattcagcattttttgttttgtttcattggcgtaatttcttttcattcatttcatttttttcgaaattattgtacttgttagctctgcctttttcccagcactaattctagtgtcacttttcatgtttttttggccaatactttcaattttgttactcaaatatcttgatttacgtgttcgtgtgtgtatgactacggcaatgattataatttccttcgatatagatgttaaagagatgttttatcgagtttctctttttctgttttctcaccatcacttttgttcatctcgtcagcttgtgatcatttcttctgaaacaatcagacaagtttgctaaaagctatacatattttacatgttagatagacccacaaattttgtatgtaaattatatgagctcttagagagaattatgtaataaaacaatcataaactatacgtatagactttttttttttaaccctcgataagttttttttacgcaatcaaa

SEQ ID NO: 5530 - DNA, 2135 bp, Arabidopsis thaliana landsberg
caagagaaacattgataaccgaaacttaacctacaaatctggtatcgagctttttaaaggacacttaaaaagaaagaaaaagaaaaacttgtgacaccataattttctagattcaactcagccgttggtaaagctagaaaagtagaaaagagacagagatttaggtaaagattcatatgagccatgttacatatctgcaataattaattgtttgaagataaataacataaacatgaaagaccctcatcatatatataggccaagatagctagctactcgtctgcagcagcagaagagtggagtgggaagcttgcccaaacgtcttgccacgtcatcttctcttcagccatggaggtcacgacggaagctgcctctttcaagctgactcggacttggtctttgctatctctttctctgattgtcactgatgtctctgagtccactgttatcgcaaatggcacaccaatctcatcagatctcgcgtatctctttcctatcgatgtacctgttcacatacacatacacaatttcttactcggtttggaccattttaaaattataaagttaagtttcaatatgtttaacgtaccagtgatgtcaacatcctgtttgatgccattagatttaagttccttggaaatgaatttggttgcttcctcgaactgttggtttttaacaagcgggaaaatcttgcacttgataggtgctacaagaggagagaaacggaacaagttcaactgctcatcccctgccttgcttggccttgtgctgaaacaatgctcatacagacaatatatgatccgaccaatcccaaacgatggttcaatcactgatggagtgaaaacccgctggtgctctttcttcttctcctttgatatagacaccatgtttttcttgatgttcacgcttttctttagggtacacacgtaaaactccacttcccctttggattccagggttgctttcatctccatagcttcttcctcattcatcgcctaacaaaacattacacgaagcatgatatttattctaaaccatcaccatattattaaaaaaaaaagttattcagtaaaacagttaagagttcaacctccaaagattcaaccacattcttttgatttcccttgaatgcaagacccagttctttcttcacaggagttatcacaagtttctgatataaaagataaccatgttaaggacaagtaataaagacagagatgaatgaatctgttcactaaaatacctctacttctttaggttctgcaaatttctcttcagccacaagaggagtaccacttttgtcctgtcgcgcaacagttgatcaacaatatactttagtgaatttaaacaggaacacttacgggttttgatcattaattatctagctgtaaaacgaaatgatgaaaatagaagtaaaaggtgaggttcttacagagtgagcacgtaagtcgtaagcagacctatctgcaatcccaacacattcaatccacccatatgaactttcaatttcagcatcccaacaatctgctgcatagtgggccatttcatttgctagatgctgacggaagcgcagccgttccttgtcaatgccaagacgagtaaggaaaagatacactctcccaatgaagtatcctagagtttcattgttcacagtaccctatacgaataggatttcagtgtcaggcatcaataagatataaaaatgggtgtgtgcgagttcttagtagaattaagtaggcgaatatgattacaaatactaactttagcaacagcttcaccaaggcaaagttttttggcagattggccagacatttgttcttcccttgggaacataaggaattccaattttgctacgtcagagaacttaggatgtgacttattctcaggatcaacgaagtgctcaatctctgccagcgtgaattcacgaactctaagaagcccttgtcgaggagatatctgcgagtaatatgctacttattaaaacccagacataatgcagaaaagaatttcttaaagaagattgagatgaagacatcccatacatcaagcaaagtaatacattacctcatttctaaaggcttgaccaatttgagccgcggcaaaaagacagttcttcccattgtaatagtacaagt

SEQ ID NO: 5531 - DNA, 447 bp, Arabidopsis thaliana landsberg
gttcttgggattgacctgagtagtacattgaagcaatttgacatgttcatggagtattgaagagattgtgttaggctgttttgttctttatatgggattaatttgcttttttatttgcagcatctcattcttgaggagaatgtgctagaagttgacaccagaggttgttctcaagctagactgatcttatggcatttttgtgaacttttaagtacttttattactacaatgggaggaaacttccatttgctgctgctcaaattggtcaagccgttaggaatgaggtgattgtcctttaattttccgttgctttgtttatcttagtcttctttaagggacttttttcatattatgtctggggtttaataagtagcatattacttgcagatatctcctcgcaagggcttcttatagttcgtgaattcacacgctagcaaaaatggaatt

SEQ ID NO: 5532 - DNA, 4105 bp, Arabidopsis thaliana landsberg
caagccatttttttcgaattccacatttccacttgacattttaccaatttaggcccccaaaaatggcacaccatttcgatatctatatttttgtttacgaaacattttagcccatatactttacgggcccattagtgtctaaagattcatacgccacctgaacaatattttcccaccaccattacacaaacatgtcgaaaatattcttaacataaaaatcaccacattacattatgtttactgcccaaataataacccacataaaatattacacacaaaacaatctatctcacacaaaataataataaaacaaacactcgctaaatatgcccccctcagtgaatttgatcaaataccccaaaaataaaattaataacatgtgtggcgtataaaacacgaaaaaataaaattacaaaagaaagaaaataacatatctacagtaaagttacaagtatacagatgttagatcatcgtgtttttccaaatcctcgaatccttccgtcttgttactgtatagttaccctgcaacgtaataattaataatctcatataaaagtttagaaattttggatgtaattaacatcaaaaaccaaaatcctaattactgataatttttgtaccatttgagtgtattgagaatgcatttaggtgaatcagtatcaagcttgttcaagctaacgccaccgcatctcaaattaacggcgagcattccgatcttaataccgccgacacctaatccaactttagtcttggcaacaacgttaatgaccaaatctttgctctgaaatttcgcagcgagtctcttagccaatcctctctccacgagctgattcttcaccgtcgtctccactttcacgctcgtcgagtttttgggaccttgtcggaatccattcatcgtcgtctctcccatcccggtctcatcgtttcccgaaccaacgctcaaatcaacggcagtgtttccgtagtaaaaaacgagtttcgagttcggattcttcatctcaacgcgggcaacggcggtggcggagagagacgcgccgtcgggatcgtcggcgagtttgaagccgtcgagacggaaggaagcgaggctgaaagtgggaagcttaggatcgaaccagaggtagaaaacagctgttccgaccaagaggaggaagatgaagagaacaagagtaatgcagatgcaacagcaacagaaacgacaacagcttctacgttttttctttggtcggtaagaagtaggcatagggacggcttttctcataggttgttgttgaatgggaggtggaggaggaggaggagaggacatgtttggatctctgtaacctgggggcttttgaagaaccgggttcatctgataatctgccatcttttttctcttaattattcacctctctgacgatctcctgataaatcgtatcaaggaagatcaaaacgaaatcttcaaaatggagagagagatgctatgatgatgatgattgcaggcaaacttggtttctaagagattttgagtttttggaagagagagagagagaagagaatgtttttttgtgttgcgttgtctcttctctctcgttaatgaaagaaggctgagacgtgaggaagggatttcgttttaggcccgagactcacgcgcgccgtttttgttgctgacgtgttccctcttttttctcttcttcctacattcattgaaatattcaaatttcagttattagattagtcgattaatttataactgataatcatattgagtttgatacgtccaaagtggcatgggcctacagattagatgtttaggccaggtggactctgtttcgagcccattactgccacgtggctctattcggagttatttaccaatggtacgctcaccggtttaacgattcaccacttaaagccctcaaaatctcagagaacgctcgctgatcaaatccgtcgtccttcaaccgtcgcctcctccgtcatgacaatcgagtgcgttaatcccgaaggtcttcgattcaaccaagtatgtgcacatatctcttcctccgtttggtcatgtacttgtttccgattaatgtattatcttttgttctttctgttgaattgatttcgtatctgtttgcaagatgaaaagctcctctcatcaaaccctaaaacgaggatgaggccgattttgatgaagggacatgaacgtccattgacgttcctgaggtacaacagaaatggtgatctgcttttctcctgcgccaaagaccacactcccacagtctggtttgccgataacggcgagcgtcttggcacttaccgtggccacagtggtgctgtttggtgctgtgatatctccagtaagtggtctcagcctctcaaattcaaatagtatatagtggatggaatggattcagtttaggatttaagtcgttgtctttgttgttttagtctttcatagcttaacgattagtgttttgtttgtgatttcttaggagactcgtctagattgatcactggtagtgctgatcagactgcaaagctgtgggatgtgaaatctggcaaagaattgttcactttcaagtttggtgcccctgcaaggtctgtggatttctctgttggtgatcatcttgcagtgattaccactgatcacttcgtgggaacttcctctgctattcatgtcaaacgcattgcagaagatcccgaagaccgtaagttgtcaattctaagttaaaatctacttatgttttttagcctatgtcttttttgtatgggtaaaaggaattgatttaatgtaattgatgtagaggttggtgattctgtgcttgtccttcaaagtcctgatggaaagaagaagatcaatagagctgtttggggtcccctgaaccaaaccattgttagtggtggtgaagatgctgctatcagaatctgggatgcagaggtatttcaactttcttaaggcctttcttttgtctatcaatatctctcttttttttttattagcttaaaccttatgtggtgctactgccattgttactagactggaaaattgcttaagcaatcagatgaggaagtgggtcacaaggaggccattacatccctctgcaaagcagctgatgactctcacttccttacaggttcacatgacaaaactgcaaaggcatgtgcttctttcttttacttgtttcaaaaatatgctctatacatattacatatagagataaatcatctaatagagtgttctttttgttgattctttcagctttgggacatgagaacgctgactcttattaagacttacaccactgtggtgcctgtaaatgctgtcgccatgtctccacttctcaaccatgtatgcactaatgcttcttgaaattcaaattcggttcccaaaagcaacaagtcttgatgttatctttgtgaatgtttctgctctcgctcttttaggttgtgcttggaggtggtcaagatgcatcagctgtgactaccactgatcatcgtgctgggaagtttgaagctaagttttacgacacggttagtgtttataataagagtgttttacttggaaacatgtaacctggaaaatacacatatttaaataaccgtgtatcattgtgtttggtataatatatagattctgcaagaggaaattggtggtgtgaaaggtcattttggacctataaatgcttcggcattcaatcctgatgggaagaggtaaattaacaacatttggattttgattgattgacacaatcctcacatgatgaggttttgagtgtgtgttttggctctctcactgagtttgaggaatgtatatttcagtttctctagtggaggtgaagacggttacgtgaggctgcatcattttgactccgactacttcaacatcaagatttagattccgactacttgaacatcaaccttttagaatctttgaaaaagtctcccattccggattttgctttctctctcttttaacattttcatgtttttatttactaccaatacaaataccttgatgataaagcttttgaaatttgacagaatctttagttttcatttccagagttctcagtacaagttaattaacctgctctatgtgtgagcgagcattaatattcagcttttataaaataaactc

SEQ ID NO: 5533 - DNA, 8219 bp, Arabidopsis thaliana landsberg
acgagagaccaccaatatagatgctttttaggatgttgttaagcccaataattcttttaagaattaaaatataatctggtgggctttaggtctggacagcctaactaaaataaaatattagattccgattcccagaaaataattcgtaatcaattgaccaaaccgatcgatcactgttgtcatagaagtcatcgccatcttggtttcgtgatcgaaaaagactcgtgaaaaaatggatcatatgatatcagaaaacggagaaacaagtgccgaaggatcgatttgcggctatgattcgctgcatcaactcttatcagcgaatcttaagcccgagctctatcaggtgacgtatccactccctccaaactaaattactcttctagtgtgtttgatctcgcttttgattagcctgtctaattcgaatgatgatattatggatcttttgttctagtggtttcaagtgtttattttagttatgttgatcagctttaaaaaatatggattgttgatgattggatttgcaggaggtaaaccggttgctccttggacgtaactgtgggagatcgcttgaacagattgttctgccggagtctgctaaagccttgtcttcaaaacatgattttgatctccaggtttatactccgttagttataggatcagatcattgaacttaatagattgagacaatgttttgatttgatttgatctttgtataaatattgtctaggctgctagcttttcagctgataaagagcaaatgagaaatcctcgagtggtcagagttggtctcattcaaaactccattgctcttccaaccactgctccattctcggaccaaacaagaggaatattcgacaagttgaagccgataatcgatgctgcgggtgttgctggtgttaacatactgtgcttgcaggttttgcctccatttgctttcttttattgaaaagttgttacttcaattgtttttgaccttttctttgggggggaatgaatggttttatcgataggaagcttggaccatgccatttgcattttgcactagggagaggagatggtgtgagtttgcagagcctgttgatggcgaatcgacaaagtttcttcaagaactcgctaaaaagtataacatggtgattgttagtcctattctcgaaagagatattgatcacggtgaagtgctttggaataccgctgtgattatagggaataatggaaatatcattggcaagcatcgaaaggtatatttgtgctaacacgtcttttgttgctctgtcttttctcttgtcagctaatttctattacttgcttggtggcagaaccatatacctagggtaggagatttcaacgagagcacctattacatggaaggagacacaggccatcctgtgtttgagacggtgtttgggaaaattgcggttaatatatgttatggcagacaccatcctctgaattggttagcttttggtctaaatggtgcagagattgtcttcaacccttcagcaactgttggtgaactcagtgaaccaatgtggcctattgaggtttaacttctgattctccactttactcaatttgaagctttctttctatagtaacactgtctaacaatgcaatatgttccttaaaacttgcaggcacgaaatgccgcaatagcaaacagttactttgttggatccattaaccgagttggaaccgaagtattccccaatccttttacgtcaggtgatggaaaaccgcaacacaatgatttcgggcatttctatgggtcaagccatttttctgcaccagatgcttcttgcacaccgtctttgtcccgttacaaagatggtttattgatctcggacatggatctcaatctctgccggcaatacaaggacaagtggggatttagaatgactgcaagatacgaagtctatgccgatcttttggcaaagtacataaagccagacttcaagcctcaagtcgtctctgacccattgctccacaagaattctacataagaagaaaatttcactctgtgaatcttcaaagaagaaaagtccaataatcaatgttcaatcatttgtgtaaatgtaacggtaactgaaaatctgtttgtagctgaatatatgttgatgccaaaaggcagctcctttgcttttataatcgaaccggtttataattgaaccggaatccaattccaaaaataaccgtaatcagatactatgaactgtggggttttctactcctcgtcatcttctattcgttatccgttttgaagcgtactcggatgggattgagtttcgcagatgctttaaattctagaaaataatgcaatctcttaccttaactcggtacccaactccaatttccccgccaagactcaatctttacccgctaagacaaatcgcagcttctgttctctctgctccgaccgccggtattaaccgtcgcgatatggcgtctcgccatcagtcaacttcctttaagccccttgccgttggtcggaatttgaccggagatgatgatgatggttactgtactcttatagactttgcaggtaacaaactgctctgtctgaacgaacttagcactgtctcgataattcaagttaatgtgttgtctgtcatccattgtcaatctatgtccgaaaatccgtaactttagtggaaataccctgaatttagcatctaaaatgtgcttaattgagtaagacaaatcttggaaactctcttagacgaacaatggttgggttttgacttttgacggttcctctgtataagcagtttgattgaagtcttaaatttattattattttaagttgttctattaaattttctgataggtagtggaggaggagaagggaaaaatgtaggagaggatcttgtggtgttgctttaccacttacaacatgcttgcaaaagaatcgcttctcttgtcgcctctcctttcaattcttcactcggaaagctctctgttaactcctctagtgggtcagaccgagatgcgcctaagccgctcgatattgtctcggtctgtatcttattactctcttttttatcatgattcatatcaagattcaatcttacaattcatgtttccgttttgcagaacgatatcgtcttgtcctctcttagaaactcagggaaagtagcagtaatggcttctgaagaaaacgatagtccaacttggatcaaagatgatggtccttacgttgtggttgtagatcctctagatggatcacggaacatcgatgcttcgattcccacgggaactatatttggaatttacaatcgtctcgttgagcttgatcatttacctgttgaagagaaagctgagctcaattctttgcagagaggcagcaggcttgtagcttccggttatgtgctatactcttcagccactatcttctgtgttacacttggctcgggaacacacgccttcacgctagaccattccacaggagaatttgttcttacccatcaaaacatcaagatcccaactcggggtaaaaagcgtttaatgacacatatgacttgatccattgcgacattcctattcatggctctgaacaacctgcattaatcgttgttttttgtatgatcaacaataggacaaatctactcagtgaacgatgcgaggtactttgattggccagaaggtttaaggaagtacattgacacagtgagacaaggcaaaggtcaaaacccgaaaaaatactctgcccgttatatttgttctctagtagctgatcttcacaggactctcttatacggtggagtggctatgaatccaagagaccatcttcgtttagtctatgaaggtaaccctttggcttttctcgtggagcaagctggtggcaaatcctctgatggaaaaagagggatactttcgatacaacccgtgaagcttcaccaaagattgcctctgtttcttgggagcttagaggatgttgctgagctagagagctatggagatgtgcagcagactgtgaaccctggctatgaagtttaaacaactcctctgtttcatattatctgtaaaaacaataaatgaatcgatgttagatttggttgcttgtaacattatgtattaggaaagttagatccgtgtatgtatctgtttatcaagattcaagatcgactggtataatcacaattcacaagtttattatgtttctttatcagaagcaatctttcttcgatttctaacacagtcccactcccataaattggttgttagatttcggttaagtttagtaagaatttttaaaatcggtacggtatggtttgccgttaaataataaatatataatgcggatatttggcgcaagttagcaacttagcgttaaagaccaccaaagacttctctcaagtcctctgcgccggaaaccgccgtgacgagattggagagggagagagaggagagataatggagcgaaatagcgttaaatttcatgcagagaagagatccggagcgtttgatccaggttcaggattcggatcttccaagagggtcaaaacgcatcacacgcagctgctctcagctctggttgtgccggtgggacacgcggcgtttagattgctctgccctttatcacacgtcggtgcggtgattggaaaatctggaaacgtaatcaaacagctccaacaatcaaccggagctaagatacgggtcgaggagcctccgtctgggtctccggatcgggtcatcacgataatcgcacaagcagattcgaaatcaagggtgaaattgggtgctaataacaatggcaatgcagaaggagagaaaaaggaggaggaagttgaggtatctaaagcacaaggagcgttgattaaggtattcgagcttttagcggcggaagctgatagtgatacggtcgtgtgccgattgttgacggagtctagccatgccggtgctgtgataggcaaaggtggtcaaatggttgggagtattaggaaagaaactggctgcaaaatttctatacggattgagaatttgccgatttgcgctgatactgatgatgagatggtggaggtacgaattctaattgatactaaatttagaaactatgaatttctctttggagaaaatgttttgagctgaaacgttggtttagcactctatagatgcttgtttttttgcagattgtaatgtattggttttcatattgaactatggcaggttgaaggaaatgctatcgctgtaaagaaagctcttgtgtctatctcccgctgcttgcaaaattgtcaatcgattgacaaggtaaggatggttggaaacagacctctcgaaaaagagttccaagcatctttgcataggcctatagagacaataattcaggagtctcttcctaggtccgttgaagttaacccttacgattataggctgagaaacgacgagatatttccccggggcactgtagctcgggctaatgatgtgattcctcatgatactttgcatcttaggcgtatcgaggcggttccccagggtgctttacgcatgtatattgaggcagaccggcaagatgttttacgcaggcatgttgaggcggaccggcaagatgctttacgcaggcatgttgaggcggaccggcaagatgctttacgcaggcgtattgatgtggttcctcgagaaacgttatacatgccttctgatgttctcaggggagattgttttctacagcatagagagagggatgattctcatgattccttgcatagacctttcgaaatggttccacgtgatgctatgggcatgccttttgagtcgtttccacgtgatgcttacggaaggcctattgaaacaatgacacaagaaactcttcgtgggcaaagtgcagattatcttgcacatcgttattcgactttagacacacatcctcacagcttcactacgtctgcttcaatggctaacactgccaccatgaagccacctccatcagaagtggaagtagggaaccaagatgtggtttttaagatactttgttccactgagaatgctggcggagttatcgggactggaggtaaagttgtcaggatgcttcatagcgaaacaggtgccttcataaatgtgggaaatgcacttgatgattgtgaagaacgtctgattgcagtaactgcatcagaggttggtgttttctatttcttcccattttcatggatgcttatgcagtactgttccatctatttactatccttggttgataattgttgcttgttcatcatgtagaaccctgaatgtcaaagctcgccagcccagaaagcgattatgcttattttttcaagattatttgagcttgccactaacaaaatcctagataatggcccaaggtcatctatcactgcacggcttgttgtcccaacaagtcagattggttgtgtgctgggaaaaggaggtgttattgtttcggaaatgcggaaaaccactggggctgcaattcaaattttgaaggttgagcagaacccaaaatgtatttcagagaatgatcaagttgtgcaggtacttagatcatttgttgaccttatggttatggtacatattccacgtgacaatctctcatctgatttgtgagcataatttggaattagcatgctaaatgttagtggtttgcttttcattaccgaatcctgtgttggtctctattcaccttgcacacttgtcaaaagttggtggtgttttagttattgctacattctgaaagaaattgaaagattcatgcaaacagagagttaaaaagatcatttactgtaaacttggttgagagattaactcggtcatattgtaagctccattgttccttaagttgtctggcataaactaattctttactggccaatagattacaggagagttccctaatgtgagagaagccattttccatattacaagcaggctgcgagacagtgttttctccaactcaatgaaaaattccttagccaagagcagctccgccttaactactgagagattctacgacagacaatcagacaatcctctgtctattgggtctcatcaatccgttagtaatccagctaccaactcctcaagtctgcacagaagatctgaggattcctttttaagtgggtctcattcatcagttaactattccagatcagttggcacagatccttacataagaccagaagacccatttcctgataggtttaatccctcagcaggctattctcataattttggtcggcggtttaccatggaccacagtgataactcccatcacttaactgaggccccatctcgtttgtgggcgtccccggtatgtctccatctctctgtattctcccatcctcccctttctgctgtacataagtacttgttgatactcccattcttcctctacacattcagattttgaacatttgtgcttctatctaacttctgtagctgatagacatagtttttatgtagcctccagcagctccaagaggcttatctgatgccagtggcggattatcttctgcaagggctggccatgtacttggcaggtaaaagcactacaattatagacagttatgtgagataattactctgatctttgtgtagtttacatgctcgcttggtcttttctagtggacacaaatctgccatcgttacaaacactaccgtggaaattagagttccagctaatgctatgagctttgtgtatggagagcagggttacaatctggaacaactgagacaggtaagccatttttttgtttacaaatcttttattggttttccccatagcgtcatccaaaagaggttaggccatgattaattgctccacaagagcagccataggttttggtttccattggctgctcttatacgtaagtgaactctagggttactaaaaacggaagtgaactctagggttactaaaaagaaagcatgagaaaataaaattcatatacgtaaagtcttatacatggtgcaaacaatcgtgctaccattaatctaagtcaataggagtctaggactattctcaacgatgtataactttactcaaaaaaaactgttttaagtcacgaaaactccatcttcgttgaagtactcaacgtttgttccattattcagtgttacagtcgttgtttaaaaacagaattttcatctagccccatacagtctgaaataatcatctacagaccagataattagtgtcataaagatgaagtagcaccccgttggttgacttaaacggcttaagcatagcttataccatttgatgcttgttactc

SEQ ID NO: 5534 - DNA, 1892 bp, Arabidopsis thaliana landsberg
  unsure (1)..(1892): unsure at all n locations
gccgaccaggtaagctcttttcccataacaaaatgttctttcatttatcatagaattagcaaaatccagctttcaaagcatgatctacatgtatcatcttgtgatgtaaatctgttgcgcaaaacaggagggagcatcgaagaacgacatagatcaaatgccgaaattcagatttacaaaaactggcaatgttgaaaagctctcaggcaaagcacggggaataatgacggaatgtggaacagattcacctattgaacgctcgctttctccagaagacgcggtacaatcccatttccacattcttatcaagttgtacattttgaaagtgtgtaaaattgataacgcatggcttcttatgattctgcaggaatgctgcatctgtctctgtgaatatgaagatggagttgaacttagagaactcccttgtaaccatcactttcattgcacttgcatcgataaatggcttcatataaactcacgttgcccgctctgcaagtttaacatcttgaagaacgcaaacaacgaagtctagtaaaatcttgttctggttctaggatcaatccgaacgaaccatcccagaccagaacgtttcagatatatgtaaactctggttcgtgttttagtgttgtgtagttagaaaatctagtccatatctctttctcctgatcttctattacaatgcgtcaatgcgcctattgatagtatgtaggaataaatcgttggattagtcctactttattttttaattttcttggtgtggaacgtggaaacaactgagctttgtgtttctcgtttattaattacaaaatcaaaaagatatttgaaaatcgtaaaccggcgtggtcaatggtcagaaacaatcggcgcggtcaccgatcacaaagaaaatggtcacagtataaaacaaaacgttcttttaacgacatcgttaacaagaaattaaaaggacttaccaagaaattcaaaacgacatcgttaacaggaaattaattgttccgtcgttacgaatgattcaaaaacatttaaggacttaccaaaaagaaaagaaaagtcagattcatgtcagaatatgaaaaggatctttgtaaggttattttggtcttttgctgatcagtcctcgtgctttttccgcgcttccccctaaacccaaagctctctcaccttcttccatggagaggggacaacaaagtacacgctgaaaaagcctctctgcagctccattcttcttcctggatttcaaattatacgctctaggtcagaggcgattttttcgtttcctgattctaacgggagtcaaagatggattctctgttgcagcgttaccggaacgatcgccgcaagctcatggagtttcttatgtcttcgggtttggtaaaagagcttcgttccccttctggttcccctacttctctttctccggctgatttggatgctctcagtgccgattatgttttagattgcgtgaaatccggtgagtttacgctgagaaaataatccatccttcgttagtatctatctctgagtttgcacaagtgtttaatggttttctcagcttttcccacactagtttataaatttgtgaattgttttcgtctgatttctaaattttgttgacgattaaggtttctacacagttagggtaatggaaaaattggctctctgcttcgttgttttgatttgcaaatctatcagaaattgctgaaacactccattttgtgaacacgaatgcaggtggtgtagttgatgtatccaagggcagagagaaatacaattttgattcatcataccctgtaacagtaaggaaacgtttctataatgatccgtgtttgttggtttccttatacgtntaattgagcttagaaaatttgcattttaaatggcatctgcgtata

SEQ ID NO: 5535 - DNA, 3293 bp, Arabidopsis thaliana landsberg
gctattggagttcacgcgtaacgccacgctcgatctgaggcgtgtaccgggtattttcaatgaccggtcatgtcgtttgacaccatgttttccttttgaattatttgcactagtaacttctttgcccctgttctcacattagaagctccgtttagtatatgattatagtaatcatcatatgtcatacatacgataactcatcataaggttttcacaacgttgatgatcaattagattccacaattcaatattttggaatatccattctctaacaggattagatagtttttactaacgtatagattacatctctataaattaaagaacgtatatatattgatccttctcacacacgcatgtcttcgactcctctcatacggtactaaccagcagagtcgcgtgcaattcacgcacttagttgagagtggtccttatagcatctttccccatttaaatagaaacccctgagttaaagactcttttagtcaacgcctctctcgcgttcttacaacaaatctatgcgaaccaaaaatcatttacttgtttttgacgtcacacttttcatctactagtatttattttctgtttgacaccaatttttcttctcgcagatttaaatcagacaaaacccgaataatatctcttacagtttcttttcttttattcctttctctggtaattaataacaattggttagaaaaatcattttctctttgcacataagtcaactctctctctctctctcttttacttcttcttctctttgccctctctttggattttcttccattgatgaacaatcaatctcagctttgagtgctcccaaatcctctattgactttgcgaatctaagaaaaaactgaaaattaataacgtccttgatgggtagcggagtaacaaaactgagtatatgtttcacaggcggtggaggagaacgtctccggccaaaagacatctccgttcttcttccggatcctttagacgaaggtttaggtcactccttctgctacgtccgaccagacccgactctaatcagttcctcaaaagtccattcagaggaagacacaacgacgacaacgttccgtacaatctccggcgcttccgttagcgccaacacagctactcctctctcaacttctctctacgatccctacggtcacatcgaccgcgccgccgcattcgaaagcacgacttcattttcgtcaatccctcttcaaccgatccccaaaagctccggtccgatcgttttaggctcgggtccgatcgaaagagggttcctttcaggtccgatcgaaagaggattcatgtcgggtcctcttgatcgggtcgggttattctcaggtccgcttgataagccaaactcagatcatcatcatcagttccaacgtagcttctctcatggtttagctttacgggtcgggtcaagaaaacgatctttggttcggatcctccgtagagcaatctcgaaaacgatgtcaagagggcaaaactcgatcgttgctccgatcaaatccgttaaagattccgataactggggaattaggtcagaaaagagccggaatttgcacaacgagaatctcacagtgaatagcttgaactttagcagcgaagttagcttagacgacgacgtttcactcgaaaaccagaatcttcagtgggctcagggaaaagccggtgaggatcgagtacacgtggttgtatcggaggagcacgggtggctcttcgtcggaatatacgacggattcaacggtccagatgcgccggattatcttctctctcatctctatcctgtcgttcatcgagagctcaaaggattgttatgggacgattcaaatgtcgaatccaaatctcaggatttagaaaggtctaacggagacgaatcttgttcaaatcaggaaaaggatgagacttgtgagcgatggtggagatgtgaatgggatcgtgaaagtcaagatcttgaccgtcgattaaaggaacagattagtcggagaagtggatcggatcggttaacgaatcattcggaagtattagaggctctgtcacaagctctgaggaaaacagaggaagcgtatttagatactgcagataagatgctcgacgaaaatcctgaactagctttgatgggttcttgtgttttggtcatgttaatgaaaggtgaagatatttatgtgatgaatgttggtgatagtagagctgtgcttggtcagaaatcagaaccggattactggttagctaagattagacaggatttggaacggattaacgaggaaacgatgatgaatgatttggaaggttgtgaaggagatcaatcatctttagtcccgaatttatcggcttttcagctcactgttgatcacagcacaaatatagaagaagtaagtaaacactaaacaaaacaatggtatacgttgctcagtgaatcttggtggtttttacttattgttatgttcttgtggtttcttaggaagttgagagaatcagaaacgagcatcccgatgatgttaccgcggtaacgaatgaacgggttaaaggctccttaaaggtcacaagagcgtttggtgctggtttccttaagcaggtatgaaatattcatctgactttagtcatgatgtttgagtatgtgtgatcttcagtctgatgacagtttggttatgttattttgcagcctaaatggaacaatgcacttcttgagatgttccaaattgattacgttgggaagtctccatacatcaactgcttaccgtctctctaccaccacagattagggtccaaggaccggtttctaatactatcatcggatggtctctaccaatacttcacaaacgaagaagctgtttcagaggttgagctcttcatcacattacaacctgaaggggatccagctcaacaccttgtgcaagagcttttgtttagagctgctaagaaagctggtatggtgaacattcttacattcgaaaaaatcgacttcagtaaatatatgttatcttaactgatgttttatttgtgtattataggtatggatttccatgaattgctagagataccgcaaggtgaacgaagacggtatcacgatgatgtttcaatagtagtgatctctttagaaggaagaatgtggaaatcttgtgtatagaaaacaatccctatgagcatacacacaagaacaaattggtgtgttcatggagacagagatcgatctctcatcaactctgaatcatgaactatgttgatataaacaggaaataaaaaaagttttggcaactacttagatgtccaattgtgtcataaattagaag

SEQ ID NO: 5536 - DNA, 884 bp, Arabidopsis thaliana landsberg
  unsure (1)..(884): unsure at all n locations
tgctaacaccgccacaccactctctacttctctctatgatccttacggacatatcgatagagccgtcgcgttcgaaagcacgacgtcgttttcgtcgattcctttgcaaccgattccgagaagttccggtccgattgtacccggttcgggtcctttagaaagagggtttttatccggtccgattgaaagaggtttcatgtccggtccacttgatggttcttccggnnnnnnnnnnnnnnnnnnnnnnnnnnnnnaatttcagagaagtttctctcatggtttagctaatctccgggtcgggtcgagaaaaggatctttagttcgggttctccgtcgtgcaatttcgaagacgattactagaggacagaactctattgttgctccgatcaaaccggttaaagagcccgattgggtattcgggtcggataaaacccggatccatcagatcgagaataatctcactgttaatagcttgaattttagtagtgaaggaagtttactagacgacgacgtttcgttagagagccagaatcttcaatgggcacaaggtaaagccggtgaggatcgtgtacatgtggttgtatcggaagaacatggatggcttttcgttggaatctacgatggattcaacggtccagatgcgccggactatttactctctcatttatatccagccgttcatcgtgagcttaaaggattgttatgggacgatcccaaaacagatgcaaaatcttccgatgaagctgatgtagagaatcgtaactcgagttctgagaaaaagtcaaagaattgggaacccagtcaacgacggtggagatgtgaatgggatagagataatgaccgtttactgaaagatcggagtaatgggtcggagctattgccgg

SEQ ID NO: 5537 - DNA, 745 bp, Arabidopsis thaliana landsberg
tcaaatctactctcactaagaatgttaagtaccgtacctgcttaaggaaacccgcaccaaaagctctagtgaccttcaacgaacctttaacccgttcattcgaaaccgcgctcgcatcatcaggatgctcctttcgaattctattaacttcctgcacaagaaacaagaattcatcagcaaaaacatcaccaattcatcgataaataacctcgttttatccgcatagttccttacctcttctacattagtgctatgatcaacagtaagctgaaaagctgataaagtcggaaccaaactagctccttcaccatcaccacaaccatcaaaatcattcatagtttcttcattgatacgttccaaatcttgtttaatcttcccaatccaataatcactctcagctttttgcccaagaacagctctactatcaccaacattcatcaaataaacatcttcacctttcatcaacattaccaaaacacaagaacccattaaagctagttcaggattttcgtcgagcatcatatctgcattctccaaataagctacttccgtcttcctcaaagattgtgacaaagctttcagaacaatagacgaattcggatccggatctagatccgacccattactccgatctttcagtaaacggtcaagatctcgatcccatacacatgtccaccgacgatgactatattcccaaatctttgactgtatatcagaactagaggtacgaaactctacataagct

SEQ ID NO: 5538 - DNA, 633 bp, Arabidopsis thaliana landsberg
ctctctcacatcgttcttcttcaacctctgtttttttttttctctctaccatggatcaacaatgggtagggtaaaaacactttcgttgtatctaaactctccatctccaaaagaaaaactttttttcttcttctcagatgggtaacggaatcgggaagctaagtaaatgtttgaccggaggtgctggtcggaacaaaaaacccgagttatcaattctcgaaccagatcctttagacgaagggttaggacactctttctgttacgtcagaccagacccgacacgagtttcgtcttcgaaagttcactcagaagaagaaacgacgacgttccgtacaatctccggcgcttccgttagtgctaacaccgccacaccactctctacttctctctatgatccttacggacatatcgatagagccgccgcgttcgaaagcacgacgtcgttttcgtcgattcctttgcaaccgattccgagaagttccggtccgattgtacccggttcgggtcctttagaaagagggtttttatccggtccgattgaagaggtttcatgtccggtccacttgatggttcttccggtccgattgatggtaaaaaccgttctgatcaatttcagagaagtttctctcatgg

SEQ ID NO: 5539 - DNA, 4543 bp, Arabidopsis thaliana landsberg
tgacatctggtctatggttttgctctaggcttcaaagttttggcctttctagaaggatctctgattttatcttgttttgaatccgcttccgcttatgggtatgtgttttggattaggatgtcgagttccaaacttttgggttctgtgagtttattcattactttatataattgcaggtatctatctacaaccttccttttaagttaaggtgaagtggaatatgcagttagtttgtggagatgcttcccggagctgagattgagatgttaggaggtgactgctttgaagggtcatatgaggatcatcagatattcagagaagttttctttggaagtgatcctggaaatactactaaaagatgtctcgttactggagccattaacttcgaatgtgattccagtaagaatgtcaattcctctctgagttccaactctgtggtaactagtggatatgcatgtccacaaggttttgaggcatctgcttcaagagatggttcagattttaacactaaagctaagagagtgaagctttcaggtaataagcatttggatgcaagggacgaaaagggatctgctttgcatggttttccaacttcggacatagctagagagacgatacctctccatttagttgaatcatctaacaagggtgtttcaactagctcatatttgttgaagcacagcatagtaaagggaagagaagtttatctgggtggcattgtgtctggaaagtgtaagtcactaaacttggacaaatgcgatggaaaggaatttaaagctattgcctctcctgtttctcaggagagcttcgcaaccagaatgatctctgtaggtgcttctacgccgcatagtgagaaggcttgcttcccgctacagttgaacaacggatctaaagtatctcctaatgagttaattatgtctaaaacctgcctaaagattgatcctaaagaggacccccgtcctcttctctacaagtatgtctgtaaggttctaactgctgccagatggaaaattgagaagcgcgaaagatcagcaggtaggaaacatgtagacacattttacatatcgccagagggacggaaatttcgtgaatttgggtcagcttggaaagcattgggtgggatcctattagctgatcgtaagttaatggatactggtactaagaaatggactggtattaatgacttctggtccgatctctctcttacactgttggacatcgaggagaacatgaaaaatttaaatcttgctaacacacgggcactttggtggagtgccttagagccttttgtggttgttgtcttcatttctaagcaagttggttctttaagaaaaggaaataaagttgaagttgcaaggaattcaaatccagacaagttgaagaaagaagatacaatttgtttgaacctgatttcaggctgtcctgaaagtgtgctgacagtatctgaaggcagtcatcttgttcatgacgtggatgctaaccaagagatacattcagatcttgaggtgcaaactaaaatttcctctcaaaaagtttcttcaagactagagaggcagagcataattggtaaggaaatctctgggactcatgagcaggaggctagcaagggcattgtagcttcaaaattgatagcagaagacatgcatgaaagtgttatgagaaagaacttacacagaagatcaaagaaaatatccgatatcaaaccagctttcttggaccaacatgattcactagattctaattctctcaatagctttgaattccaggataaagagatgggcaacattcacctcgtctcaaagggaagtcgggatgaaaggttgaggaatgagaagatgaataattcatgttgcaattcaaagaaaggaagaaagaaagctaggaagcactatactcaagatgatgaccttatggggtcgacaataaccagaaacaaaggtaagttcagcagatcaagccagaaaaagaaaacacagaagccaaaggctagaacaaagaaaagaaacaataggggagggtgcaggttgcttccccgaagctcaagcaatgtggaaaatcatttttttcaaggaaattggtctattttgggtcctagaactgtcttatcatggttgatagctaccaaagtaatttctagagacgaagtaatccagttacgagatccagatgatgatactgtggtaaaaacaggcctggtaactaaagatggagtggtttgtacatgttgcaacaagactgtgtcactttctgaattcaagaaccatgctggatttaaccagaactgtccatgtctgaatcttttcatggggtcaggaaagcctttcgcttcatgtcagctggaagcttggtctgctgagtataaggcgcgaagaaatggatggagattagagaaagcctctgatgatgatccaaatgatgattcttgtggagtttgtggtgatgggggtgagctgatctgctgtgataattgtccatctaccttccatcaggcgtgcttatcaatgcaggtattgtctgactcattccagggtatatttacattttaactattatttatcccggtaattaactctttgcaaaacatacacatgggtgaaacttcttggctgattctgtgattcttactaattcatctctagtaacttacacggcattagtataactaggatattttaccttaaattggtaccctctaaagagagttgctgtattgcttttgctttttctacccaggtgctccctgaaggaagttggtattgctcgagctgcacatgttggatatgcagcgagttggttagtgataatgctgaacgctctcaggactttaaatgttcccagtgtgcgcataaatgtaatcatcttacagctcgcaatctcttagaaactatgatttatttctttatcacatgaaaggaaacccctgatttgaattctcttctatcatgtctcactgagattttatcacgattgatgtcactgttcatcagtaacagttgtagatggtggttttctgccaggctcagcacttctccaattttctttctttagtaattgacactttgtaaaactcacttttggagttatgcctctcgcgacagttggatcccacattagttattttggtatgaaatccactttggctgatgattgttacctttatgttatcagatcatggaacatgtttgcaagggataagtaaacgcagaaagctttttccagagacctacttttgtggtaaaaattgcgagaaggtattaatcatacctagtcactgtgacttaaacaactaatgggtagtttttaaatttacattgagaataatagtatatttttcgctgctcttgggctctttgacatataaacaaagaagatgttagcatgttacagctgcttcacaactttcaaggttctcattaagtagctcgtgtaatgcaggtgtacaatggtcttagttctcgtgttgggatcattaaccctaatgctgatggtctgtcttggtcaattcttaaatgttttcaagaagatggaatggttcattctgcccgaaggttggcgctgaaggctgaatgcaactcgaaattagctgttgccctatcaattatggaggaaagctttctgtctatggtagatccaagaactggtattgacatgatacctcatgtgctatacaactgggggtaacgtccttttgtcattagcttgcacacttagatttctgtttgttacttctgtaccttcagttctgctcttcattttcatcgctttgtctacccttttttgaatctttgttgcacttaaaggtcaacatttgctcggttagactttgatgggttttacacagtggttgtggaaaaggatgatgtgatgatctcagtagcatctatcaggttagtatgaagaaactcgaattcatgctgaaaaaacagtaatctcatggctatccaagtgtttggtatgtcttctagaacctccaggcaatgaaacaaaatttgacactatcaccaaatggatgcttagaactattctttcacttccatccactggaacgagttacatataaaccccattttactatatccagggtgcacggagtaactattgcagagatgcctcttgtagctacgtgcagcaaatatcgccgacagggcatgtgtagaatcctcgtggctgccattgaagaggtacgatatttagaatgtaaccatgtggttgttcttgaagctacatccacattaataatgtctaaacttagtacaatgatagacatacagcaccgctcatatgctgaccttgataatcccttagctcatatgatctctcttacagtcttgtcttgatccctgggctatcaatagataaaactattcattgggttaggctgcagatgcttatgtctatcaaagtggagaagcttgaggtaactgcattgccgtgtttagaggaaactagcactgaaggattgggcttcaaacccatggatgacgaagagcgtgatgctctcaaaggaatgaactagctggtattccctgtgacaactctgctc

SEQ ID NO: 5540 - DNA, 1586 bp, Arabidopsis thaliana landsberg
  unsure (1)..(1586): unsure at all n locations
atcgggcattcacaggacttgtcggaggctattctctgagcatcttcatacgcactctgcaatttcttgttcccatgcaaagttgatgaccaaacattgtatttgatgctcttgtgaacgtcatcttcactatacgatttaatcacaaaaaacttggcattgctgtaatcgattcggagatcctctttattatactgagaaggattgatcacaatatttccctcggcatcagcatttccagcttttgttgtataagctttaacaataagttgatttcccaatgctctcgatcttcgacctcgattttgttcacggactgtatcaggaattatatttgcatggccaccatacagcttgggccgaacattgttattgtttgttgcaatttttgaaaaatcattaagttgaggtggagcaatgtctaattgcccaaaagacgatactctgctactggaaaccacgtcaacaggttgagcactgacggaggtaactcttccctgcaaagatgattacacaagtccagagtcaaaatcagaatgatatctgtggctgtagtgatcaacaaactacagtactcctagaactacacaggtaagcatatcaatgtctgaaattagaatcacaatcattccgctaatctttttctaactcatcaccttcgtatcaccaatatccaaaataaagtaaaaccagacattagtaatacgaaattatacctggcgagcttgtcctgatgatgaagtagaatcactcttgtccatttctgtctgtctgctttgtccagaattaggccttggtttctccgagatcttgcccaaagagttccctgcaggaagtttcggatcattcctttggagtacggcagtagcggtgccacttctctgccttgaccctctcccatcagatggacccctattaggtgaaccagtctcacccaaagagtttgtagagctattcgagacaatctcaggttgaattgcatatggaacaaaagtaggcgacgttgcaacactctggtaaggaggaatagagtaaaattgttgaggagcaacaaaagcagaatcaacgccaattgaagcgccaggtatgtaaggattgaatggattataaggagactgtgcatatccataactaggtgtatagcatatatagggagaattttcattctgcccaccctggagaaacaaaaaaaggatatcatgtcaacaaatacaaaatgtataagaacaaatcaacgattaatgagaagtctttatgtccgagattagtactgtgtattggacttctgaaccatctacaccaaannnnnnnnnnnnnnnnnnccaatcaccgggtgactcataacctgaaacttaagaaaattagagaacttgtcgcattaaggccgagagtataattgatacaaggaatccaagttataattacctgtacagtaatagccataactggcatcaacggngtaatacatgccctggtcaacaacanaatcaggggctgccttcgaggtatacatnngcttaacttatcaaagaanatctttgtaccaatggagtttgaataacacctgaaataacataagaacgaac

SEQ ID NO: 5541 - DNA, 1473 bp, Arabidopsis thaliana landsberg
cgagcgatggggtcggtttaggcttggcttgggttgggttaaaggtggttccagcagttggtttaatggcgagagagccaagcttcagagtggaaggagtagtttctctgttgcttcctgtgtattgctcttttcatccccatctgagttttttaattgcacaacctttgtttctgcagaggtcactgaaggcttcttaccgacatccttggagcttttcttgcttctgtcagaaaaatctagattgagcacgggaaatggcctgcgaaaggtcctaaatggaagtctagctctctcttcctgcatgagtctctggcggtcttcgtagtacataaaatcatctaatagtgaagtcttttccgcatgatgtttgaatagttttagcacctcgagtccttgtttcagtattatctgcacagaaacgagaatgattagattgagatttgagatatcaaaagcagagttctcggaacctggtcttcaaagtgaagtgtcaagataggaaagctcacctcgtgtgtgtctcggctgttggtcactggcttattctcgttattatgtaaaataatgtgcctgaaatagctattaggaacatctttaataatgtgccacttgacaggaaagcttccgctccatttgtcgtgctgccaaaaatccatgtctcggtcgaaggaaactggaccggtcatctcagccacgccacagaacagaccactggaattgacctaaaacgaaggaagcactacatcagcatgagcacaaagtatgaatgcaaacacattcgcacaagggacaaaggggaagaatcgactcacagaaaagaataagaaaataggacattcacgagacttctcagtggctattctctgagcatcttcatatacactctgcaatttcttgttcccattcaatgtagatgaccagacaccatatttgatgctcttgtgaacatcatcttcactatacgacttaatcacaaaaaacctggcatcgctgtattcaatactgaaatcttctttattatatcgatcaggatttatcacaatatttccttccgcatcagcatttccagctttggttgtatatgctttgacaattagttgatttcttgatcttctcgttctcgatcctcgattttgttcactcgtatatgtacttccagttgtgttgttatcacctctggcatcataaatcttggaacaaggtttataactatatgaagcaattgatgagaccccattagcaatgtctgatttcccataaggcaagagtgtgttcgcgtaagcagcttttccctgcaaattaaatatacacgagttcaaatcaagataggaatgatgactaagaagacacaacaaaacactcctcgcaatgcaaactacaccccctttttaatagaaaacagaatctggaagtatatttctatacgagaaatcacctggagagaatgtgcagaaacttgctgtggaaaca

SEQ ID NO: 5542 - DNA, 960 bp, Arabidopsis thaliana landsberg
aaacccgtgggggtggtttacttctgaagtgacttggggtccagaggaatagggccggctgtttaagattgcaggagacccggtaactttgaaagagtcttttttatccgagagagaagcatcaaccacttcagaggggtctgtcttcttgagagagccagaggagttcggtttagacttggcttgactcttctggttcaggtgagaaacagtagtcgggttagagtctgtaccactcgggtcaatggtgagtgagctgatcttcttctgagtggaagaagtatcttcttcattaccttcttttacagtggtctcctcattcccctctgactttgaaggaagctcctcggtttttgcagagattactgaaggtttcttgaaggattccaagggggttttcttgtttctatcagagagatctggcctgggtaatggtaaatcgttaagaaaggtcctgtacggcagcctggttctctcatcctgcatgactctctgtcggctttcgtagtacacaaaatcatctagcaatgaagtcctttccatatgatctttaaatatttttagcacttccagaccttgtttcagcattatctgcagaagaaaatgatatattagcaaattctgaatgtgaaaatcttcaaagcgtggtctagtaggaaaattaacctcttgtgtgtctcgactgttggtgaccggcttattctcattgctctgtagtatgatgtgcctgaaatagctattgggaacatcttttatgatgtgccatttgacgggaaagcttccactccatttgtcttgctgccaaaaatccatgtctttatcaaaagaaactggaccagtcatctcagccatgccacagaacaaaccactggcattaacctaaaaagaaaagcaatgcatcagaataagcttaacacaaacaagctagcatggtaaaagagagaaggaaaaactcacaga

SEQ ID NO: 5543 - DNA, 1339 bp, Arabidopsis thaliana landsberg
cgtcttcatgattttcaactttgttaagaccaccagcgaagggtaagtaaatatctagagcagaagaaagagaggttcttaatcgagagatgaaatgggtttccgggtcgggtttggggaagagaagacctctttgagtataatcaacatagagaagattaagatcaaatggagttagatggatcttttcacgaccttcttggtttatgatttgaggtcgaacaatgcttgaggaaataaaagttacgtcggccatttttgttctgtattttaaagccaaagctcaagactgttatataagataaggaagttgaaaacaatattaatgtaatgtgacaccatctctgtgtaccatcatttaacatagaccatatatttaccatcattataagataaggaaatttttctacagccaacaacttacaagattctatttattttaaagaattgtgtacgacgacttaaagaccgttcaaaaattgtttgttgtcgttgtcctttttgcgtattgtaacataaaaaacgtgtttaaaaatggcaattattgaaaggcagcaaataagtgctctgaccagacatgacatgataatggcccattttatgtttctgatttgaagtgcccaatgagtgaatgaggtattttcttttggtcgctgaactcaaagatgtgtctctcctaaagcttacttatcacagttttgttttgtttcagctctatacactttattcgtgcttggggatcaatagaatacatttcacagagaaaatatacagtcactcgaagccaaagacaatgtccttgttatcatttttatttcccaactgaaacaatcatgcaatagttacatgctctaaaaattccaaatcagctagtagtttcactattacatcaccccataggattgcttgaacatcaatacttccttcactgattccctgaaaaactgaaagcttgccattgatactattggatggtccagctcgaattgcaataggtttgccccaaccgaaatctttgttgtacacctcgaaccgcggagagcttgcgataactatagtattacctactttactgccaatgcctgaatttaggttcttaatatttctaacccaatcttctgcaaaacttttacaagtttcattcgtttgcgagctaactaattttcttatttgcaaagcagcctcacccaaaccacgatccaagagctcttccacggtggttatggctgatgaaagatagaccatattcccaaaacaatctttctcaagcggtggatttactctttgcctcaagtccaccactagtctgcaatgtgtcattttgtcttcgttcacacca

SEQ ID NO: 5544 - DNA, 781 bp, Arabidopsis thaliana landsberg
ctagagatctacttcccctttgctggtcgtcttgtgaaagtggagaatcttgaaaacgacacggtgtcgttttacattgattgcgaggacgacaattaggtgccaagtttgtctacgcagaatccaaatctttatcggtgagtgatatccttcaacctcacggctctgttcctgatttcatgagtcatttcttcccatctatagacgttaaaagtatccacggtctctcggagcccttgcttgctttgcaagtcaccgagttgaaggatggtgtcttcatcagttttggttacaatcacatggttgccgatggagcttcgatttggaatttcttcaatacttggtccaagatttgctcaaatgaatacgatcatcagaagaatctcaagcctcttgttctcagaggatggttcctcgacaagatcgattaccggatccatattccggcttctgaggcggatgccccgacaagtgatgagatttctcagatgcccacttcgaaagagagagtttttcacttcacaaagaagaatatttcagagctcaaaactaaagccaacggtgaaaccggctcaagtgacctaatcatctcgtctttacaagcgctttccgcacatttatggaggtcaattatcagacacagtggtatgaaacgagaagaagaaacgcattgcaaagtggctgtggattcccggcccaggctaaaccctccgcttgacaaagaatgaaaagggaacgtgaacaatctcggggtagctactgtcacgggtgggggcctttt

SEQ ID NO: 5545 - DNA, 380 bp, Arabidopsis thaliana landsberg
taaaactctcataaattaactaataaacaatttaaaggattccttcttaaaaaccaataaatgtggatgctctatagacatttccagaaacacatgtctacatttggcactccttgattggttgatgttttttcaataactaaacgattaattaaatgatgaaactgtattaaaaactaatatttttattggctagactctgaagtgcatgtgtcatcgatggtggtactcttagtgcacagaatagacacttaattaagatagaaaatcttaactatgatatttaacatcatccaagaagtttactacacattcatgtaattacattctccaaagattcaacatcatcaaataagttcagtaacacatcagaccataac

SEQ ID NO: 5546 - DNA, 512 bp, Arabidopsis thaliana landsberg
tttagctttgagatctgagatattcctctttgtgaagtgaaaaactctctctttgaatgtcggagaaagctcacggcttggtggtgacgtctctgtgtctgaaaccggaatatgtatcgggaaatccatcccgtccacgaaccatcctttgagagcaagaggttgaagattctcccgttgaccattagagcaaatctttgaccaagtcctgaagaaattccagatggaagcaccgtctgcgaccatgtgattgtaaccaaaaccgatgaaaactccatctctcatctcggtaacttgtaaagcaagcaagggctccgagaggccgtcgatgcttttgacaccgttcatgggatagaaaatcctgaaaaagtcaggaacagagccatcaggtcgaagaagatcgcttaccgaaacagaatcggatacggcatggatgaaaaaagcaccagagccgaaacaattgatgtaaaacgacaccgtttcgtcttcatgattttcaactttgttctgta

SEQ ID NO: 5547 - DNA, 4627 bp, Arabidopsis thaliana landsberg
  unsure (1)..(4627): unsure at all n locations
agcattttgcctcctacattctcaaagtatatgtcaatgccattagggaaacacctggaaaaaaggagaatatctcttagattagtcaaaacgcaattgacaagatcaatcgaaaagtattgccactttattatgcaaaccgattctaacatttataggcataaaacgcttagaaataagtagttcaccgaacctttttagggcagcagtaaggtcagattcttccttgtagttaaatgcatcatcaaacccaaacttggtcttcagaagatcaacctagcggatcccccaaaagtaaaacggctaattaatcattcttttgaaggagaacaaagaaacataaggaagcaaaatatggaaatgattatcaattcctcaccttctctttacttccagcgcttccaacaacataacagcccatcatcttagcaagttgtcccacaagctgaccaacagcaccagatgcagctgacacataaactgtctctccttcctttggagaacaaacttcataaaacccagcataggcagtcataccaggcatacctattaggacaagacaaaaacccatcaaagagtgaatatatgaaatagatcaacaaacaaaacagttgaaaccctagactgaagttataaccaattccattcatatgtttctaagattttttagaaatccataataaaggttatgacctcactgtctcaagtcaaaacattgtatcatcaagaagcagatttccaaaattttacaaagtgattccaccttacaaaactatgaaaaaggttgagattaacatacctaaaagtccagtgtaataagataatggaacatcagtatgttggatcttgaaatgcgcgtgagtcattggagtgataacactgtactcctcccatgcaactataccccagagtaagtctcctttcttgtaatctggatgtccagattctattattctagacactccatacccttggattggctacaccaaaacacacaacggcaacaacaacagtcaacacgatagacatagcaaaaaaacagaaccaagagagacacaatttcttctcagtgtcttcaagaacaccaaattgtcatcaataagaagcatctagtttcttcacatgcaaaccaaacaaaataaacattatcatcattacctggccgggagtgtaagcttgagcaagagcagcagtggaaggatcaggtttccccatgcgagaccgcatataaggatcgcatgacaggtagagattcttcacaagaaccgatttagaaccttccggaaccctaagttcgacggtggtggtggtgaaattgaaatcggattccttagggaaaccactcacgtggtctttgaatatgacctgcttgttcgtcgtcatcgttgttattctccgattcaacttctgatttccaccaatttgttacttcttcttcttcttcttcgaggacgcgcctgctttttatagtggcctctcactcgtaatatcaagtatgaagtcactgctcatgatgattcatcacaatatgttcacaatttttaaactctttcgagcgtttttattgttgacactttcacattttgtgatatattttcatttcctttcacatttcattttctttccaattctctcttctgtcacattttcacaagagttggtgtttatacattactgatataggaaaaggatggtgataaatgagtgacacgtggacggtggtaattgaagattaaaagcaacggtcaatattaagaacagaagaatgaggtcaataagaagctgaagacacttcattatgctaaaatctgagattgtatcttcttcttcattttgttctctgttactacttgagaattctctgtaattctcaagctattcctcatcgtttaccggagcttctctcttgagactcttgtagatgagaagttgatgttgcgtttcatgaacgtcgtatcaaattatcaatctatatctttcgaatccattttcctctttattatctgatttacgttatcaattacaaaagaacacacctcatcgttttagagacatttggcttcaatttcctcaagtgtcaagtgtggtccctttgtctctggaacatcgaagattcttaagaccagagacaaaacacatatcacaccaaacccacaaaacagtatcccagctccaaatagttctcgcaaaacagagccatgtgattgttaatcgtgatgtcctctaataaagaagaaaaggagttgcacaaattgtattcattgatgcttaaacacgcatacttgggaacaagagctagaaacatgggtttgtattaggcttcttttttggatttgtgagagaggttttggcttgtttgttactacttacatacattttgtgaaccaagtcacataaaatgataaaaccaataacaaacaaattaatcttactgtatatactataattactattattcataaaccaaaaactcacggttgggttcaacagccatacaaactcttgttggataaatataacatttctcccaaataagtattattccctcacgagcaataaaaccttactcccaattaaagtattcatcattcacgagcaataacaacaacttgtttcccaacattcttaccatggaagagtcccacgagagcttcaggacctttctcgagcccatcagctacatcttccacgtacgttatcttcccttctttaatgtgcggatgcagaaactccaagaactttgagtattcgtcgtagaaatcagacactacaaagccttgaatgcggattcgtttgtagattatgttggataggttgtgtacaccttcttggttctcaagattgtactgtgagatcattccacagacagcgatacgcccgtgcatgttcatgttcataagcactgcatctagcattttgcctcctacattctcaaagtatatgtcaatgccattagggaaacacctggaaaaaaacggagaatatctcttagattggtcaaaacgcaattgagaagatcaatcaaaaagtattgccgctttattatgcaaacggattctaacatttataggcataaaacacttagaaataagtagtttactgaaccttttgagcgcagcactaaggtcaggttcttccttgtagttaaatgcataatcaaacccaaacttggtcttcaggagatcaacctagcaaatcccgaaaagnaagtaattgggcaagtcattctcctgaaggagaaccaagaaataaaaggatacaaattgtccatcatctcaccttctctgtacttccggcgcttccaacaacataacagcccatcatcttagcaaattgtcccacaagctgaccaacagcaccagatgcagctgacacataaactgtctctccttcctttggagaacaaacttcataaaacccagcataggcagtcataccaggcatacctattaggacaggacacaaccatgaaacagtgaatatatgaaacagatcaacaaaccaaacagttgaaactctagtcttctagattgcagttataattaattcccttcctacgtttcaaacaacgtttctaattttgttagacatctataaagtttatgacattcaacaacatgatcactgtctcaagccagaactttgtatatcaagaagcagatttcctaaatttacagagtgattccagttacaaaactaggaaaaaaggccgagatatattaattaacataccgagaagtccagtgtagtaagataatggaatatcggtatgttggatcttgaaatgcatgtgagtcattggagtaataacactatactcctcccatccaactatcccccagagtaagtcacctttcttgtaatctggatgcccagattctataactctagacactccatacccaaagattggctgcaccaaaacacacaacggaaaaacaacagtcaacacgatagagatagcgaaaagaacaaccaagagagacgcaatttcttctcagagtcttcaagaacaccaaattgtcatgtagtttctacatcaataagaagcatctagtttcttcacatgcaaaccaaacaaaataaacattatcatcattacctggccgggagtgtaagcttgagcaagagcagcagtggaaggatcaggtttccccatgcgaattctcatgtaaggatcgcatgacaagtagagattcttcactagaacagagttagtaccttccggaaccctaagttcgacggtggtggtagtgaaatcgaaatcggattccgtagggaaaccactcacgtagtctttcaatatgacttgcttgttcgtcgccgtcatcgttgattctcgtgacttcaccaaatttgttactgcttcttcttcggtttctctcgatgacgccgctgcttttatagagtcatctccagtgtgccacgaattcatgatatcaacttatcaagtatgacgtcactgcttatgtgttctgatttttcacattttggattctttctctttcgagcgtttttttctctctttgactttcacattccttttgcatacctttttttttcctcttacgtatctctcctttcacattttgcttttcgtctttttacactagagaactaattctaa

SEQ ID NO: 5548 - DNA, 2493 bp, Arabidopsis thaliana landsberg
  unsure (1)..(2493): unsure at all n locations
acagagtattacagaagctaatcaagacacaacctaacactttttaatacagaatctaaaacaagctaataggttgaggaagagcacataccattcagtcttcggcttgggaataggagacagtacggtggtccacatttccctcccgcaaaccataagtatgtcggcgagagccctcgccgagtcttcttgtagctccggcaatgattgaggagctccctcttgaaagttgttgccctgagaagatggatggctgtgtccctgagagttgggatttggagactccggaagctctttgtttagaggatcttctggcggtggattaaactgcgcctcttctgatcgcggcggcggcggatcaacacgctgagtggtggagctctggaatagttgctgcggcggcggatagttgcggtagtggggacctgacgttgaggctccagcggcttgaggcggatgcgtcagaggagcttgaggcgccggcgccggagtgaagtcgtactgctgaggcagcgacgctggtcttccaactggtgtggaccctccggctctctgtgtaacttagggggtcgtcttcctctttcgtgaacctccacgatcggcgataggcatcctcttggagatgagagaatcgagatggatcgaagaggcaagggagagtttggcgaagaagagagaatcgaagaagagagaatcgagatggatcgatgtattagggtttgttggtgaaagacggatcgatttagggttaagaagaagaagaagaagaagaagaagaagaagaagagaatcgatttagggttacgaagaagaagaagaagaagaagatcgaagaagatcgaggaagaagaagatcgaggaagaagaagaagagagaagaagagaagaatcgaagaagtggctaagtgtttggaatgaaggggaaatgaatcgaattagggttttcaacactggagtagtcgtatatcagtcgcataatagtcactaaatcaattgggtttgggcttcgacgattaaaagcccaataacttcgcctgtagtcgcaaaagagtagcaaatccgtcgtcgattttattaggtttgggcttcgagaattagaagcccaacaacttcgttgtagtcnnnnnnnnnnnnnnnnnnnnnnnnnnnnnnnnnttgggtttgggcttcaattgttagaagcccaacaatttaaaacgttgtcatgtagtagtcgtataattgtcacatttttattggatttgggctttgatatggagaagcccaacaaattaagttgtagtcgccaattaatcgcataagcgtcactgcttttattgggtttgggcttcgatatttagaaacccaacaaagtaagatgtcgtcgttgagtagttgtattattgtcacatctttattggatttgggcttcgttatttgaaagcccaccaagttatagtttagtcgccaagtagtagtatcatagtcaccttatacttttgaaattgaaataattttacatagcgattattcctgacaaaaataaatgttcaatgatatattatataaaactcaatttattcaaatgttttatctaataattaaacatatacttcacacatttattactcttcatattctacttcatcttcgtccaaggacgataaattacatcggaattcatcttctggttcagcatccccgacatcgtaatcaaggattattgggtttaagctttctaccggattttctagtacaagatcttcaattgtagtgagtaaaacagcatcatcattttctgtttgcaacagagtcggatcattgttttcatattctcgagaaatgtttcccctcaggttgacttttaaaacattgagccaaatgttctttggtttcttcgtatatgggtacggaatataacaaacttgatctgcttgagatcctgtaaacacaagttatacatatatatcaaacaagagtattaataattaaaagagaaatacaattgacctcttcaaaattacgtaccaagaataaatgactcgtatttattttatttcctcgtaagatcgaacagtttacaacagccaccgtgcgttcacgagtgccactcccaatctttgggtcataccacttacacttaaaaactgtgatcctcaaattgacgatgccctcatactcgagttctatgatctcagtgaaggtaccgtagaaatccgcttcatcagatgaatcagcgtaattatcacctttaacacataccccatagttacatgtcttacgtccagcgccgtgattttgcgtatgaaacatataccctcttgtgaaatacattggccaagttatgaccttgttcaaaggtccttgcacaatttcttgaacccaaataggacatgaagaagtagtgttccaatatgttacctagataatagataaataatattaatacatataaatatgattctcacttttcgaatgcaagaaattgatgtagacttacatattctataaccc

SEQ ID NO: 5549 - DNA, 3835 bp, Arabidopsis thaliana landsberg
ggtgagagttcttatagcttttaggctttacttgtggttgtctagtttcatttgtggatctaaagggagaattttttgtttctttgtgtagggaatacactaacctttttggttggatcaaaacaagcttttgaagtatctttagctgatgtttcacagactcagcttcaagggaaaaatgatgttactttggagtttcatgttgatgatactgctggtgctaatgaggtactggtttcttttgatatgtaatctctaggctgttatgtatgtacatttactgatttatattctacgtgtttacagaaagactcgctgatggagattagttttcatattcctaattccaacactcagtttgttggtgatgaaaaccgtccaccttctcaagtgagttcccaaactattttcattatatgtatgtgcctcaagtatatatttttttctgttgatgctaaaagaatgtctcaggttttcaatgacacaatcgttgcaatggctgatgttagtcctggagttgaggatgcggtcgtcacatttgagagtattgcaatcctcacacccaggtaaagagttgattacttaaacatttgttgcactattgtatggcttcatcttgtcatgactaaatgatttggttgtttctatcacaggggtcggtacaatgtggaacttcacctttctttcttacgattgcaaggacaagctaatgactttaaaatccagtacagtagcgttgtccgtttgttcttgcttccaaaggtaattcttttttaagcatatctcagggcagttacctatgttagcagtcatcagattaaagggattatcgtattatgatcactgaatcgtgttcacattaattgagttcgtatttttttttatatgcctgagcagtcaaaccaaccacacacgtttgttgttatctctctagacccaccaatccggaaaggtcagacaatgtacccccacattgttatgcaggtaaacattacttacatttttccttccatttcaattttctatgtataattttcgtttttttactctgatttacataactgtttttgcatcttctccagtttgaaacagacaccgttgtcgaaagtgaactgtcaattagtgatgaacttatgaatacaaagttcaaggacaagctggagcgatcatataaggtttctgtctggtctgcacttacattattgttcctgaataaaaaaatttatacatacgctgaattgtatgaattttcagggtctcattcatgaagtattcaccaccgtgttgcgttggctgtctggggcaaagatcactaaacctgggaagttccgcagttcccaagatgggttttgcagtgaaatcgtctctcaaggcagaagatggggttctttatccactcgagaagggatttttcttcttacctaaacctccaacgcttatacttcacgatgaggtaaattatggttattaaggattggagattttttataggctttgagatagagttgggttttctaacctgttttttttttcgtttttagattgactatgtcgagtttgaaaggcatgctgctggtggtgctaacatgcattactttgatcttctcataagactgaaaactgaccatgaacatctgttccgtaacattcaaagaaatgagtatcacaatctctataccttcataaggttagcgcggattatttcattgtctccgtctatatttactgagtgcatttaagatttgtggtgaatattccttatgttttcttgctgcagctctaagggtttgaagattatgaaccttggaggtgcgggtaccgcagacggtgttgctgctgttcttggggataatgatgatgatgatgctgttgaccctcatcttacgcgtatcagaaaccaagctgctgatgagagtgatgaggaggcaagtactttatgtctgaccgaattacttcatattctaatgatcatgtgtttgataatcgagacttttaatttatgaaggacgaagactttgttatgggtgaggatgatgatggtggttcaccaactgatgattctggcggggacgactctgatgctagtgaaggcggtgtaggagagataaaagaggtaaacttttgtcgcattcattcgaactctttcagcagcagtatttgtttctcatatcttcctgtcattgacttgttatagaaatctatcaagaaggaacctaagaaagaggcttcgtcatcgaaaggattgcctcctaagaggaaaactgtagccgcagacgaaggcagtagtaagaggaagaagccgaagaagaagaaggatcccaacgcaccaaaaagagcaatgtctggtttcatgttcttttcccaaatggaaagagatgtgagttcttctctcctttcttttacttttacctctatgatgtaggctaagttgcgaaatggagtatcctcggtctattacatacatgagagcaaacaattaacagacaaacttagcacattcctgattatgtcattttccatttgtgaactgaacagaacataaagaaggaacacccaggaatagcatttggagaggtgggaaaggtgcttggagataagtggcgtcaaatgtctggtaaaaaatttgaagatccttttcaaaagtaaatacattacttggttttactttatcatgtgaatgtgttttaattccccaaccgtgtgtatgtatagctgatgataaagagccatatgaagccaaggctcaagtcgacaagcagcgatacaaggatgagatcagtgattacaagaaccctcagccgatgaatgtggactcaggaaacgattccgatagtaactaaactttgattctccaacattctctactagtatctcatttacctacaatactaagttatggcatgtagtaaacgttggacctttagttgtttggagttaaccagatttttctctttgaccttaaagatcttgtgttacttcctagaaaagaagagcctgtctttacctcaaaatatagagtactctggtaaggccatagctaagaagcaacaaaacagatcgtgtttctatcgaaattgttatacaagaggttctgtatgatgaaagttatggacaagaagcatctaaaaccttatggacaatgggacgagctttacacatagcttgcaacgatgtagcttttcgcattgcggttcctttttcactttctctcatgtctagatacttttcttcaaccctctcccactcaaaacattggaccaatgatccaagagccaaagtcactagccgttgagctagccctgaactagggcatgatcgtcgtccaatcccaaatggcatcaactttttatcctctccttttttctcaaacctctccggcttaaatttttctggctcttcccataactttggatctctatggatggcccatgcattcaccaagatgattgtgccgcgtggaacgtcatagccatcaactatacaatcttctgatgctaagtggggtaaaagcattggagccaccggataaagccgtaaagtctctgacacaatgtgctgaaggtaaggaagtttcacaatgtcttgttcctctactaaccggtctacaccgatttggtcgtcgatttcggtctttgcctttcgtaatacttctggatggttcaacaaattcgacatcgcccattctaacgttccagctgatgtatcagtcccggcaagtatcataacctatccaaatgcaaaatcagttaaatatacaacaacaaaaacattaacgtaatgttactgatttggtctctcattttacttacaagtatgattcctttgatgatcacat

SEQ ID NO: 5550 - DNA, 393 bp, Arabidopsis thaliana landsberg
agcagcatatttttggagttccgcatgcagtgtgaagaagaccatcaccctgccaagaccaaataagttttgattttctgagaatctagaatggtcagtattcagagcttattaaatatatgtataaacagtcaatgagacacatcgtcgttgaactacaggtttcttcattagaataggacaaggacaaatcagtgagaattcaggtaaacaaaaggatgctaagaaagaaaaataagactcagtgattaccctgacttgtcgggacaacgcactcaatccaaaatcagagactttcagatttccttgagcatctataagcaagttttccggctgcagtgaaattgtaagtattcattatttggacattaaagaaacatacctggaactttg

SEQ ID NO: 5551 - DNA, 607 bp, Arabidopsis thaliana landsberg
cgggtcaggtttcattgatttctcccctggcttccatcccgcagggcacacttcatccgggttttcttgaacatactgtaatgcctgcaagacaacatcacaagaagcaacaaataacgcatctaaaccctaaacctcaaaaacaaatctctctttatctatctatctcaatgatgtgatttttctctttattacctggagggttctcattgtctcatcaacacttcggccaataccgaggttgttgatggtggaatgctgaatgactccttccttgtctatgatgaaaagccctctcagtgcaatgccctgtacttatatattagcaaaatgctttgattcaaagtggctatacgttacttgaaagaacacaagtggattggactcaatgcaagtatgatgcaactatgtcagaagaaatcgtttacctgatcagggatgagcactccaaacgattttgaaatggatttagtgatatccgaaacaagaggataattcagatcaccgagccctcccgactttctgtctgtttggacccacgcgagatgcgagaactacatgaacatggaatcaaacgttccattatccaaaagaaaacgttccattc

SEQ ID NO: 5552 - DNA, 530 bp, Arabidopsis thaliana landsberg
ctcgaacacatggttctaacgttttattaaactattatactttcgagacacttactcaaacatgtagagattgatggagcttttgtttctgctatatgtgtgtaaacgatcaagttcttaatcggtgaaaaagatgacttgaatcgtgggtttaaatagaggtttgagattactaggtttgaatttgttttccaacaaatatattcacgtcagtcagaaatctagcaatagtgggtgtcgatgacttgatctctcaacactcctattctcatggtgttgaggaagcgatgaaaagcgagtcatcagagacgtgaaatagaacgacttattttctcacgttcaatattcggcccgaaaacctttgggagttccaccacgatctggaccaaaccacctggctcatttcttttcatacaaattgattttactaaacccaattggactttagcaaaaattggcccaacacagtttccttttatcaaacagttattttcagaactttaatgcatcttattacccatctacagctt

SEQ ID NO: 5553 - DNA, 2187 bp, Arabidopsis thaliana landsberg
aaaatcccaaccgagaagaccacacgaacggccaagttcttgtcctctttcgtcgtccggtccttccatccggcagcttctgccatcgccaccattctccatactcccgcagttcctgcatatatacataaaatcccataatatgaatttttaatctttagttaattaatgtaatgctttatttaccattaaagccaaagaaagcatgtcttggggatccagattgttgctctgccatgaaatggtagttcagagacatctcttgcatcctcgtcattaagcatgtgttagcgtttactgcatgaccgaatcatatatatgacgaaccacattcacattaagtttttatctcaaaactatttaatgtgcaaggagcatagctagttaactaaatatcttctatatacttgattggttgatcatttgccattttgttactttcattatcaattatttttagaatgttacaaatcggaaatggagttgaatctaacattttaaataatggacatgaaattatctatttattaccactcgagatttggtttaaataccctagaagtttttatgtagttgttatatatatatatgtacataccaaatctccatcgagcttggacaagagcgacctcagggttgtggataagaaaggggatagcgcgttggaggtaatcaggctcgggctggaaatcagcatcaaagatggcaagatattggcactgcttgacgtaactgtgcctcataccgtgcttaagagctccagccttgtagccatttctgttctctcgcctctcatactttatatttatgtcttttgatgcccattttgtacattccatgctcaccagttcctgaaatttaattactaattatgtataaaatcaactcaataatgttcagcaatgtcataagtcatgttattggtatgtttattattttaaattaagttttattagcgaactctgtctatggagagtttattaagaacggacaatgattgctggatcggtggaatcatctaaaacttgaacaattcggcggtccgatggccatgttagtctgcacgcagcacctatagataattcaaagacctgccgagtcaaaactattatgttagtataacaacgtaatattaagtagctctcaaacatttaagaagtttgaaaaatcaaagaaacaacttatatgctagttgacatatgagacaacagctactgtggagtgaccagtgttatttgcactaaaagacggaagtatgaaaggaacattatgatcacgtgtgggttttcttttagtaattgtgtacaagttatatgttgttattaacttgacttgtcaattatatatataaagaataatattataaagagatagggagagatcaaaatcaaacttgaacctctcgttcgttgtacattgggatttgaacaaggaccatcggataattttgatgaccaagctccatatcctcctgcattgcctcccatttgtagactttctctggttttcggttaaacaacttgacatagagtactacaaggttcatgtaaacactctcaacgaaaactaagagcgagatgatcaaacacataaccactatacacttgaacaatggaactatgaatacattccttgtttctctccacatagtgctcatgtttatccccacaccatccacggatgctttaagagtttctccatggaacttctcataatggtggacaaaagaataaaaagttatcccagtgaaaaaaaattgtaagaaatatattatacatacattgtactgaaaaaacagagagcgagagatatagagaaagaaagacgatgtcttaccattaccgagaggaggttaagagataaatcgtgtagagaaaggagaggcttcagaagcaaaaacatgtcttttcttttttgttcagtgactgattgtttagttgtactgccttctttctttttctttctttgttttatagctatttttttctattagaatattacaacgtggaactaattagcctaatacctaagtaactaacaatgatgcagaagaaaaaacaagcttgtgtaccaagacattatataaaattatttttcctatatagacacctattgctgccggtaattcgaaaaatatagtgatgagattcatgagaagactctttggtatgagtttgttttagcaaa

SEQ ID NO: 5554 - DNA, 848 bp, Arabidopsis thaliana landsberg
  unsure (1)..(848): unsure at all n locations
cgcgacgaatcaaaatagaaacaaaactaagcagattcccttacttaattcaccaaaaaagagaatctctgtaaaagtcagacacttatagacagaacaagaaaaacccatttctaaaatcatctcctcttccttcaaaaactctatctctcactcccacttcttggttctaagaagaatagttaaatnnnnnnnnnnnnnnnnnnnnnnnnntgcagctgcgactttcgaaaagcttgaagcatatataatggtgtaaagactaaagagtaaagataattaagcatgaagacgatgtggtggagagatatgagaagtctacttatagttccaatgttcaagtgtttggtggctatatgtttggtcatctcactattagttttcgtagaaagtttatatatgaacattgtagtaatctacgtcaagttgtgtaaacgcaaacccgagaagatttacaaatgggaggcaatgcaagaggacttggagctcggaaatcaaaactttcccatggttcttgtccaaatcccaatgtacaacgaacgagaggtattttgtttttgttcaaagaagttatttcaattatatatagtgatgcagctttttaagtaaagttctacttcacaggtgtttcagttatccattggtgctgcttgtagactcatatggccattggatcgactcatcgttcaagttttagatgattccactgatcccaccatcatggtacacacattgattgttctaaacgcatgctattaattactagtaataatattatatctacattaaaaatataaaggaatctgtatttattttatttttgtcaaactaaaggaatctgttttatt

SEQ ID NO: 5555 - DNA, 652 bp, Arabidopsis thaliana landsberg
taacttgtgttatttatattgcacagacagatcattaattgttgtcgttgttctcgaaattacagtgcttagtatactaatctacttcactgtggttgttttcttaatttacattgattttgtcgagattgtggttgccattaactaagagtttgacaaacttaaaccaattaattatgcatgatcccttttatttacgcttaaaaattagtataaatacaaaaagaaatcccaaaaaatagaaagattgacaaaacttaaaaataagtatactattttatcatgtaattggaaaaccatatactgaagtaaaaatctgaaaattaaaagatgacgtatatgtgcgtgattgagtattacaaaaaagatatacgatacaattaggtatatgtaagtagcacgtggaagttatgaataaaaatagtgagactgagttaaaaagttaaaacattgtttggtccttttttctcatcttgttgttcccactagctatgatcatgttctagatcaggtccacagatttccggtaaaacgacgacgaatcaaaatagaaacaaaaactaagacaaattccttacttaattcaacaaaaaagagaatctctgtaaaagtcagacacttatagacagaacaagaaaaacccatttctaaa

SEQ ID NO: 5556 - DNA, 563 bp, Arabidopsis thaliana landsberg
  unsure (1)..(563): unsure at all n locations
ctctcaggttgcttataacatttgacttgaaaacaaaattaaggtttgtcagaataaagaaatgtagtcacttgcaggagaggttatggttttgtgtgtgtgtgtatctttcttgcatgtgcctccgtgaatgtgatgtcgggagataaacataagccttcgagatcgtgctccatgtaatcaaacacaaagtacatgctgtttgaatttctgatgcgataatcccttcagttttagaatgttgggatgatctaatcttcttaaaatcatgatttctctggctatgaatcttatattttctgcttcaaaattttggacctgtagtttggccaaataggaattagggatttggcttttgatttgggatttttgatatttcgattgcaatgaaacgacgtcgttttggatattaacggatctagttaacgtgtgctaacggaattatcnggtccgttaatgcaagataacgtcgtggggattttggcctggtcaacgataacatttgtgtgaaatggccagtcaacgtttttatcatgttttatttggccttacaaaaaattcac

SEQ ID NO: 5557 - DNA, 511 bp, Arabidopsis thaliana landsberg
tgggcaagtgcttggctgtctggtaaattttcctgacttgcattggttggtgctgtccctggagtctaacggccttggcagcttgtttcaaggtggggcaaacacaatctggctcttcctggcgaactcgttgcagcactgctggaatagctgttgttcctgctgttgtccctgtgggttctccatgtcgtcttcgaaatcaaactcatcgctacggccttgccttgcttgctggagcatcaattgctggcaagctcttaggtgttgttctttctgaaactccttgcggcatttcctcatttttgggcctatggggttagtggcgtcatcttcttcgaactcaacgacggtgcggtagatggaagcgttggtgaggaggaagcagagagcgagactgcgcagacgaggaacaacttgtttgccattttttgctatgtgtgtatgttttggttcgagtgaagaatgtggtgaaggtgtggttggtatttataggtgagaaaagagacttgca

SEQ ID NO: 5558 - DNA, 2579 bp, Arabidopsis thaliana landsberg
ttcaacttgtaaagcgtacgatcttttaaccttaacatgttttttattttccttgattaggaagtcctcttgggagtccaagagatcatccttctcatggatggcactaattagttcatttaatttctccttttgttccatgttaaggttggcaaaaagagttcgcaaattatcttcctcaccactagcattatcatcactagaagactcatatttagtggaggagttagatttaaccttcttctttttgccgtcctttgccatgaggcacttgtggccgacgttggggaagaggagtcccttggtgacggcgatgttggcggcgtcctcgtcgtcagaggaatcgcttgagctttcgtcggagtcccactcccgacaaacatgagcatcaccgcccttcttcttgtagtaccttttcttttctctcctcttgcccttcttgtcgttatcctgtcactgtcacttgataatggacatttagcgataaagtgaccgggcttaccacacttgtagcaaaccttcttggaacgggatttgtaatccttccccttccgttgcttgaggatttggcgaacagcttttgatgattaaagccatctcctcgttgttgagctttgaggcgtcgattggttgtctacttggtgtagactcctccttctcctctgtcgccttaaatgccaccggttgtgcttcggatgtggagggatcatcaagctcgttgatcttctttgagcccttgatcatacattcaaaactcacaaaattcccgataacttcctcgggagtcattagtgtgtatctaggtgtcggggaccataattaggggtaccctcaagactcctaattctcagctggtaacccccatcagcataaagctgcaaaggcctgatgggtgcgattaagtcagagatcagtccattcgagcgactcgatcacgcctcgcccgagcctagcctcggacaagggcagccgaccccggaggatttccgtctcgcccgaggccccctccaatggcgaacatatttccggctcgcccgagccctcctcgccaagaagcaaccctgaccaaatcgccgcaccgaccgaccaaatcgcaggagcatttaatgcaaaggtggcctgacacctttatcctgacgcgcgcccttcagccaacagagccgaagtgaccgccgtcacttcgccgctccactggccggcctgacgaagtttcagcgccgcctgcgccgctccgactgcggtgccacttgacagagtgaggctgacaggcagtcaggcccggccgcacgaccataggaagctccgctccgcccgacccagggctcgaactcgggctaagcccggaagacggcgaactccgctccgcccgacccagggctcggactcgggctaaccccggaagacggcgaactccgctccgcccgacccagggctcggactcgggctaagcccagaagacgacgaactccgcctcgcccgacccccagggctcggactcagccttggcctcagacgacggtctccgcctcgcccgacccgaggctcggactcgacctcgacctcggaagacagactcgacctcgacctcggaggagcctccgcctcgcccgacccagggctcagaccgaccacgtcacagggggccatcattatcctacccctagctagctcaggctacggggaacaagaccggtgtcccatctggctcgccccggtaaacaaataatgatggcgccccgcgtgctccatgatgacggtggctctcagcccccttacggaagcaatgagacgtcagcaaggactcgacatccccgacagctgtccttccgcaaggctccagcgctcctccgacggccacgacatcacatgaatagggtgccaaaacccctccggctgccacgacagcatgtacttagggcactagctcttctccgctagacacgttagcactctgctacaccccccattgtacacctagatcctctccttacgcctataaaaggaaggaccagggccctcttagagaaggttggccgcgcggggacgaggacgagacaggcgctcgcttggggccgctcgctccctctcccgcgtggacgcttgtaaccccctactgcaagcgcacccgacctgggcgcgggacgaacacgaaggccgcgggattccacctctctcacgccggtctccgcgcgcctcgctctccccccttcgcgctcgccctcgcgctcgacccatctgggctggggcacgcggcgacactcactcgttggcccaagggaccccccggtctcgaaacgccgacaaaaatcaacatgaacataaaatcggtcgagtcgtcatgataatagaaattcgttgctttctagatcctgaaccatttggaccacttcatcttaatccgcacataatccccataatactcagcttcttcacacaaccagattctttctatagctagattctcagaaaagctggtcagaaaaaagctggaacaaacaggcacattattaagcacaatagcactcaagagtgaagcatggagacgactgaatataagcatatcataaaatattttattt

SEQ ID NO: 5559 - DNA, 3023 bp, Arabidopsis thaliana landsberg
cagtaaaaatgtggtgaatctaaaaaaaaacaaatatgtggtgatattctgtaatacgaattgtgacacaatatgattacttatgaccgataagtgtaaccgataaaatcactaccaagtattatattagaatgtagataatctcctctaaatttatattttttcagtgtcaatagaacttttcataataccactctcatcactttagtatgctaccaaagcttcattgttcttgatgttaaaggtattcttcgttttccgtataattctcgtttaaaatttaacttggtatgactttttctttttgaatttaatgttaaattatattcaaaaaaaatactgtttatacattggatgcaaacttttccaaaaccggatcataaaaatgtcctatctatttgatattgccttgaagcaaaccgcatttgagttccttgtgcatccttctcttcacctctcacccttatagtgcttagtcgatttcttatgtttttgtctattagcttgactatcttctccgtccttgagggtttctcttcatgtctcctctcatttctttctctccagattgagtgtatcgtgttttgaaaaacatacctaagaacaaatcttgtagtcacgccaagatttttacccgcaagctccttcatgatatcttaataacttagtatgtcttttgtgtactaagtcatttagttcttttctttttaaccataaatacttccaaattcaagtctctcatgatttatttttctcttttattattcttcttagccatattgctgttgtttctctataaaatgaaaagcatatgataaacaaacatatcttatctcaattgtaatgagttttatgattttaacatctaactattttctaatcattcaataatcaaaaacatatgacaagcaaacatatattagtttatttattatgtctatcttatgcatatttgatatctaattacgatattaaaaagaaatgttaaacatattaatacctccatattcgtggttaaatgactttgtactaaattatatggaaaggtgtggtgataaatgagtcttatttggtatatagtcaattcaaaaggcgtttcaataaataccattattagtgtcttatactactgtgtagtccttttcacgtgttttatatagtcttatatatgaagtgtttcttacacactcaaaggcaataagaaaaacctagctactagctataatgtcgaaccaaaacaagccacagccgccaaaacctctgatgaagcaacagtctttgccaccagacataaaccgcgaagaggcttggctgcgaatgaagaaaaagcatccatcggcccgtcttcatcgcagcaagagctgcgtcacaaacgacgatatcgaggagctcagaggctgcttcgacctagggtttgggtttgagcctgattctcttgactttaatccaagtctctccaaaacaatcccagctttggatttgtacagcgccattcacagacagtacagcaaccatttgtctcggacatggtcgtctacgtcggaacgtgacgtcaactctagcaccacgactatcgtcaacaaaggtactaatatttttacttttctttgtttgtttgattttactttggttttgacgatgaacttttgaaaagatgatgatggaaagacgatgaaaaagaagctgaaacaatgggctaaggtggtcgcatgttccgcgagcagtcctccggtaaaccaaattgatgaaagtgataatcttctaatttttttctagttatgtccgaagaatggcatttttgtaatataattgttaaaggctatttcaattaatgtttctgtatttgactgttagtcaagtgaggtttgtgaagtaacctaagtggatatgacaatgtctggtcaaacttaattggaaccgaagaaaccttaattatcgaatgtgatttcttatgatttaatttgtccattttgtttggagtatgacctgcgaatagtctgattttttattttattttctttgttcataatgatttttataaaataatctaaactttttcattatatcatatacatattgttttgtttaacattatgacagggtttataaaattttgtttaaaaatatatgacaagaaattaattcacacatacaatttctagttcacaaatcacaaatataatgaggattaacatacatgattaaaatcatattgtttgataattggtattagtgaaggattaccatatatcgctattatgtcaaataactattattaaaacttgatgatgttatttaaatgatatttattgtttaaatgtttaatttagtgattaacgagagtacatttttttttttataaattaataatattgggaacatgatatttattaacttatagagatatttgttttaatttttaaacaatgagttaaaaaaatttgatctaaataaacttatatttgaataaataatctaaataaaacattagattaacatatgaaaacaaaattatatttgtgaaataaacagaaggaggcatggggaagcaccatactcagcagtccgactaattgacgggattgacaagcagatcagaaatcggttcgcgacaatacgagtcaccggggaccaatgttaagacaaaagattacaaatatggttcaaatctagaacctatgattagaacttttttcttcatttttaaaacttttcaaacacacgatgcacatgttgtaaaaatattattttctccgaatataatttagttaacattattttcctgaaaaaaaaaaaaaccaaaattaagcccaactatacaatcgtaagaccaaacgaccaaatacataactatatcgtctaacaacaagtatataagatttgctatgagcagcttattctattttgcaattggacttctttaaaatgacattcatttcagattgtaaagagttggtattggattggatctaacaaaggacactaattggaccttcacggccttcctaagaagtaagaacggt

SEQ ID NO: 5560 - DNA, 3540 bp, Arabidopsis thaliana landsberg
cggtttcggtaataagcttttccaaaagcagtcattcccgtctgaagaatcagaaattccgctcgctgtgaagcttctaaagtagacttagcagagatccaacacaggttttctattccaaacatctcttcttcaactactctagctatacgacacaaacaaggggatgaagtaagcgacagagatttttgtgatctataacgaaaaagagaaagtgttgacaagtttggctttgcaacttacgagcacatgcacggattattgagttcacataatctgactttctcgcaaaaactcttcctgaagtttcagagtaacgcatatttggttggcttcgaatcgagtttatgtcagtctgcagagagaagcacatgatacaaaaaatggtcttagtaatgctataattcaaaataacacatgaaggaaactgcactcaagtttcttaataaacctcgctgattggacgatattgatctgggagataacaagcaagaacagcaacagctgcttctcggtaagccaatctcaacttcagttcctctggaacttcagtactatcttcttgtccagtctcaaatgtccctttttgctgtaaggagtggaatcagaatttgctaaagcagcacctaagcatggataaactggatatcaaacactagttacccgcttaagcgcctcaaggagttcttctcttccaatgtaatccaaatcttttctagctgtcaagattccagcttcatttctgtaaacaattaaccaaagatcagtgttttctgtttttttccctctgcatctaaatacatagttgaagctgtagcattgtatattacagaacgttttgcagttctgctccggtaaaatcttccgtgttctcggctacttcttgcagcaactcctccttctcatcctcagatcgaaagaatttatttctagcatgtacctttagttacaaacagaacttttcgttaaagcacaaagccaaccaaaactcgtcatatccagaaaagtaaaattaagtacctttaatatcgccaatctaccatcttttgacggtaaaccaactcttatgattttgtcaaaacgaccttttctcaatagagcaggatcaaggatatctaatctatttgttgcacctatgactaatacctgacaaaatccatgattactagcaagtattgtttattgaaaaaaaactatatagcaaagggaaacattacttgtgatgtagtaactttaaatccatccatctcagtcaatatttgaagcaaaccttgttctctctctgctcctccctattcagtgagtaacacatttctaaagaaagttaaatctcttatactaaaatctaatttccggaacaagaaagcattgcattcttaccccgccaatatcgggtccacctcgcttacttccaattgcatcaatctcatcaatgaagattatagatggcgcatatgaccgagagctagcaaaaagatctttaacacgagatgcagccactcctacaaacatctgagagatttaaacaaaaacaggaaaactccattaactcaagaccttaaaaaaccaagatatttagcactgttattcatgttgacacaatcaatcactcacctcaacaaagtcggttccatttgccgcgaagaaaggtaaaccagcttctccagcaatagctttggctaacaaagttttccccgttccgggaggtccatgaagcacaacacctttcggacaataaatgcctttattctgaaattcctcatcattctttaaaattcgcacaatttcttgtaattccctctttatatactcctgacccgcaaaatcatcaaaagtaacaccagttttctcctctgctgatataaattttgcccttacagagagaaccaaacataaacttagatccaacaaacttgagcagaagaggtcaatatcaaaggaagtcgagcatttctaaacataccgactcttgcctagggaaccgagtgcttggcgcttgaggggctgccttatctttttggtaggggttccgagatcacaagggattagtttggcatagattggcctcgtgatactgtcgatccaaacataaagcgaaacaaagagggcaagtctcatagcccaaaccacaaaagtgccaactgtagtatagacttcagctggaaccacatctacattgaaagcctctacgtttactatctgctgatgcaacttcttccatacatcattccaaccatcaattggcattcggtccacaatgtgacgacggaaaattatctcctttttcgaatcttcttcttctcctaggggctccccatctttataataaggcaatatcactgcaacaacaacaaaacttaggcaaaagatttcaagaacaccatgtctagatttcaagcagttagatgcaatgtatcgaaactttttgaaacttctcacctgatatcgtctgtccgtaatttgaatattccatgtattgaacactgttggaatctaagagcttcataaaatcactaaaattgatacggtgagaggtttcaggatcccattctgttccttttaacttgccacgcatggttaacaatgttctactccaatctgatgccataacaagctgcctttctaattgtacattagcctttctctcgagctcttccatgttgctaagtcgttctctttcagtttctcgtaacttctacaaaaaccaaaagataaaacgaattaaagctttgaaaactccattaaacaaaatgaggaataagtatatcaattaagctacaaccaaaaaatgtttcaagtattgaatgcaaacataacctcttcaacagaaactacacaagtatacgatcaaagtccgaaactgagtatcacttattagcttgcaagttcttcactttgcattctagaaacgaaagccctagaattggataattctagctataatttgaaatagagataaacctcaaatagacgattggactcagcatcttcttcctgtgaaactgaagactcagtagactcaaagctcgatgtactgcaacaagtaatcaaaccatttcttcgtgaaggaaaaagattgaatttggagcttaatttagcttccgttggttttcttcgacggacgaaactagacagagaacctcgaaattgactggggaagagggtattagaagggtttaagggtttcgagaaatgggttggagttaacgagctcgagatataaaacgtcattgttcagtcattagattagagctgggaaaaatttcccctcgatttctaagtgcaaagagaaacgatagcaacaaactttctagaggtgaaatttgaagctggtgggttcttcacgaagattgaaaaagacgatcgaaacggtgcgtttttaacagtttctcaaacgcgccgttttaagagattaccggttctattgtaaccggacatcaccggttgactttcaaatgtgctaattatgaagataccgaaccggtgaagctctttctcaatccataaaggaaactctttcaatatgtatcattatatatt

SEQ ID NO: 5561 - DNA, 2559 bp, Arabidopsis thaliana landsberg
gatttttgtttcatacaaatgcttttggtatttcaaacaacaatttctttcatttcttatgagccacgtttattcttatatttctgaattaattatattagtaagttatgttgcattatcaattataactatagttgtatatatatttgataaaaagaagaaaagaatcgatgctaatgatacgtagcaccgatgctctccgtaatacacagtcctaaaaaatcaactcaattaagtcagtaatacacactcctattaatctgttcattgtgatttatgttgactaaccttcgtgtcttgtgatctcccatgtcattccacccatcaaaagatataactctagacatatatgtcttggagaagacaacatttgcataagatctccatgcttcctttaatcttgcaattcacgaaaatgaatcccgttcgttcaattgatgacttttacatgtatttattatgagagttggtatcttgtacaatgatcaagatgcttttaacactcatcttaagtttttatttttgttatattctaataaaatatttaaataaaagcacacattgtgtttttaagtatttgtttttcaataaactttgtttgaaaaaatctcatttaaaaacctacattattaccaaactatacaaaactaaaaaaaaatctaattatgtcacttgaatcagtctatggtagaacacgactatgccactccacatggtgtaaatgttcataacttatattaaaaaagcagaaaaatgcttaacatttgctcaaaaaatgatgaaacactaggatatgacccgcggtacaccgcgggttaagtaatttaacatattttgtttttacaatctagatgatgaatgtaatgtctattttgttatgtatatttgtacggtaacgtaacttagcatttttttgcttcaagttgtgatattgtaaagataacaaacatatgtttttgatatttgctctgattaataacactttgttactatatctatggctaaaagatattatgtattgctcgctgcctagtaagtgttaatcaagtttatgttatgatagtaaaatagattgttggaacttaagacattgttaaatatgtttgtgtggtgggctaataattataatgaagaataaaacccaataaagcgggttactccgacggatatcaaggagatctagccggttatgatagccccaatcatggaaacatcggtggctatcaaggaatcctgccagtccgtcggttatcaaggaaatcctgccgactccggcggtaaagaaattctcctggttctggcggttatcaaggaattggtaatgtaaactccggtggttatcaagtgaatcaaaacagttataaaaactccggtggttactatcaaggaaatcaagcgactaatgggaattctggtggttacagtccttatcaaggaactcaaggtggctatagtttccccaaccatggggttatggagtaaacgccaatcaaagcggtgcctacaatgaatgtctccaaatcaagaatgaagaggactaggtgttggtggcggtggacagcggtactcggagatcctctctaataatggttttgtgttgtaagaatattatgagaagcagttgagtctatctatttaaagatttgatatatatacatataaaattatgtattctaagtgacaactaatatgcatgagtaagaacaattgtacaatccttgcacaactattgatcacatcattcataaactgttttacatatacatattatgacgatcatattagtcttgataccataaaagctacgatgataaaactagagttataaaccgtttttttagttttttttttccaattcatgtttgataaataagctaaaataaccaaaaagatattaatattagaattttattacttcaatgaaaatatattgaaaatagtggatgatggtatatagtatatacatcggaaaacaaagaggagatgtagatattttgaagcaagttttgggatagtaacaaaagactaactacgccaaaaaatatattttggttactcttttcatttctagctcaaaatatgtcaaatattttagttttcaagaattgtgtaattgtactagtcatacgtgatttatttgaggatttggactaggctaatcgactcttgtccactgatcgtaaacatttatcagttgtcaatttaacattttgttatctatatgaactatatttgttaatttacgcccaaaaaatcaacaaatgctaattaccgcctcaagattagaaattttgtatgaaaagtatatgttataattgacggaagtttatctattgatttatcattgattcacttcaacgaatatttaatatctcatatttgttatgttagatgtgtaaggagaaaaaaaaattatttaaatgaattgtcaacttttaatgtaaaaaataaatattctttatcgttttgaccatttgtattatatatgcagattattctatcattaaatatattgcaaatgatgttaaaaacgaaaaatttaatgatttcttaacttta

SEQ ID NO: 5562 - DNA, 2599 bp, Arabidopsis thaliana landsberg
  unsure (1)..(2599): unsure at all n locations
aacttatgcgttcattatgcatgataactaacatattaggtccaaatataaaaaataatgtgagcatctaatcagtttatgaacttctaatacgttgttaagctaataaacaagaaaacaaaaggtcacggtcacgtatacgtgcaccacgtgtaagtgtacatttttggctctttaaagtttagatagggcttagaaaaactagagttgtttattttatttatatagaagacacgagaaatgctgtagaagtggtcttgtcttatgggttattaacttattaaaaatatcactcactttttttgtccaacacaaaagtttatatatgtgatttccttatcaatcattgattcgagaaatttcaacaaatctctataatacagtacatgttgagtctactttataagatgttaaattatttctaatgaatataataatgtagaagacggtttttgttttggaacaaaagttacttttcttcatatgaattaaatgttcaaattattttatgattgtttcctgtaatttgatgggtgtgtgttttcaccgtaattgtttggtttagaaatcttaaaatatgtcagtattatcactacaagaaaacagacaaacaacgactacagaaagcgnnnnnnnnnnnnnnnnnnnnnnnnnnnnnnnnngtcacgaccgttttacgacgcatatacgacaacatgagcattagtagtcaattagtcgttattttacgactaaatatgttagtcggcaaatactcgtatagtaacgacaatttaacgattatattatagaagaaaaacgtttgtcgttacatagtcgcaaatggacgactacagtttccgactgcgtaagttagtcgcccaatcggcgactaaaatacgacacatatctgtaatcgtaaactagtcgcaactgagtcgcagaatagtcgcattaagttgttggaaaacgttttccgcattgccaagtaggtacacctaatttgtttgttgtagtcgtaaattagtcataaaaattcgtctatataatcaaattcacgacactcttctttcgcaaacaaatcaaaacaacaatcaaaagaaaaaaaaagaaaacaatagaaatttagtttattctataatggcgggaaactacaattatggcggtagtggcggtttctatcgagattggatgtacaagagattcgatgaagtgacggggaatttgtcagccgaatacgtcgcaggagttgaggaattcatgacattcgctaatagtcagcctatagtacagagttgtcgaggtaaatttcattgtccttgtagtgtatgcaagaatgaaaaacacatcatctcgggtagaagagttagtagtcatttgtttagtcaaggatttatgcctgattattatgtttggtataagcatggagaagaattgaatatggatatcggaactagttacacggataggacgtattttagtgagaatcatgaagaagtgggtaatgttgtagaagatccatatgtggatatggtgaacgatgcatttaattttaacgtggggtatgatgataacgtgggtcatgatgataactatcatcatgatggtagttatcagaatgtggaagagccggtccgtaaccattcaaataagttctacgacttgttagaaggtgcaaataatccattgtacgatggttgtcgtgaagggcagtcgcagttatcattagcatctcgactccgtttgcgagatgtttacagattttttaccagaaggaaaccaggctaccacttcacattaccagaccgagaagttgatgcgcaatttaggacttccatatcatacgattgatgtttgcaaaaacaattgtatgttatttaggaaagaagacgaaaaagaagatcaatgtcgattttgtggcacacaaagatggaagcctaaggacgaccgtcgaagaaccaaagtaccatatagtcgtatgtggtatctacctattgcaggccggttgaagagaatgtatcagagccataagacagctgcggctatgcgatggcatgctgagcaccaatcaaaggagggagaaatgaatcatccttcagatgcggcagagtggagatatttcccagagttacatccccggtttgctgaagaaccccgtaacgtttatctcgggttgtgtactgatgggttcaatccatttggcatgtctcgtaatcattcgttgtggcctgtgatcctaactccatataatttaccccctggtatgtgcatgaatacagagtacttatttcttaccattctgaattctggaccaaatcatcctcgagctagtcttgatgtcttcctccaacctcttattgaggagctaaaagagttgtggtgtactcgagtcgatgcgtacgatgtttcattgagtcagaattttaatctaaaagcagtactactctggacgattagcgactttcccgcgtatagcatgttatcaggatggactactcatggtaaattatcttgtccagtttgcatggaaagtacaaagtctttttataaacccaatggacggaagacatgttggtttgattgtcaccgtagatttcttcctcatggtcaaccatctcgt

SEQ ID NO: 5563 - DNA, 530 bp, Arabidopsis thaliana landsberg
tagcaaataacaaaccaatcaatctttctaagtgatttagacttgacaccgtttatggttaaacttgggcaagatcaacccgtctcttccaaccacgatgttgcaattagcgtgcatcctatgatgcttactgatccacctatggagtttaaaccgaatagtcgaaactatatcgagcctgaaacccacggttccttgagcccgatcattactaaactcggtccagcggttactgtttaccgttaaggaagctcctgtaagcgtcccggtcacaattgttgtgttagtcggttgctggaaaaacgggtttagcaatgggatcaatccgacccgttgatctttgtagtaaatggaaccttccatggaatcaaagtaaacacccatatgttggttagggttaagtatggttacattgaaagcaattcttgcgttttcgactccggtaggctggtctagaccttgtaccacgaagtcttggatatggaacccaggtctatgagggcgtaaactgagccaaagtatgaaagcaa

SEQ ID NO: 5564 - DNA, 3014 bp, Arabidopsis thaliana landsberg
caacacgtggcgtgtccggacgcagtgtgatggggtaatttaccacttacgttgtcgatttgtctcaatccattccatggaaatgggaactcgggggtggttattaaatgctcccaccaatacattctctttcctttcaccaaaaccaataatacaaacaattttgtttttctcattcaagattttcaaagtacaatcatttctttaggtactttctcttgtaataaggcttcaaatatgttattcaaaaattattttggtcattttaaattcctattatagccttacaaaaatgtgttatattatttggaccacaacataatttaaacattcctcttgaagaaaattggtcacttcaaaaaagaacaaaattcactttgacctcatggtttacttatatttacatatatggcccaaaaccaaaatacgaaaaaggttttagctttacgttcttttgattcctaggtcgtcgtttaaccacgttgcttgcgtggaaagagaagagaagtgaagattatcaaaaagcgaaaaataaaaccctcactgtgaagtaaaaatcgtaggcccaaaatagatttctcttagccgagaatttaatttttatgaatctgattattgcttttctacgaactcagtttttgcgatgtgtggttctcaaaaaaggatcgtttcttcggtgcctcttagtctctcaagtacttcttcttcttcttatcttcttcttcgcttttcttttatatatagagagagtttagtggtcaagaagcttcctcgtgtttgtctctttatgtaatcaaaggttgcatttttattcgaatatattttctggttttggtgttttctgtcaaagggtcttttaaaaatcttaactttcgttctaaatttctttactttatttcgattctaacttagggcttttgggctgggatcatgaaatgaagtattgcagaatccagaggagtttgtttggtaatcaatgaagggttcttcagaatctagttccagaggattaaacaacacctctggtgtttcagagttttgtacagatggttctaagtctttgtctcacattgattatgtcagaagcttacttggttcacataaagaagctaacttgggaggacttgatgatgactctattgtcagagctttggaatgtgaggatgttagcttgcgtcagtggttagacaatccagaccgatccgttgatgcctttgagtgttttcatgttttcagacagattgttgagattgttaatgcagctcactctcaaggcattgttgttcataatgttaggccttcttgtttcgttatgtcttcgtttaacaatgtttcgtttatcgaatccgcttcttgttcggattccgggtctgatgaggatgcaacaacaaagtctcgagagattggtagctcgagacaagaggagattctatcagagagacgaagcaaacaacaagaggaagtaaagaagcaacctttccctatgaaacagatattagcaatggagatgagttggtatacaagtcatgaagaagataatggttctctgtgtaattgtgcttctgatatttaccgtcttggtgttcttctctttgaggtttgtgcgtaagaagatttgatttttgttcttaactgctttgttttcttgagaaaactgatttgatgaatgttagtctttgtgcagctattctgccctgtctcctcaagagaagagaagtcaagaactatgtctagtttaagacatcgtgttcttccccctcagatattactcaattggcctaaagaagcttccttttgcttgtggttactgcatcctgagcctagctgtcgaccatcgatgaggtgatgattgattctctctttgatgtttttagtttcaattggaaaagttttgtcctttaattaagagtattgtctcctttgtctttacttttgcagtgagttgctacaaagtgagtttatcaacgaacctacagagaatttggaagaacgtgaagctgcaatggagctacgggatagaatcgaggaacaagagttattactcgagttcttgtttctgattcaacagaggaaacaagaagctgcagacaaattgcaggatacaatatcgcttctctcttctgatatcgatcaagtcgtaaagcgacagttggttttacagcaaaaagggagagatgtccgttcgttcttagcctcaagaaaacggattagacaaggagctgagaccactgcagcagaggaagaaaatgatgataatagcattgatgaggaatctaagcttgatgatactctagaaagtacacttcttgaaagctctagattaatgagaaatttgaagaaactggaatcagtctactttgcaacacgatacagacaaatcaaggctgctactgctgctgaaaaaccgttggctagatattattcggcattgagttgtaacggtagaagttcagaaaagagttcaatgagccaaccatcaaaagatcctatcaatgattctagacaaggcgggtggatcgatccattcctcgagggtttgtgcaagtatttgtcttttagtaagctaagagtgaaagcagatttgaagcaaggagacttgttgaactcgtctaaccttgtttgcgcaattgggtttgatcgtgatggagagtttttcgccacggcaggcgtcaacaaaaagatcaagatattcgaatgcgagtcgataataaaagatggccgggacattcattaccctgttgtggaacttgctagccggtctaagcttagtggtatatgttggaacagttacattaagagccaagtcgcatcaagtaactttgaaggcgtggttcaagtaagttcagaagaaaactctcaaccttattaatcaatgaaaagtatgaaaaaaaatcttataactaaggctaatattttcataggtttgggatgttgcaagaaaccagttggttacagagatgaaggagcatgagaagcgtgtatggtccatcgattattcatcagcagatccaaca

SEQ ID NO: 5565 - DNA, 3378 bp, Arabidopsis thaliana landsberg
  unsure (1)..(3378): unsure at all n locations
tagttattaggtattaaaaaaaaacacgttacaatggagggtggaaactattttggagactgtatgcatcttaaaagtgttgtcacctttcttagaaatttacaagatggttcgttaaacaaataaaagagcatggttgttttaatgattcaagataagacaatcaaatagagatcacactattcataatgttcgcgtgtacggcttccactcttacccgaatcttccctcttgcatgttgcctcctttctttaaagaaaccaccaattatcaattatcaaaagagtgtgtggattaagatttaggatcgagtttaaccatttacaaaaatccttgtggttctctttgattttgttgtttgggtttgacataagacaattattgggttttattgggccaacgaaattggaaggtgaagaagaacaaaagtgtgggcaaaagtttgtggacctatttatgtcatttttatatgcattacaacgtacaacgtagtggaggtaggtgaaaaaagaatctaaagagagttctagagaagagagataaaggagcttcctaagcaagctttcttcttcctctttgttgttcttgaatctttgttcttcttgagtgcaaatctgtaaaaccaaaagacatcatcacaagttagtggtgtgtttgtaatccctttgatatagtgaagctttggagcaagagatctcccccgagacgtagcggttgaggccgtgaactcggttaccaattatctgtgtctctttatttcatttaacaagcaatctctatcacttttttctccacagatttactattagacgttttaaaaaaaaaaacttgcttttctacatgtcttcagaattagtctttgttttgttctaagattttacccgatgataatataaaattaaatatgaatgttcttgttttaccaaaaatcagatcacatttctaaaaattgttacgaattgtctaacaaatattttatttaccagagattccaatccctgattttgattccactctataggttattcagatttacaatgagttcactttcatgtgccccgtttccaagcctttctccaggttagtacagctgatattgttcataatttatagtttagtgccattcgttatatgtagctgcctccgtacccgtctctttgggtttagttgcttttgttgagtacactttgcccaagatttactgtaattatcaatcatatattagctgacatcnccatatgtaattgacctcatttttagttatacacatnatgtttgggtttacaaagttgtggttattagggtttagtaccatttgttgcgtctcggtttgtctaagctttttcccttcgtctattggtatcatatcttatcagttttgccatctattacaaagttgtgtgcacaagagttattgtcattgtcaatcatatataagctgccatcccatgtgtaattgacctcatttttgttataaacatctgtttgggtttacaaagttgtggtgattagggtttagtaccatttgttgcgtctttgtttgtctacgcttcgtttcttggtatcgtatcttttcaattctaccatctattgtgtactcacagctgttgtacacacctactagggtttacaaggttgtggaaattagggtttagtgccattttcataaggcaaaccctttgacttgtttgcatttttgtagtttaaattgtattctaatatatcctgtttgcgttttttcttctctagttgtaagagtcctacctgatagaattttccgatctgactgctatccaggttatgtagtccgcattaactcatactcaaaaccaaagtaccttcttaaagttttaaaggtcctagatggtatgcgtgagttggagaccttgttggatcgccacttggggctcttttctctctctttgtccgccaatgttctttgtctagtcagttagtccatcagatgctctgtaggcagctgaataccactaattctgaggcactgtggtttgtttttgctggtcagcctgtgaagttttcacttacagaattttatggagtgactagattagactgttctcctttacttgcagagcgtgaacttgctgctgcaacaactcatgttgaaggttctgccccttatttgtattctctaattggtagaacactaggttcgtgactgttaaggagcttctaaggcgtttgaagtctgaacctgctatggcgagttggcgcaagtttaggcttgctcttgttgtcagtgtagatggtatcttgctttctcgtacacatccagttaaggcatcccctgaagttgttgagatggtcaaagatgttgagttctttctgagatacccatggggtcgccatgctttccatcggatgctccgcatggtaaaagtaggatcatatattgaagatacctcatctcttgttggcaagctgaaacaatcctctcttgctgtccatggtttctccctctctattcagttgtttgcttttaagaccatccctgtgctgcttacacttctccgtaatggtgacgagaaggaaaccttccttgatcaaaccattccatgtctcccaaagtgcaagacatatcatacttcaaacatcatgtctctagaaaaacaaatttatgtgagctctccctccttcatatctttgtgttgtactttctttcttcttcttataccttcttctattatctatattttctagctacaagttttcctagctacaagttttacatattgcgatccaaaggttcagcatttagagagtcttcttgcatcatcttttcagttcacaaaaactgattggcttggtggtgatgcttcacttccgtctatacactcttctcggaaatgtaaatctcgatctatgaactctggcagttcaagttctagtcctcaaaatcggaagacaaattctaagcgctgtacacatggtacttcagccaacaatcttcgagatgctgagacgactcttgataaacgactaaaaagcttcaaggcatctatactagacgaggttcgccacctcatcaatcacaaccatcaaaataccgtcggtgttgacgcatctgtcaaacccctttctccaagttctccacctacttctattattccttccctgcgcacacgttcaggatatgctggagtgtttgcggattctttctctacgcgttctgccgccaacacgagatgctcaacccattacggtaaacaataagctctgtctgatcctgctggagattccctgccatacggtcagctcgcatgtaagaggacaatacgaaactgtggaaccctttaaggcttgttgatctaaatttccactttttttaacaatcatggtaccccccttaagggaatc

SEQ ID NO: 5566 - DNA, 1984 bp, Arabidopsis thaliana landsberg
gcaccgctcaaatctaccattttcgaatgatcaatgcttatttttggtaatataattccagtatgtttgattataatttatttgattttgtgtgaatatcaatatcacttttcataataaaccgataagttaggtaaaaagttcacgagtttattgtaaaaagaaaagatagaaatatttaggtgatatacccataacctactctcttgtttttagccataccataacctacttcatattcgtgatatgttttttctttttcagtcgtgataaaaagaagtcaataagagctgaaattaaatctcaaaaataggtttaaggcattaaattacttttttcagttcagtctagtgttgggccaatcagataagactagtgttgggccgaaatttatttgacatgttacttctttactcagaatttgtatttgtttcatatttatagacttttttttttgtttttacattacaaactttactatatcagaaattcaatgaacacacaacaacaaaaataaaataaaaaaatcaatgaacaaacagagaaagaaaaaagcttatttcgagtttcttttcaagattctcttaaaatctcacacactaagaatcttaagggttaaacttgactgattcacgatatataagctccttgatgttctcttccgtcaatgaaggttgctcgaaatcaaaatggaacggtctcacacacacaggttcctcgttatattcgtgtagcggtgctaagtaagggtggcacaaggcttcatcgactgcaactcaaaacaagctcaaaagtattataaaaagaaaaaatcaaaagagaatgcaacatatataggttttcgtctgctttacctgtaatgcgtctgtttgggtcaaagacgagcattttctgcagcaaatcaacagcattgaccgacatgtttgggaatctagcggcaaagttttgtcttggatactgtggaagctgtcttacgtatcttctagcgttgtcgcttcttaagaatcctaggcttgaatcatctggtgagcctataagctgtgtatgaaaaagataaaccatacatgagtttgttcattaaactacaaacaacaaaaacagaaccaaaacagaacaaacgtagcaacaggatagttcaatgttctttcttcaaattgaaacgaaataatatagtcaagtgaaaaagtgaaaagtttacctcagtgatgagtctaagctgctgaacataatctctgcccggaaataacggctcccgcgtcattatttcaccgagtatacaaccgacagaccaaatgtcgatagctgcagtgtattctgagcaattaaggagcaactctggagctcggtaccaacgtgtaacaacatattctgtcatgaagtctgtctctgatttagtcctcgcaagcccaaaatccccaatcttgaggtcacagtttgcattcaggagcaagttactcggttttaaatcacgatgcagtacattggctgaatgcacatacttgaggcctcgcaacaactgatacaggaagaactgcaaaaacataaaatttatggttatacatcaaaccccaacttcatagccttcgaaccaaaaagattctgattataaactttgacctaaacagaagatacttgagctataagaagcacaggagaggttaatgcgtacccgtgaatgatcatcagttaacggttggttagagcggataatgtggtgaagatcagtgtccattaactcatagacaatgtgaacatcattgaagttgtctggctgaggtggtcttattatgtctataatggcaatgacctgtgagataaactccagaatcaggataattactagaaaacatgtggagaataataaataaaataagacaaaagcttacattgtcatgatccatatgcttaagaagcttaatctctctcaaagttctcttagcgtcgataatgttgccaaatgcattaccaatctttttgatcgctg

SEQ ID NO: 5567 - DNA, 650 bp, Arabidopsis thaliana landsberg
gcgctggtatactaggaactgtaacaggaagacaagtaaatagaataaagatcaaatcagagagttccatgactttacaaatgattagaacaacacagagacttacacggcattgatcactggtcagtgtttggttagaacggaggattcgctgaagatcagtgtccattaactcatagacaatgtagacatcattgaagatatctcgttgcggaggtcttacaatatctttgatggttataacctaaagaatcaaaccgaggcttgaagattagagtaagcgaaattatatataaagagcatttgaccctgaagatcaggaacacttgatagatctagcaaatttgagaaacttaaaagatgttttcaaatgtgagaaatgatgcttaaggcttacgttctcatgatccatatgcctgagaagtttaatttcacgtagcgttctcttagcatcgatgatgttatcaaaagcattaccgatcttcttaatagccactttctctccagtcactgagttcaccgcagcactgaaattcaagaatcaagagcctgtgaacattcaatagaaggaacgctttcataatttatcagacaaagaatcaaaagaacttaccagacaataccgtaagcgccttttccaatgggacgaa

SEQ ID NO: 5568 - DNA, 3705 bp, Arabidopsis thaliana landsberg
ttaaaacatcctcccaggctcgttttttcaccttccatgaagaatagaatcataagcgtgtaaggaattagaataagaagacgaattccatacatcttggaacgtgggatgttgctgcctgcttccctcaccaggttccaacaagtaagagctcttcactctctccaacaagcttatttccctttcaccaccatcctccactaatctcccttgttccaatatctgcaccacttgtctcatcttcggacgcactctcggatcaggatgcacacacaacagtcctattctcagagccatctccacttcctcgaccacgaacactccattcgcctttattctctcgtctaaaccatcaaccactttgtctttctccattagtccccatatccattccactatcccttctcttccttcctctattggcctccttccacacactacctccaacacaaacactccaaagctatacacatcggtttgcgctgatgctctccctgtcttaaccaactcaggcgccatataacccgctgttccaacaacatgtgtcgtgctaaccatctctttactagtgttctgcaacttagccaacccaaaatcacctaccctcgcgttcatatccttgtcaagcaacacattgcttgactttatatctctatgtaacacctttgtctcccacccttcgtgtagatacaacatccctgaggctaggtctcttatcactctcattctttcctcccaattcaacatctcgttacaatcaaatatccgcttatcgacacttccattctccatatactcgtaaatcaatatcagactctctcctcctttcttagaccaaccttttagtccaactatattcttgtgtctcaacctccctaagctcgagacctcagctaagaactcactcgtcgcgccaacgctctctcgaggactcatcattattctcttaaccgcaacttctttaccttccaacactcccctgtacactttagaattccctccgtatccgatcatgttctcatcggaaaacccttttgttgcttccaaaacatctttgtattgcactctgtgaggccaatactctgtttcccaatcttccacgtctccttctagtctctgccttcgacgccttacaacgtagaaacagaggagcccaataacagagactaacaacacaacaccactagagaccccagcaatgaagcctttagacttcaaaacagagtcacctgacaatttaaacgaaggtagattcctagtgatcaaagcatcaccaatggagaaattggagttactaaaactccatgagagaatcctatggctctgcactagttgtcctgtggaggcagtgaatccaacgaacatatcatcaagtaagactccagtgagatttaatggaatgcttatgagtggtcttatgggctttctagagctagctctagccatcgtgacattgatcgctgacccattaaactcgatccacgcctgataattctcgccactgttaagcttcagctccgtgaatctctggccgtctctgcctccatagaaacctgcagtttcagatgcaacggaagtgagagaattgacgtcgacgccgacgtggttgtcgttgatgtcgttgaactcttggttagcgaaaacatcgaattcaacggcgaagattcggctattggggtcaccgttattggtgaagttgaagaggccgagatgctgagatgagcttgcggcggaggtttcggagaaaggaaggaagacgaaggcgaagccgtggccaggagagaggtgtttaaaaggagccatggagaagatgaatgatgtggcgaaaggtaacggcgaggcagaggaggaggaggcgttgattcttgaagggtagaggccacgtccgatggagaaagtggtttggttggtgagggtgaggatcgacggtggagatttaacagtggcgttgccgaggagaagtgtgttggttgtggtgaaattggagttgtagatgaattcgatgcctgtggttgatcggaacaagagtagggatgcgagggaaaagagaagaatggaaactttagagaacatggtgactgagagaggttttttcgtagacgtgtgccgttgtgaagttttatgggaagaagaagaagagctttgtcaaaagagatttgattggtttgttctcgattcaacgaaccgattgttcaaatatattgtctgaaactggaaagatctgttccagagtcaaaattattaaggagataatgttgtttaatgtatatatgctaattatatgtgttagaaatctgtttgaacaacaaatgtggacgaaataatatccgccgtgataatttgatctctcgtttatttattttcctaagcatttggaattttgtttttgtatatttcttgatccaagccacttggaattaatcgtgaaattgttggacttggtatttcgctgtccacatttataggtgtgaataatgatgaacttattcgtcaaaaaagtcagctttgaaatgtcaaatattcatcttcttcttgattctcctctttaattctttcaaacatatcgcacataactcaaattattcgtcacctgtaagcatcatagtattaataggacctagtatatattaatcctaaaatcatcatgtcaaatgcctaacagtaactacttttttggtaggttcattgttcaattcaaaaacattgaagttgatattctcttattactatgtgcaacagtgcaagtattactaatcaatcactaatcactttggtttatgaaacggtgcgtttgggagatgttgacagtgtgcaacattgcaaatattgttttactatttaccataactttaccaaaccagacaccgaatgttacctcccttttacactaggttagaactctcattctttatgtctctctctcattgttacactctctgtttttgttattgtttagagagaaacacaagaaacgattttttcttttttttcttttagttgtctacattgtactaatggatcacaaggataactctacaagacacaatacacatacttatagtggtatttcaccacaagatacacattcacacacttaacattctagctttaaaactactcccacttagacatgattattcctaaggactagactaaaaccacaagtaacgttaaactactaaaccttacaccacaactcctcttaacaactactctttagctactctagcttagcttaattataagcacaccatatgcacataatctgggctcaactctaataatagcccatttactaaccaaaacacacaattactaatttactatgtgggcttcactctagcccaatagcctcatctttgactttctcatctcttctgttgactcttcttcttcgacaacttcttcttctctttttgctttgcttttggttcttctcttttcttcatcttcttcccacttgaagcttttctctttttcaggtttaatcaaagtttcaattccaacacagaatcataagaaaatctggtgttctcaaatatggcggataaggaagaacaagagacgatgacctcgtacaagctgtttttgagagtcataagcaagagaagaacatgggtctgtctgtttcttgtagtttacgcggtccttttgtcttcttcaagaaattcgttgaattcgatagtgaattggtacggagagaat

SEQ ID NO: 5569 - DNA, 1004 bp, Arabidopsis thaliana landsberg
aaacagatatattgtgaatgtgacgacgaagaagttgaaattttgtgtaaggagtaagtgcatgtgatgaggtatggtccaagctgaagttgggtaagtaaaaaagcttcataggtgatgagttgcaccaattcttcagaatacaacattaataacaagtgtaagaaggtactcaatctaagtcaatgcatagttttcaaagtaataatgatgcatatttgacaaaaagatactccaatgctcttgatccacaatgagtaattgagtataattctcaaacatctttaagtattgttactttgaattggtttgctttgtcttcagatattattgaatgacattggttggtagttcaaaagaataattggtctgcttgaatgtttcccctttagatatactatataataataaaattataatggtccaaaattagcagttatagcttataggcagcttttatctctcttttttctttccttaacactagtaaattggatcgcaagatcttagattgctaataaccaactttacactttgcattatacaaaattagctatttccaaaatacccaaaaaaacttgatacattgttccttacataataaattgactttttgggtgttaacttttaagaaaaacagtgtaagtattacacaaattaatcactaatcactttggtttatgaaacggttagtttggtaggtgagccaaaagtgaaactagaaaaaatggaaacagagctctccaactgtcagtttgcaggaaaaggcaaagactttaactggaccgttaataaaagaggcacgtgacaaacacagcctaatcagcaagagcgtgtacttcacgttacatcagattcgactaggcttaagtataaactaaaaagaacgtacgatcactttccttttctcacaattcttcaccgcaaacactcacaacaaaaaaggaatcagaagaagaaagaagcttgtacaaaagaaggctcttttactatataccataact

SEQ ID NO: 5570 - DNA, 1186 bp, Arabidopsis thaliana landsberg
aataatctcgaggaaatagagttccaagtttttttcaacgattcttcaaacaacgatttcaacactctcttcaagacacttcctccagctagaaaatattttgtaactggagttccagcttctttctttggccgtgttctccctaggagcagtctccatgtcggagtttcttcttactcgctccatttcttatccaagattcccaaaaaaattaaatactgcgattctcatgcgtggaataaggacatacactgcaccggattctcaaaagaagttgtgagagcatatcttgatcaatacaaggtcgacatggagagtttcttgactgctagagctcaagagctcgtctccggtggattgctatttcttcttggatcatgtctaccaaatggagttcaaatgtcagaaacattgaatggaatgatgatagattgcattggatcttctcttaatgacatagctaaacaggtaaaataataaacaacttacatatgatattatgagtaataatagtcgttactaacatagttgactttgatttgataacgacttttaaccaaaaaagggaatgattgatcaagaaaagcttgagactttcaaattgcctatctatgttgcatacacgggtgtaataaaacaaatcatcgaggaaaatgtgtattacacgacagaaaggttcgatataatcagccacgaaaacgaggagattccattagaccccgagtttttgacggtctcgtttaaggtcactgttggaggaattgtagcttcacaatttggtcaacatgtcatggagaaaacatttgaagttgtcaagacaaagacacaagaaatgcttcctcaacttgttaatgccaaacccggaatgcaataccttatcgtgcttaaaagaatttgatttgtctcaagatcattacagtgatgtatgtttttatttaagggatgtacttaaaaaacgtaaccaaattaatcttcaacgattctttatattgatattttatacaagacaacacaaaattggctaatgtcctaattatttcacaacttgatgctaattctctccgacatcctcataacatccgagtaaattctatcgccaccaatctcctggcctgaagctccggcagctatcctcaaaacatcttcaatgagtccaacattacccattatgtctacatgagctccg

SEQ ID NO: 5571 - DNA, 4243 bp, Arabidopsis thaliana landsberg
  unsure (1)..(4243): unsure at all n locations
gcactagccttaaccaaagctttatatcatttttcgtgaattttggctcaagcataaaaattcttttgaaatatttttctttgttaagaatgtacaatttgcgtatttgaatatagtaggacagaaacgaaaacattaacataatcacaacgctacacgtcctagcctatacaaatgtttaacagataaaataaataaaaatccgttttaaacaaaacaaaagagtacatttctttttattttatccaaaaactgattcaaaaatcatacaaaaattatattgtagattaattatgactgttgttataattatgcagaacacacatcaaatgacgttgctctttaattgttttgtatatcagttttatcaaaccttcttaagtctgctctagttttaaaagtaattattagaaaaagaagaaaagagtgaagaaaaaagctattgtttctttattaataattttaaagagtactgaggggtccttattacaaataacagagcattgagtggtaacgaagttttggtccctattcacatgtgtagatataacagataccaaaacaaactctaatgtaacatgctaaaaataagagaattagaaagtaaaaaaaacaaaaaaattgaaaacttgtgtcctgccgcattaacaaaagagtcttcaagtcctaagaaaaggatatagctcatacctaagattacagcttgtacccaaaaatctcgctcctcgtttaccgtcgcagcacttagaaagctccttgaaactccattccaaacaagacttacagtccgctaggtctttcgcacactgcaccatcgcatgcagtttttccctcccgattctcatctctcccgccgcataatataacaactcgacgccgtccatgtcgggtttatcagctttcacaatcagctgttggaggaaatcatttgtcttcttgctgaacatctttgtatcccccctcacattgtttgggttgtgcatagcaaaagtatccttgtaattgatcttccttggggctaggtcattgatcatactaacatcgagaaaacattggtcgtaccatattattccacctttgtttcttggacatctcttacgaaactgttaaatacatatacttacatgttaatgttaaggtatatttcaaatgataattaaattctttcatgcaaaaatgttgaagaggcattacttaccccggccagagcggtgtcatagcaggttcgacagttagacttgtaagagtcaccacgacactggaatatgatggtgacagatttggtatctctactattggaccggtgtgtgaaaccatctgtaaagtcaagggtagcaactctacggctgagagtgttgagttctttctcgtactcacttcctggttggtattttccttgatcaacgcgacatttgtggttcagatactcattagtaagattcaaggaagacgcacagcttatgaggacttgtatagccaatatatggaaagaaacgaggcatttccatagagaatatgaagagaacattgttttggtttatttattctttttctagaggagaataaggattttagctaattcgtctcagtagtaactaaattaactatttttctctaactcaaagctatatattcttttgatcatttcagtttgtagaaggaattttgtctataacagagaggacagagatgagttgggaattttcggcgagggatggggagagcctatgaaaaagtcaaagttcaatttttttttttttggtaaaagccaaagttcattttttttttttggtagaaggttaaattgtcaaagttcaaatttatactaatttatcaatcgttgaaaatagaatcaccattaggatgtttctattagatgaatttttgctaagctggatagacttgagggatagacttgcaaaaatacaaatattcttacgtcggttttggaacgaaacttggagattaagtttgtgatttaacaaagattgcattacgattaggttaggtttttttggcgattaatatatataggtttgaggattgagattgagctgttaacactaaggatcgcaagtggaaatattgcatatcttgaatcttttcaaatagcaagtttggaggtgggtgttcaatccattgattcacggttgtgtgagatcattgtggagaagcttgtttataatagaagtccattgggatcacaatctaaagcttagttaaaactatgtatcactgattaaatattagcattgtaaaaattaactgaacatatatctagtgaagaataannnnnnnnnnnnnnnnnnccaaatcatagaatgttgttgttcgagttcgtcacacttacaaaagtatgcaaatctcatcaaatgacgttgccaaagtattgaaatgctggaacatgttgatttctttgtagctatattctaaagaacttatctggatataagagacagagtgaaaaagaaatgtatctcttatggggatagcgatgttttgaaccctattcataatcatagtcataggtagaacatcaacaaaacaaaacaaaatggcgaacgaggggaaaaaaatgataagggttgaaaaagagacttagaaactagaaagtaaagaaaccaaagcaaaatttggaagttgtcaagagaatgtgttctgcatcatcaccagtatttaagtcctaataaaagggtaaagcacaatgagaaatacattacattaaagagtaaaacaaaacggtgtctcagtacattaaaaactgatttttattccataatgagaaatatgcattcgaccaatcccccagagccaagatgtacaccactaccacaagtagtagctttatggaaccttaggagtaatggtctctggattcatctagagaacacacgtattgtcttcgaccaatccacacgatctgacttcttagcccgtagaagaaccctatttccaaccaactagcctcttggtgaataacaaaaaaacacaagctttcttctctgctactcatctgattgtgtagagtcacataaatacatgcattactattttgcatacatctgatggatttatcgactcaaatgactctaatagggcacactctactattatgctttgcttatagtatataacagaatcactttttaacagcgtgaaatcgttgatgcatgcatattcttaatagtaaaagtaacggaatcacttttcaaaagtgaaatcatgaaaaatgtaatacaccatttatcagcgttgtctccttatcaacaatcatccaattagatgaaagggtgaggaacaacaaagtaggtatatgtaaacaaatatatgaaagcaaagcttaaaagaaacaatacaaagactaaaatggagaagaaaacaaaaccaaaacaaaattaaagagttgtcaagagaatgtgttctacatcattacaaagtctttaggtcctaataaaagggtataactcatacctaacattacaactcgttcccaaaactctcgctccttgtttaccttcacaacactttgaaagctccttaatactccattccaaacaaaccttacaatgaaatatgtctaaagtacactgcaccattgcatacagtttattcttcccgagcctcttcgtccctgccgcgtaatatagcaaaccggtaccgtccgctttgggtttatccgctttcagcgctagctcatagaggaaattcttcatcttttggttgaacaactgagtatccccgttgatgttgtttgggttgtgcataggaaaagtattctcgtaatccatcttcgttggaggggagttgatcgtacttactttgagaaaacattgatcataccatattattgctcctttgtatctctgacatctcttacgaagctgtcatatacatatccatatatattttgttcattctaaacgatgatttaaatttcaatgcatatgtttagcgtttcttaattattttcatggtaaatgattcatggtttgaaaatataaatgtaaatgtatatatggttatctatgttatagatgtaaatgtatgacgactagttaataatgtggaagtgacattaccccggccacagcggtggcatagcaagaaccgcatatagacccgtaggagtctccacggcattggaatacaaagttgccggaattcggagcctcaccatgcgctgtgtctgaaaccgtcccgaaaatgatacttagagatatgatcgatgagataattaaggttt

SEQ ID NO: 5572 - DNA, 849 bp, Arabidopsis thaliana landsberg
tggagcttctcttaatgaaattgctaaccaggtaaacttcaaaactcataaaacactagtttactcgtttgatcataacattagtactaattaatccatgctaacatgttctctttttggctgtttgttcaaaagggtctaatagatcaacaaaagcttgacacttttaaattgcctatctacgctccacaagccgatgaattgaagcaaatcatcgaggataacgggtgtttcacgattgaggtattcgaaaatattatacacgccaagggagagtatccgttagaccccgagtttttaacagtctcctttaaggtcacggttggaggatcagtagcttcactatttgggcaagatggtatggagaaaacctttgagcttgtgaaagagaagacacaagaaatgcttcctcagatagccaaagccaaacccggaatgcaatacctcattgtgcttcgaagaaactgatttcatgatctatttagatctttgaaacgagacttaaataatgtaattgcaatgatgtgtgtttgtgtgtgtatgtgttgtattgtttgttattttaaatagtctctttcgtttatgtatatcacaaatacatatcacaatgttcatatttgcaatgtgccaaaatccttcacgtgttaaatacatttgttcatagcttctcgttacaagacaacaaatggtatctatgtccacggaaaaattgcatacttgcacgcaatctcttcttcttcttcttcggtcttctcgtagcttgaaataagattcatcagaagagtgaataaacatcaaaatccaacataccaaactagaaaaatgtcagtagttttactctcttctact

SEQ ID NO: 5573 - DNA, 894 bp, Arabidopsis thaliana landsberg
tacaagagcatttaagcagaccataacacattacatatcctatatattccttaatatcctatttataataacttctgaccatcttcaaggaaaacagtaaacttatcgatcagctattttcaagacctagttcacaaattaccgtcatgaagaagagtcccaacagaagaccacggtatggagcgatatctgattcaacttgcaaggaaaattcagtctctgcaagtagtagaccagccaaaaacgctcctaatgccatggaaagtcccgcctaatttaaagaaagaaacaatttatcttaacgaaacaaaagacaaagcaaaactacgagaataccaagcaccaacacagaaaatcaagaacataccctagctgtaagtaaactagtcccaagaataaccagaagtgtattggcggagaatatctcagcatttcggttttctgcaatttgcttgtatatcggccgcagaagctgtgtgtaccagaaaaccaatgcattgtaaaactatgattcagcaccgcagaagcagcattagctatagagtttcattatatgttcatgcaaacccattctttacaaaatctaatgtttcctcatcacttatctggatctctcttttgttgtttaacttattcggatatgagtctcaaaacagaaactagaaaaccattgagacttacgagacggccaccagcaattatgccagtgatagcaactgctgctttgattgcagcaagtccaagagcttcagcaatggcttgaaatccaatctgagaaaagcagttagcaacctagcactctcctcttacaaaataatttataagcttccttgagaaatatgcaagacagctaatactagcaacacatgaccatgagtattttcttaaaagagc

SEQ ID NO: 5574 - DNA, 1552 bp, Arabidopsis thaliana landsberg
  unsure (1)..(1552): unsure at all n locations
gccgtgcatagtgtgcttatcgacgatgcctatattgttactatggtgcagcccgtatcttgacatccaaaaagcagaagagtgttctcgtcctcaacagaagcagagtaccgtgcgttgctaacacggcctcggagttgaaatggatctgctcattgttgtccgaaatgggtattacgttatcacgggcacccgttatttactgcgataacatgggcgctacatatctctgtgccaacccggtattccactcgcgaatgaaacatgttgctctagactatcacttcgttcggggtcacatacagtccggcgcacttcgggttacacatgtctctaccaatgatcagttagcagatgctctcacaaaaccacttcatcgtccaaggtttcaagaaatcaattccaagattggagtcaaggaactgcctccatcttgagggggtgtgtaaaggagaagtatagttaaggttataaatgtaattattcatgagctaaaccctatggttaagcctctatttatattgtaaatcattcctatcaatatacaatataacccacgtnnnnnnnnnnnnnnnnnnnnaagatctgaaaacctaaaattttaattttaaaacggccgcctcctttttccaccttcttttcttcatcatttcttcaacgtgatcttcacgtcttacttaccggccatgtctacctcctcagagaaagttgccaactctgacgcaaccacgcttctcaacatcaacatgaacaacgtgactaaactcacaccaacgaacttcttgatgtggaggcgccaagtccatgccttgtttgatggctacgacttagctgggtaccttgacggatcgatcactgctccggacacccagctcaccaccgacggcatcaccactgcaaatcctgcctacaaacactggaagagacaagacaaactcaactacgctgcgcttctcggtgcaatcacgatggccgtgcaacctattctctctaaggcaatgacatcggctgagatttggactacactcaacgagacgtatgcaaatccaagtcggggtcacatcctgcagattcgtgatcagctcaaacattggaagaaaggcaccaaaactatcgatgagtttttccaagggttcattactcgatttgatgagttagctcttcttgaaagtgctctactccatgaggatcaaatcgcacatattctggctggacttcctgcagattacaaagatgtcatcactcaaattgaaggccgtgagatcccaccaaagctctctgaaattcatgaaaaactcattaatcatgaattgaagctgaagaacatgcttgatgatgcctctgtagctccggtgactgcaaatgctgccacctacaaggcatctaatgcaaatcacaacggcaacaacaacaacaatcgcaacaacaaccagaatcgctctcgtgggaatcaaccatggaatcaaaacaactctgcacctcgttttgactcccgtggctcacaaggcaagggatatcaaggaaaatgccagatttgtgggatccatgggca

SEQ ID NO: 5575 - DNA, 1952 bp, Arabidopsis thaliana landsberg
atctggtggagaggtttgaaaattgcgggaactcttctgttatcagtgaccgtgttttgaatatatcctacaaaccacattaaacaaaagttgcgttagaacggtcgctcaatagtcttacgccttaatcatccttgtccatccgctttgatcctgcagaactctgaattcacgttaatcaactctttacattctgtaaatgttttggcatggactttctcattagaaggtgtcatttggggtagacggcgcttggtatgaaaggggattttggtgtttaagtggtggagttaaagtgtttagggttaccatatagtctcgaatgcaagataagttgcaaaaacgcaagagagaacggaccggttgaggtccacagttttcaactacttcttcttttaaacaccttcttctcctttacttctttcttactttcggttccctagagttaggtttttttgaggggactctcttctgtaattggctcatctctcctttaggttcccatgtatttccttggaactaggtactagactctcttggttgtaatgtttcctttccttccttttcttttctttttcttcttttttttttaatattcttttgtatctttttttttatggaaggggaaacagaacttctaaacaccgagtctaatgggcatacctttgaattggtttcaagggagaataaactcttaggccgcttgttgcaatctcttcttttgcttccttcttctgtctttgtggcgggaaactgtgttgttcctttctctctgacgtttttgcacatatctgctaaatgaaaaaggaaaagagaatgcatgaggcttggaaagaggatatagtttaagggtacgaaccactaaaagtgagtggccattcaggatcagcaaagagtggtaagaagggaaaagaagtcctgaatgtatatgctcgtttccccgatctaacacccattcatgagaaagaattaagttcaagttaatcgtccaatataggggagagttgacgtcggatccaacagaaatttctgcaaggttaagcttctgggggacggtccgggcgtagtgttcaaggttgcccgttccttgcgaccctgtaagtgttcctcaagaaacaattctcaacacataatggtcaataatcatcatataacaaggtctcggttccctactagttttgactcaataaaacattactcgataataaagaaaaactttttgctttgttagaacatatcggtgtaaaaagtggaaacatgtttcaagtcaacaaagtagagagtagcattagtagtaacagattcattaaccccccagacttacttcaccccgtcccctgtgtcagaataagcatagggatgaatccgtgaaaaagataggttaagaacaatgtaacattgtttgtggtgactaaccggattatttctctccttgcttaacttggccttactcggcttagtatggtcaaattccatgatattaatctctattcgcatcttccttgaaacaaaaacctaaaaccaccaatagctttaacaaaacaaaaaaataaaaacatacctaagatagattgatcttgttgttgtcaatacgacaacaaataagatcaaattcgtggtgacggatggtgtgaatggatggtgggcagttgcgggcttggccgaaagggtggagtgggtgggcaagtaacgtccgggtgttggatggggtcgccgggcgttgcgatgggcagaatggtcatgtgttaaacaaatccattggcggaccgatcggccgtggtggtgaaactccccttgtccattcacgtgtttgcccgagttggccaagtcttgcccggatgagtttgcattcggccggacaggtgggcaagctgttgcccggtctgccaggtggggcaagtctggaaaaggcgaaacacactccggcgaggtccggcgggtggtcggggcgc

SEQ ID NO: 5576 - DNA, 522 bp, Arabidopsis thaliana landsberg
  unsure (1)..(522): unsure at all n locations
atacaaagcttaacaataactacacacttttattcttgttgcaatatttcacaaataagagaggtaaacttgactacttagaaagaaagaagctagggtggtcacgtaccgtttcaacttgcacagccttattattgtgaactccggttccagatacttgaactagtgcaattgattctggcnnnnnnnnnnnnnnnnnnnnnnnnnnnnnnnnnntactgcttttgtacccagagctcaaaccaccctaaaaagtccatgtaagccatattaatcactgtatattctcttgcgactaaaatcaacttcatcctcatcttgtaaacagcatacaaatacctttaagaccaccataggttgaaaaagggcaacatattgtggaggctctttaccctcgtatatacggccctacaagaagacccccattagtaatcgatcttccagtactagtcatcattgctttcaataaaaataaaactttgtacctgcacaggtcttacttctaacgagtttgacattgtt

SEQ ID NO: 5577 - DNA, 3477 bp, Arabidopsis thaliana landsberg
ataacgggccctctttgagtccgggaccaatacttgactccacctcccaatgatattctctcacggcgcagacgccgtgtgagtcaagacagccaccaccagcactatccaccacacacccatttggcttatgtatgtgaatgatgatgatgtgtgctcatcataagacatatatataggaggagagaggaagagatagtgggcaaaaccatagattgggttttttggtcaaaaaggctatttatttattttttctttaaattttggggttttagaatggtcacaatgttaatggacataattgcgatcgtgtaaacaatcaaaatatctcaagaagattcggtatagtagtgatctcatgttacatgtttttagggtgacaaagttgaatttgtcttagacggtgagatcacgttcacaatctttacaatgccaagtttatcaatctcacttcttggttgttttgaacatgtacgtaatgttaactatcacacaaaatcctatattttaggcatatgtcaaaaattaaatacgtctttcttgtgtatttttaatatatttttttaaattatttaatattattcttttgtgaacataataattgatcgtgtcaaattaaaactttaaaaattagagtcctacttgtctacttttttttttcatcatcagtcctacttgtctactttacaaccacgcatcacgtacgtctataactttgttaatatgctttgaatctgttcgacggctagcaacagcattacgagagatttgttaaaggatatgtaggccgtagctttgaattttttacttgtggtctaaatccagttagagttaagtagagtttctcaataacacacttgttctccctaatctctgttataagtgaaacagtttttcattacattatatttcccgtaataaaaccagtctcatttgacatccgttctgtcaataatgtgtagcctaatagtttataccagtgatatatatagtatcatatcaaatttaaattcaattctataaagtgcaaatgagtgagatgatgaaaaagagaagttgacgaaagctccacgaaaaactcgtgaaacttactaacaagcaaaataaattgtaatatatttttcctttttgatctggaaaggaatggttgctcacaacaaatttcgaatttagatggctccattccacattagttaggacaccacgataattcatactttagactattttagtgacacgatgtgttgttgtatacttgtatctctggtaatattcttttatttcgagttactatacttttggcaacctacaatagtcaatagtcttaatcggtggaaaagtttatacatccataaaagtttataccttttgaatatattactttgaaatgaatactaacagtcaaaaatactaacagtcacactagcaccattcggaaattaactcgcttcaagcagtgttgagtaagtataatttgtacatactataagttaaactgttaagaggagatgaattcaggttatccaataattaaagtattattttcacttaatccagtttaatatccaaaaaaaaatctttgttacatggaatagatagtcacttacgatgatcctgacaaaaaatgaaagccagttaagtgacttgggccaatacaccatggctaatacaattatctatcatctaccacttatcaatttcttttctgttctagcttgtgttccctacttgttccctacttgcttataagaagtaaacttatgagttatgaaatacgacctatatttgtacgttaccacaacaaaaactaaaaacatagccaatatcaaatcctatgaaagtacatatttgtgtgcaaccatatagagcgagatggtgacatatatgaagtggactaagtcacaaattaaaaggttcatatgtaagttatgtaccatattaattataaatatgcatgtcatacgtaactaaataagattttaagtttctttaataaatcatacacttaagagatcctgttgcaccataaaaataatttagaaagagatcttgtcccccaacaagagaattaaacatattttctttgatcctatcaattagaacatccttatttttatccctttaaaaaattaagaaacccaacgaggaaaataaacacacataccaaccccggttcatttaagggcgtccccggttcataagccatttcctggttaatccacaaccaagcgcttcatccggtatctccatcttaccaatccggtctactccctccacgaaaaccacacccatacccatatgcaaatgcggttcaatatgacaatgaaaaaaccaaacccctggattatccgtcacaaaccttatcgccgtccatccaaacggatacaacaccaccgtattccgtaacggcggattcttcaaattaaacgtcttctcatcaatccccggtttaaatttcccttcaccgtaacccaaaacccagaaatcatgaccatgaatatgccacggatgaatctcactaatcacaccttttaaaacattagcgttttgaagaatcacgtcgacgacgattccaaacgcgaaattgtaaatcccgctacctttcgttgtgtttggattcggcggcggtttcatgatatcgtaattatccataattaacttcttcgccggcgatttcaaatcgtacgccgattttaaaccgtatctaattgatccgaggtacggcgtcaccggtacggataatgagacgttgttgattgaccatttcgtgtaatcttcgtagagattctgtgtgttgaggaggattagctggtcatgtgatttctccggcggttttggatatcctttagcggcgaagatcttcttcgagaagcttttgctccgatctgtgtcgttccagattggagtcaccggtggtggatgagatgggcgtgactcagtggcgtcgacgtaatttatcacggtgagtgcttgaggagttttgggttcccggccacgaacgccgacggagatccagtacttctttgatggaattgcgttggttttaaggagaacggaataagtttcgccggagtaaatgtcaatgtcgttgacggtgaacggtgcgacgtagttaccgtcagcttcaacaaccaccagctggtgtccctgtcacgtgcgcaatgaaaccacacgtgtgagcttttaaagtacacgtgtgagttggaaagaaagaaacttacttcaacagccaagttgagggaagcaagagcagtggtgctagcgatgcgaagacggtacactctattgggttcgactcgtagagtttgaggtgcacactgatcattttctttaaacgtgcacaaatctttctctccttctttgttaaaatacgctgcttgtgaacaattaaactgtcctcttccattgatcaacaagctttgaggttcaccgatccaacgcataggacgagaagaaagagcgagttcttgcgcgtga

SEQ ID NO: 5578 - DNA, 2530 bp, Arabidopsis thaliana landsberg
tatgcttcgagaattgtacggatctacatatttgaattaaaaggaaaccattgctttttgattggttaccattttatctcttgaaaatgtatagggatttatcaaataacaacttgactggagaagtgcctgaatttctagccaagatcaaaccgttattggtcatgtaagttgtctatatattattgtgttgtcttcattaattagtttctaatgatttctccacatcaacagacacttaagaggaaacaatcttaggggttctgttcctcaagcccttcaagatagagtaaaaaatgatggtttaaaactattgtaagaatctggtattcgatgatctaattttgattattatcgacacttttctataattaatattttgtcaataacgttttcattttttagtgttgatccaaatataaagcagcgtaggccacacaaaccaagatcttggctggtggcgattgttgcatctatatcttgtgtggtggttactataatcgtgttggttcttatcttcatcctcagaaggagaaagtcatcaacacgcaaaggtaagttaaaataaatatatggttcatattgaagtatgaaatctcatggatctacaaaattatatttgaagtcatcaacacgtaaaggtaagttaataaatatatgatcctaaatatataaatataaagaccctaggcgaaatttagaggtcgtcgattcgagtgacgcttgggacaaaactaatattacatgttgtggtttcgggtctgaaggattatcggcccagaacctcctagcattcaaagaaaaagaaaaagtatgaaacctaatggatagttaaatttattttctgcagttatacgtccatcattggaaatgaaaaatagaagatttaagtattcagaggttaaagaaatgactaataactttgaagttgttctcggtaaaggaggctttggtgttgtgtatcatggttttctcaataatgaacaagtagccgtcaaagttctctctcaatcatcaactcaaggctacaaggaattcaaaacagaagtacttatttacactaaaatcttccacttaatttttggacaatcgtgagctcatgaattataccaaattgttgatatattgttaggtcgaactacttctaagagttcaccacgtgaatttagtaagccttgtcggatactgtgatgaaggaaatgacttggctctcatctacgagttcatggaaaatggaaacttaaaggatcatctttcgggtaaaccattagagtatgatacaaagatttttgagttacatgccaaatgctttaaaattttgtattgatttctatccatgttgtgaattttggcaggaaaacgtggtggccctgtcttgaattggccgggtagacttaaaatagctattgagtctgcactaggtttgtcgaaatttcattaattccttgttatattactttttctaaagtttatatatattctttttccttcttcctttaaactatcttcataaatagttaacatatgaagatttttctgtgtactaggaattgagtacttgcatattggatgtaagccgccaatggttcacagagatgtaaaaagtaccaatatactgttaggtctacggtttgaagccaaacttgccgatttcggactttcaagatctttcctagtgggaagtcaaactcatgtatcaacaaatgttgctggaactcttggatatcttgatcccgagtaagttctagttcatatcacattatagtatcaagatttgttttcttgcttgtttagtaaacaaaaatcaaacatcttcgactacttttcttgcagatattatcaaaagaattggttaacagagaagagtgatgtttatagctttgggattgtgttacttgaaatcatcactggccaacctgtgattgaacaatcgcgtgataagtcttacatagtagaatgggccaagtctatgcttgcaaatggtgatattgaaagtattatggatcgaaatctccatcaagattacgacacaagttcatcttggaaagctcttgaattagcgatgttgtgcattaacccttcttccacactgagaccaaacatgactcgggttgctcatgagctaaatgagtgtttggaaatatataaccttactaaaagaaggagccaagatcaaaattcaagtaagtcctcgggacataccgtaacattcatcagtgatatcccttcagctcgttgatattttcatctatgtatttgtgtttgaaagatacgtatagtttgtattaaaaaattctgatgctacgcaatttactcctatttgaattacattatttacataatatccgctaaccgagttttttaatggacataaagtataaaacccgtttgacgggctaaatgggagtgatttaaataacttcgggttttagaggattcactccctgacctaatccgacgtaacaacttcatcataatgttggataaaattatatattataataaggggttggcaagggttagaatattt

SEQ ID NO: 5579 - DNA, 2308 bp, Arabidopsis thaliana landsberg
gactacgacgctctgatgggaaaccaaacaagcaaaaagtcacaagagacatcggtttttagcgtgcactacacaacggagctgagatcctacgcggctgcgtgcaaagcagacacggagcttcaatctttcgacacgtgtttgcaagcacggacgagtcacgtgataagcacgctagctacgggggttgaggttcgagcgctctcgttcgattccttgaaagaagtgacgcaatgcttgttggagatgaaccaagaagtggtgaaagtgatattggattgcaagaaagacatttggaagaatcaagaaatgtttgagcttgtcgaagattactttgagaatagcttgaagacacttgatttctgtgctgctttggagaaaggcttgagacgagctcgtgatagtcatcttttgattcttgttgctcttcaacagtttgaagatgagagccttgtccaaggtatgacttttatttctttcttgattttcatggttttaattagggatgggagttatacccaacaaaataaatttatagggatgggagaaataaagtttcatcttgtcttgttttatgaaaatgcatttttcagttgaaatttctaatttcaaatcctgttttaaaataggagtaatattaatcattagtagtaacgaggcattatatataattcatcctaattatttaattttttgactttaacactcttttttgggttggcaggtgggaacggatacaagaagacacttgaagagctaaagaatttcaaagacgcagagagtcctttcaacgaagacttcttcaaaatgttccaatctgtttacaaacagcagatgctgatgctcgagaagcttcagcatcgtaaaaacaagcttgacaagaagcttaaatgcatccacacatggagaaaactctccagcatcatcttcgtggctacctttgccactgtgctcatctgctctgttgtggctgcagccatggcagctcctcctgtggctgcggctctcgctgcagctacagccgtgcctctaggctcaatggggaaatggattgactcgctgtggaagaattatgagaatgcactcaaagggcaaaaagaggtgatcagttcgatgcaggcaggaacatttgtggcggttaaagatttggataatatccgagttttgatcgaacggttggagattgagatcacggggatggtgaagagtgcggagttcgctgtggaacataacgcggtcaagattgggatcgatgatataaagaagaagcttgaggtgtttaagaagaatgttgaagaactggggactcaagcagatttgtgtagcagagatataagaagggcaaggactgtgattcttcagaggatcatcaagcaccctaataatgctagtagtagcacttgaataatgaaatcttgaatagtaaagattctttctgagttaatactatcaatgtttaaataactcgaatctgtttatgataaatgtatgttgtgttttctgtattctttgatgattgaaactatgggagacaagtcttttcatagttaacttctttctctctaattttcctttttgctgatctctatcaatatgagagtgggctgatatactaaaacgaactcaaaagtagaaaattagatcatgagtttggaatctgaaaactagggaaaatgataggagtcaagctgaaaaaactcaaaatatgtgagttaaaattttaattgataattataaaattttgacaaatatcaatagcttttaaattttgttaatttatgagatatggattgttttagatttttaaaaagatatgactattaatatcaaattaaatattgaaaaataatatggacaatctcaatagctttgaagttttattattttaaaaaatctagaattattattgtttttactcttatatttatgtatacattaatcactaattatatattagttatgtggatgcagattacatgagaatagagaaaagctaactctatatatgtgtacaagttttttttctctctgtctctcccaatctgttttcttgtcctgtgttgttgcctctcctggtacgcccgaccaagtttatctttgtctcactgatcgtttctctcagtctcgacctaattgattaaggttttgttttagtctatagattcttctttaatctgtaaacgcatttctatgtttgaaatgcattattatcataagaagtacttgagctcaatctttcattggtttatctgttttattcatatacagaatcgaactcggaactgcgttgtaatgggaaacaaaacaa

SEQ ID NO: 5580 - DNA, 1145 bp, Arabidopsis thaliana landsberg
ccgcatagtaacagagatataggaattgttgatgagttcaatataggtggagatgttggatttagtggtgatctggatcttgagccacgaaatggtatagactttgatacccatgaggcagcgtatatcttttatcaggaatatgcaaaatctatgggttttactacgtcgattaaaaacagtagacgttccaagaaaactaaagacttcattgatgctaagtttgcttgttccagatatggtgtgactcctgagtctgagagtagtggtagtagtagtcgaaggtcaactgtgaaaaaaacagattgcaaggctagtatgcatgtgaagagaagaccagatgggaaatggatcattcatgagtttgtaaaggatcacaatcacgaacttttacctgcccttgcttatcatttccggattcagaggaatgtcaagttagctgagaagaataatatcgacattctgcatgcggttagtgaacggaccaaaaaaatgtatgttgaaatgtcgagacaatctggcggatataagaatatcgggtctcttcttcagaccgatgtcagcagtcaggttgataagggtaggtatctagctttggaagaaggagattctcatgtactgcttgagtacttcaagcgtatcaagaaagaaaaccctaaattcttttatgctatagacctgaacgaggaccaacgtttaagaaatctgttttgggctgatgccaagagcagagatgactatttgagtttcaatgatgttgtatcctttgatactacttatgtcaagtttaacgataagttgccactagctttatttattggggtgaaccatcactcccaacctatgttactaggctgtgcattggttgctgatgagtctatggagacttttgtgtggctgataaaaacatggctacgagcaatgggtggtcgagctcctaaagttatactcactgaccaagataaattcttgatgtctgctgtttcagagctcctaccaaacactcgtcattgctttgcgttatggcatgttttagaaaagattcctgaatatttctcacatgtgatgaaacggcacgagaatttcttactgaaattcaacaaatgcattttcagatcttggacagatgatgagtttgatatgag

SEQ ID NO: 5581 - DNA, 1254 bp, Arabidopsis thaliana landsberg
tccgccttatatcccaaaaagtaaaatgacaattagaaaataatataattacgatgtggaatcttgcatggtatagttttatacaaatcgaaaactataaatgatagaattcaaaatatatatttgaatgaagatacggaccactattagtgaaaatgaacctaccacgatagttgaattggacctcttccttgataagtcttgttagggaaacaaggccactgtgtatcagaagaatcacaataagtgctttgtggactcacttcttctttaaagcataatccccaagcgtacggtccgtctggtgccgttgcccatcctccggtcgtctcgtgtgaaatctgagccaaaaatgcagccacttcgagtcgttgtgtcacggggcttcctacgctcccgaatctcggaaaccgcctcgtcgcttggacaaatgattcgtaagtgtagaaaccatttgcgggacaagcggtattgtccttgtggatgaaaattttgttgtagaggtctcttggcactaatctctcgattgaggtggcttcggtttgggcggaagatagtaaataagagattgagaggaagaagcataagaggagaaaagagtgttgttgagccatttttagagagggatcgatcttgatggttttggtgtaagaagatgagtttgttatatagatgtgtaaatgatcaacgcgttgacttttgactttaacggtggacttttttttcattggtctgaaggttcgtttatacatgctctcatgtgttttcattcatcaaacgatgcttctttcacgttaagtgaaactttttctatagtttttggtataatttttcatatagtttacaccttaattagattagatatcaagacaacaacaaaaagcgaatacgtgaaggggaaaaaaacaacaaaagcaattatttttgattgtagagaaaaaaacaaataacggcttttcactaaaatgacattttttttagctgacattacttaatatgaaaccgagatcatacaaaataaaaacaacttatcaatataatcattgaatgatatagatagtgtgtattacgattaaaatgatagtggatgacgatattcttattcggtcgacgtagcagtattaccgaaaaagactgatttcaatttttaatgcttgaagactcattcttgctatggaaaatctcattattttatcttgatggaagactcattcgtatttttttattaatggggtggaatctacacaaaaaaat

SEQ ID NO: 5582 - DNA, 530 bp, Arabidopsis thaliana landsberg
taagaatctagaagcactaaaggtgcaagttctgtttcattttataacacaatgcaaaaatattccagggctgggtaagaacttaaataattaccaatccttgcacatccagtattgtagttgtggaacagattcgacgctttgcagcaattgagcatgcagggaatttctcctggagagctctctcaaactcttgcacatggtactttaaatatctatctatggtggtgatacgcataagcttagagggatgagcttttccaagtctttcaatgtagacaggtcttccttccttatcaactccatgatagccttgaggatagtattgcaaaacttcttcaagctcttcgaaatcaaaatcctaccattcacatacatagtaaaattataagagttagatattgattccatcaactaatccagagaatgattagatgcttgcatccaaataccaagtatgttgtacacaagaaattacttcttttttcatatggaaacaagcaggtttcaaacttaaataaatgactcct

SEQ ID NO: 5583 - DNA, 4394 bp, Arabidopsis thaliana landsberg
ttcaagaaatatggttctatgtgtatgggtattcaattttggtcttgtttatattagtttggttcttttttttctccagattttgactattttggtttagagaatgtggcagccacattttaaaagttgaatctagcatatatttgtgtcattttcgttagatttcgaattcagttttcttacaaaaaaagtatatctttatactagtatacttccaacaaatttgaagtattgatttagataatttccacttttaatacaatgctgaagggacacttgatgacttgaatgaaagatttcttctcaatttctttttgttgtcttatctgttatttaaaattttaaatagactttttagctaatgatttattcataaaaaaaattttggattggacaactaatcaataaattttaaaataagcaaaatgtgcagtaacaaaaataaaataaatgtataaaacatatcgattttaaaacaaaatatcatatatatgcgttatttcttcataactatgcgtgtttaaaacaattgtccttaagaaaagagtaaccgattggaaggaaaaaccaaaggatcttcgtttccatgcgagccacgtaaccaataaagagatccacccttgttaacacctcaaacctgttaagactaaccacaatgttcgaagataatgccatttctatatatatttagtatagcattcctcacacatgcgttctgtgttgcaaagtttactctagaactatcactgagtcatgactcatgataaccattattatagtattagtacttttaagttttaggtcgagaatatgaagctaacacatgcatgtaatgatgtaaatatgcctaccttaaaaaatatcgaattattcagaaacaatgactcgatatccgtaagaaaccgccagctcctgctcaattgcatgaacctatcttaatattctttcgccacgaagtcttcccttttgtctccttcttataactctacacatcatcatttcttttccattagataacttacaatacgaatacctttttcttttttgtcaatttaaatcaacactaagatatactttaaatacgaatcatttaaatgaatataatgtactaattgtttcagattttatttcctgtttaaaaatatactcatgaactaaaactaattaataaaatgtggataaattaaagccttttaacaaaaaaaaaatgtggataaattaatatcaatatgtttcctttttattttattttatctatttcaaaaaaataagttattcaatacatatgttgatattttgactatttttaatcataatttaaatcaattgttgtgttcttaagcaaaatatctaaaaacgaatataaccacgtccaccatagaagcactgcaattttagcattctaaaacatccttgatatttttttgtcaacgtcttattatcttttatctcaaaccatgtatatggatgtatccactaacgcatatatatagagacaattaggcatctatcattttatcccacacttatctcttccaatctctctctcattcaaacccaaataggaaacaaatacacaaaagtataataaaaagtctttctctcatctttcgccacgtagacatggacgtcgaacatcacaaatccggccacatcagtagaccaacggtggatattccaccgaggaagcttctttcctccgccaagtctccgtcgtcagtttcaagtccccttcgcgactataaagaacagaaagactattgttacgactctgactcggaagatccttacgccggagaccatttccgtatgtacgaattcaagatccgacggtgcacgcgtagccgtagccatgactggaccgactgtcctttctctcatcccggggaaaaggctcgtcgccgtgatcctcgcaggtttcactacaccggtgaagtatgccctgagtttagccgtcatggcgattgtagccgtggtgatgaatgcggtttcgctcacggtgttttcgagtgttggcttcatccgagtcgttaccgtacggaagcttgtaaagacggtaagcattgtaagaggaaagtctgtttctttgctcattctccacgtcagctgagagttcttccaccgtcgccggagaatcttatttccggtggttgcggtggatcaccgtcgtcatccccggcatcggttttaagcaataaaaataatcgatgttgcttgttttgttcccattctccgacgagtactctcttgaatttatcacgatcaccttcatcgtctccgcctttgtccccagctgataaagccgatgcattttcacggctgagcgccgtcgcaccagcgtactaaacgaactgattagttctttagattccttaagtctcacggaagcacttgcagcttcttcatcgtctcccgttaccatgcccatttccacggcgacgatgatcgcttcatcgaatctttgcagcaaccaccaccaccaccgtcttccgccgtggcttgatgtcggagacagagatctccaattacaacagagtagtcctctacgatttgctctttcaccttcttcaactccaagttacctccaaggccagcttcagccaccgccgtcaagtttctttagcgatgaattcacaccacgtggtggccggctaagcgatttcacggcggctgcagctgccgcgtcccaagctagggataagaatagctttgaagtcggttctagtggcgatcttgatctaggatgggtgaacgatcttttgacatgaacagtatgacatcaacggtgaactacttgagatctttgccgacgggaataattatacggcggcgccgcggcggaggtccgtcgtggtacattgtttattaaaaaaatatttacgattttttccacgagagctaattaagagtctgtagtactatgtcgtgctttaaaaatatatttttactgtattttttgttaaataagagagtccataacttctattgttatattgatctcttggaacttgtaatatctactacattgtatcgaattcctatgtaatgtttatttcaaaatattcttttaatagaaaatgatgatgtagttatatgcctacagtacttttcattaatgtccacaatcattactataagaaaattgattcttaattaattacatagatttaaatcggtacatcaaagaattgtatatgctctatatttgtgctattaagcaagtgaaacattaacattgtaattgtaacataacattatgtccctcgagtcgagtatatatatagtggagaataacgttattgttaggtttcgttggttgattgtggagcaaatatgctattcctatcatatactagttactacaaaatcttaaaatcttcatttttatgacactagaacttaaaaagtccgataataataatataatttccccactccgagagcacttgtttcctaggagacatacttatctgaacgacagctgtacatgcatagagatagaggtgtacattactcatatagatatggtataattaggtataatatatatacaattatacatttgtatatatatatgtacatgtgatcatgtgcatgtatatacataaatagataaacataatagcaaatatacaaaagcaaagtatgtcggggtgtggaggtgtcacgtggaccggatgacccaccaatacttagttcccattctcatctcgatgggtcgatgagtcctttagatgtctccttggagacatatttcaccatcatgcattatatgtatttacatatgtttttggagaaaggaccgtgggccaattacaccataaaatggaccctaataagcttggatttaaatattatggtacatggaactctaaccatttacttcttgttgaagagtttggtgcatgcatgtacctttaacttcccatcttttttcttgatttttcttttggagtgttcactctttcagatgtgagagtgaggaccacggtacgtacggtactacggtagatgaataatacaatgtgaagagagtttaaaaaacaaaaaagttcaaaacaaaaaagaacaattttatctcttatgttcttgaagtgtcgaattttcagggattttttcagctctacaattccgatccattagcttcatggtttttgaaaccccatgtaatatagaaaactccacaatccaataattcaacacaaacaagtaaattaacacacgagaaatctgtataatccattaatcaaaagttcaaaacaacgttcataaaatgcagattgaatcatcaagctagctctcaagatgaaagaaacccaaccaaatatccaaggaagatcattatagcagagttcacaattttagagatgatgcgataatgagtgaaatgagct

SEQ ID NO: 5584 - DNA, 614 bp, Arabidopsis thaliana landsberg
  unsure (1)..(614): unsure at all n locations
ccgcgagcaactaatctctgtttctaaatatatctgttcaaatttacttatgctaataacagtttatgttaaaatgaaggcttacgagagtaacaaagagtgtcccacacgctaggtttccttccatcttccgcagctgctccttcccacttgcagagatcaaacatttggttcaaaaattccaaaaaaaaaaaaaagcttaggaattgattccaaacctgataagcagaagtgccagctccgaagaggaatccctcggggaaatcagatctgctgaaaacgtcgctgcatctcccggagaaagcaaaagatagaaaaatggtaaacagagcaaaaaactgttccatttctaatgctctttctcttgtactgctactagagataatatttgtgtgacgaagaaacaaagtatatggttcactgtatttatttaaagtgtgtaacacgtgttgaaataaataactctagcgtttttacaaaaaaaaagnccttagttttgagtttttcatacattattgggatttctttgcactggtttcagtccattttgaaataagaagcaattcggntatcaatatttgattgaaaataaatgaaaacaaataatattcgaa

SEQ ID NO: 5585 - DNA, 2558 bp, Arabidopsis thaliana landsberg
atcagttatcagactcaaactccgacataaattagtatgatttgcaattaaagatgttacctttttcctagctgttatagacaacttggtgtgtttatctgttacgtcaactgcatcacgacagggttttgctgaatcttttcgtcgccgttttttgggttgctggttagatgttgttgaaggttccctattgtgaaaatgaatcagggattagataacttgtaaatgaaatatagcatgattaggcaaaatgagaaaaactctatcctatcgaaagtgcaaaacctacatctatatgaacgttttttaaccagaaaagttgaaaaatggactttacccataccaaacaccctacagacattagttaaggcagtagtagcaagactgccaaccatattttaccatttggagagactacacatatccaaataggaagaaaaactgaaaagcaaggtgatttcatatgtttatttcaaaaacttacgacatgcctattctaaacatgatctgagtgattgaaaagtgacaaagccaccaaagagttaagagacatcagataatgaaaagaggaagataactcacatccgctccaacttgcctctatttacataaaatccatcatgtttaactgttgaattatcaacttcgaaatactcatcctgcaaggagtagagtaaaacagagatatgatttctcagctatcaaaaatatttgaaagatatcaacaccaaccagttcagcatcatctataaatgaatcttcagtgtcatactcatcatcatcaggagcaccgtctaactcttccccatcactgctatcgttcccctgagatttattctctgaagtaagcatacacttttcagagatgtgtgaatgcaacagtgctattgcatggtatgcaaaaatgttgtgaatgtgaaaaatcaaacatataacaacctaccaagaaaagtgttttaacaaagagtagcataccttatagagcctctctatcttctcaataacagcgttgaaacggttagaatgaggttgttcattcgtttcaatctctactggatgcccctacattatatacgaaaatacagctgttgaaaatgattttaaccacccatattgtatgcataagaagaatatattgtgaggaagctgcaagcatattataccatcttaaatgaagatccactattatatgcttcattctcttgcactaatagatattaattaaactttctctatattcttcactattacagctatagtttccattgcaactatgtgaaccaaattcctttccagatcaagtataattgatggcatattcacattgataacgatgaagttagcctaatgtagctagcaattagaaatgaagccaaagatcatatatcaggttgtagactttctccgtttaaggagtttgcttattgaactctagtcacagacgtcagagagcaataacaacagaattcctcctataccatatcgatttcaagcattttccccaacaaataaatctgaaaatctgcgaatttagtaaagctcctttataaaccctaacaaagattacaactccccgaaacaagacaaatgcttactccaataacagcaaacgaaacccacaaatgcctacaagtatatatatccgattaccaattcctacaacatcaaactcaccggtgcaattcgaaactcaaggttagggttagcattaggaggcgggtcgggaaccgaagccgataaaccattgaccttaccagcatccctcataagcttcttccacgaaacatacgtcgtatcccctggccgaagctccaccttgagtaatttccgatcaccggccgttaaaaccttcggcgacgctctcaacaattcgccgccaatagaaccaccactcatctcattaacttccgacattaataattcgggtcgggtcgggtcggatcagtttgatccactatatactaacccctgggttcgagacggattgatctaaacagcaatcaagagagtggaatcgatgaatcgatgtagagaaactgaaactgagaagaaaaagttgcgcgggataccaaaaatgacgctcttaattatttcctaatttatttttgttgttttattcactaaaaaggattattattatattatatagtttttcttttttttttaattgtatttttcctcgaaatatctaatccacagatagatagaacactctgtgagctttatccgcttccaatggcgtcttccgccgcttctccttccttatctctactctcattcacctcgaagccaccttatccctccggctctcagcggctattggcgtcattcagaacggacggtcttttcgcgcctttaacactgaaatcccgacgcggccgtggtatagtcgttaaagtagatgacgtcgatgctgatggaggtggagcggacgagtatgatatggatgatgaggaggtagaggaagttaccaaccagcaggactatgatgtcgagtataaaccaaaggccgccgcgatagccgctgcaggcggtggtggtgatgtagattggctttt

SEQ ID NO: 5586 - DNA, 527 bp, Arabidopsis thaliana landsberg
ttaaattttttgataaataatataccaaatcaaagatttctattttaggagttcaactttatcttcagaagggtcaggggctaatgtatgagatcgtgaaaacattctaatatatgtaaaattaaaaaatggactatattgcgtattattttgtatttttaggacgtataggataaaattataaaaatagacgattttaaggttttttttcataaaaccttttttttaatacaagttaaataatttttttgtaaataattttttgttggaatgtcaaatttattcaacaaaagaaaatgattacaaagagttttgaaaggtaaaaaatggagaaaataaacgtgaaaagtagaaacaaaaatgatgaaattggcgccacttacatcattacagaaagttcaaaaggcctaattctgacacaatattattaacgggccatgggcttaatgacaataataaacttttctcacttttgagttttaataagcccacatttgctttagggtttctgcgtctctatctttaaa

SEQ ID NO: 5587 - DNA, 502 bp, Arabidopsis thaliana landsberg
  unsure (1)..(502): unsure at all n locations
ctgttttgcgtcattggagaaacacaatgcaccaggcttcatgtataggtcctttccaatcagacatctaatgtgtggggtaacacaacagtaatcatcacacatataaaaccggtctttcggatttactttctcctcgcnnnnnnnnnnnnnnnnnnnnnnnnnnnnnnnnnnnnnnnnnnnnnnnnnnnnnnnnnnnnnnnnnnnnnnnnnnnnnnnnnnnnnnnnnnnnnnnnnnnnnnnnnnnnnnnnnnnnnnnnnnnnnnnnnnnnnnnnnnnnnnnnnnnnnnnnnnnnnnnnnnnnnnnnnnnnnnnnnnnnnnnnnnnnnnnnnnnnnnnnnnnnnnnnnnnnnnnnnnnnnnnnnnnnnnnnnnnnnnnnnnnnnnnnnnnnnnnnnnnnnnnnnnnnnnnnnnnnnnnnnnnnnnnnnnnnnnnnnnnnnnnnnnnnnnnnnnnnnnnnnnnnnnnnnnnnnnnnnnnnnnnnnnnnnnnnnnnnnnnnnn

SEQ ID NO: 5588 - DNA, 320 bp, Arabidopsis thaliana landsberg
atattgttggcctttgtttttgtttaaaatggtttttaacttatgtgtgattgcttagccaaatgtggactctgaaaatggttttcagttttagatatgaatgtccttattactattattacacagtcacacagagtttacaaaagatcattcatcattgtttataagagaacaaattgataacatatatctttttgatgtggatggatttgttaaccctctagaagaacacccaaatttggctacaaagttgtcaacacattgttctttgttcttctttgactttgactaaaaataaaaataaacctcggcctaagaaa

SEQ ID NO: 5589 - DNA, 1074 bp, Arabidopsis thaliana landsberg
agtgtaaaccagattataatcgccagagtttccaaaagtctctccgttttatcggagtctcagaatcggattcccggcgatgatggtggaattggatcatttaaggttcgttgggttttattttggctgtgtccttaagagaacaaatgggttgctattagaaggtttctatgaattgggtcaagatcagagacgagtttgattcatattttagcccaagtgaatgttttatgcgtagtcagaaaaaaaaaatagagaagattggcttttagttatgttacctatggatgatgattgaagtttgactctattagctgagtatagattaacaacaacaatcagatactctactcttcatatgaaaagaaagagtaataaacgaaatacatctgtttttgcagttttactcaatactgaaaccaatataacagcttcactctctctgatctgctactataacattgactctgaaggaggtaattgctttgactctttctttttaattgcattcttgtcagttagtttattagcagagaaatctcgagttgttggaaagaaaatagctgctagggaatggtagagatatatcaaaatgtttgcaaaatctcttcctagcatactcataaacgtagcttgtgttcacacgggatcaaaatgaaaagaacaacaataaagcgtggcatgtaggaatgactagaaatatgagcagcataggaacttgggtaggcgactctttctggcttggtgatcctgctcgtaacttggcatctccgtttcttggaagcgagcactatgtggctgtgctgatacctagaaaagaatgaagatgatgaagagactacatagaccagagtagagagaagggtcaagtgcagaatatttcacctctctgtttactctccctttgaaatgttctaaatcatcagcttcaagagaatcacaaccctttgcgtcgagaaactggaggctcagtgggagttcttccggtgatttgagtttcttgcagttattcaggcagagagttaccaatgaggtaagatctctgatgcttgatggcagtttcttaaagtcatg

SEQ ID NO: 5590 - DNA, 2766 bp, Arabidopsis thaliana landsberg
aagttagtcttctattatttatctgttttctatatatccataagtttgattattatttgattatttctcaaagggatatttattcataaaccaatcttacaaaccgggtgaaccggataacctagtaaaccggtacccacaaccccttcagcgaaatatgcaaacagaagccgacacaatttccagcgagtgaacaaccggaaacatctccggattatgaaaacagacagctattaaaccgaaaaagataaaggattcaatttaatcttcaaattctttctcttctcatcactggatcttttccgaaaacaaaagcatgaaagaagtcgtcgacaaacaatcaacgacgaggtgaagcttctgatctcttgtcatcacttgctaataagaatagactttggaaattgataccttgacttcttggaatggcaagacggacctcaaatgaggtgattgaaaccgtcaaaaacgccggaccgtttcaactataacggttggaaggagccaagcaacccataattcgcccagatctgaattttgattcatgtggatgagactaaaacagtcgcccaatcgaaacaccaaaacacttacctgattgtggatggtggtgggacagatcgagaatagaccatgaaactttctagttagaaaagaagaaaaaactgatatcaaattgtttcgcaaatcaattcggtgaaacaaacacaacggcaacagaatagccatgagaaccgccggatacacctgatggcgagataggacagcgagatggatcgacaaaaccggatcacatccggattcataagccggtaaagcgtaccggacggctaaatctcgatcaaaatctctctctctctgaaaagtttagagagagaagagagagagaagagagagagaggtgtttttaaagtgggacttgatatatccctattttcactgatttcatctatgttttaggtataggattttgagtctttatgttatttctcgagtctttttagtgtcttttcaggtattctatgcagtgggtcgataatggagataaggagacattttggagcaaaagctaagaaaaaggaagttaaagacgattttcagttccagtttcagaggagtgttgatcgacacactcctggtatcgatcgaacacactactagtctcgattgacactagtttcggcccagcaaagtcccagatgctttcaagtttacagaagaggaaatttgccccagaagacttctctatttacattattaatccttagatgttttatagggtttatatacattgtttaaacgtaagttttgtttatcaagtttttatcaagctttttgcaaaccctgtttaagagagacataacctattcatcgattgttgtcagagattgattcagttcctaatacaatgaagagatcccttctttcccttaatctgtttgttgtgtttatgctttcatactcaataatgttgtttgctttaatcaatatgtctgagtaatctgcttgttaggaatagggtttctcattagggattcatatgatttagtagattgcccccttgctaggttatctataggattcttcatctttaattatgcttaatgctagatctagagtaattaactagatcttgaatccagacaatagatattcccgccataggtatctttagttggatctattatttgatgagtctagttgataggtgtataataagaatcggcctttttactaagatcaacaattgaactcgttaagaatacatatttaggttgataggttctcggcttctccggttattattagctatagatataggaagttatgcggcacgcccaccggttattccataattagagtttgagtttaagaatggttcgataactatctagctttcattagatctactaaccaatagtttctgagaataccctgttcctagctcttttcccaatcaacctgctgtgtttttactttgtttacttattatttcactcataccatgctagcttaatctcgacatttaactcattgtttgaacaaaagaactcagtgaatttgatcctaaaatactgcaattgatctcttatttgagagagtagttctaggtaatttgaaccatatcaaatttggcaccgttgccgaagttcttgggaatcatcattgagtttagtttagacatttcgtctagttcttacttctattttgttactcacacatttcttgttttcttcttttctgtgtttcaggtgtatgcctaggctatcaaggagcacacaacagaaggggctgatcaacttgtttgttttggattctagaaatcttgaacgcaccaaccgaaaaactcaaagattagcaatggctgacagagtcatccgagctgatgtagaagttttgaaagatgaggatgggcaagcctacaatgaggctagtcagatattggatgatcatggactaatcctacctgaggacaccaatgaggatcaggcacgtctcaatgcgcaattagctgccagagacgcagcagggctcggtgtcgagcgacactaactgggtgtcgatcgacaccttcaggagaaaaatgcatacgcgattggtgtcgagcgacacaacagaggtgtcgattgacaccaaccccaaattcttgtagctattcctccagctgcggaaccacgttctactcttgcggattttaacaggcctgacctgttctatgcaaatcgatcagcgattgtacccccacccttctagagaacgattatg

SEQ ID NO: 5591 - DNA, 1982 bp, Arabidopsis thaliana landsberg
atttagaactaaagaagagagagagatccagtttctcgtcccagttaagctatggccatgttcaaaaccttatcttttttgttccttttgtgctttcagatacatggaacggtggctgcagatgaaaattccttgttttcattcaatggttttgtaaaatctccgagctttgacaagagggttgctctgtttggagattcgaagctggtcaatgacagttctttgattcagctgactgactcagtgactcgaagcgttggtcgagtcgtttacaagaaacccatcaatcttttcaaaggtaaacagaggaattcgagatctttctctactcacttctcgttttcttccatgtccaacgagattggtgatgatgtcttggcttttgtaatggttccatctagtttggatcttagtctgtttggtaagaaggacaacagttcctctgctttaggttttttatcacaatatgcaaagaacgagacagttgttgctgtcgagtttggtatctccaggacaggaaacagtgcaagaattttagttggtagacctgaatctgctgaaattagaaacctttcgtttgtgggtgacttgatgatggacaatggaaggactctgagctgtatgattgagtatgaggcaagttctaagagaatgatggttcgattcagaaaatctggttcggtaaagctgtttgatccgttcttctctttctcggtagacttggccaagttatggaaaggtggtgaagtcatggtgggtttaagctctgctaatgggaactcttccaagccacattttctccattcatggagctttgaaatatggcatcttgatccgatatgggtgcaaccagcgccattaggaccaaatgaaggtttgaagccggacgtttccacggaaatggaagagggccgagaaaatagtgagtgtatatggagaatgcttggtgctctggtcttggctgcagtatgtggagccataggggcaatgtcagctatgtatctttggactatttgcagtgttaggcggtcaatggccgtggttccagaggaatgtgcagtgagcattgtggtcgttgcagttaaagatggcaagaagtaatgagaagtttgtttggctttggctttggtttaagaaggttgtcttgttgtagtgtaaatgtagtaccttcttccacttcctctggtgttatctttatttagtgttttcttttatttgcttcgttagttgcaggtttcacatgtacaatctctatgaaagaagccgtaagcttatttgatcttgcaaaataacttaatttattgatcttgcatttaacatgttttatatttctggatcggaagcaaaaatcaacacccactgtctttttctcactttgatgctgactgcaacagagtaatgtgaaccgagttaaaaaaaaggtctctgttcagtcatctcgtgaacaaagatcaaatctctagaaagaagacaacattcacatgttaccagagagtagaaagaaagaaagttaatctaaacctcaacatgggacatcaacaacaaacaagaggtatatcaaggagaagagcagatactaaagatccatacaaaatgttattagaacttatttctaacctttcttttaattgatcctccctaatcactagagtactaggtatcatcttgagagcaactggagtggtaagcttcacaaacgtccaggtttaatgcaagaggcaattcttggtaagcgcggtgtaaaggaggtaagattaacgcagactttttatccattgctaatagccttccacatttactgcatcatcagaagagaaatgaaaagttagtccacgggaaacaaatgtattagaagaattacggagagtctgcatacgtgcaaggtttgctaaatacggattcaaaactgcatatccatagctgcataagaagaaaagaaaggtttaattaacttccagacaaaaaaggttcatgttatccag

SEQ ID NO: 5592 - DNA, 4491 bp, Arabidopsis thaliana landsberg
  unsure (1)..(4491): unsure at all n locations
acgttttgtatgcaaatctaatcttgtatctttaatatgttaattctgatttagattttcgtgtctgcaggaatatgagaacaatttgttcctgcaatgtgataaatgtagaatgatggtattactttctctgagttgttcatactatgatatatcctttaagatctatactctatagtggctggcatcctttcttttcctaggtgatgttcagttcaaatatttttttgatcctggactaggtccatactagatgctatggccagctggaaccccataatggcattctgtggttatgcaacttatgtcgtcctggcgctcttgatattcctcctcgatgttgtctttgtcctgtagtaggtgattaacccaaccctttcggtatggactacggagtctctatattctttattaatagccaacaaaatatcttccagggggcgctatgaagccgacaactgatgggcgctgggctcatctggcttgtgccatatggatcccaggtataatcttcaccatttgatttgttactctgcatgtttctgctttctactaaggattttggacgctttacctttattatccaagttgtatgagcaatgattgtgatattatccagaaacatngctntcattggatgtcaagaagatggaaccgatcgatggggttaagaaagtcagtaaggtttgagctctattctttttcagtttcccttacatcaattgtcttaaatggagttagttaccttttcaactagagaagcggagcatagtctaattttcagtagccatgtgatgcttgaatagttgtctttttttcttcacacttcaaaacaggatcgttggaaattattgtgcagcatctgtggtgtatcttatggagcttgtatccaagtaagaattattttgatggcaagaaaaagctgaatcattgtgtaccatttacacatgacaatatttgaaatcttacataaatattagtcactgataagtatttaactagaacaatgatgccgattttcagtgttcaaataattcttgtcgagtggcatatcatccgctatgtgcacgagctgctggtctctgtgttgaggtactttcatatcctacaggggatcataagattctgcgtttattatacacgtttactgaaaacacagatttaacaaaagagctggttctaactatgatagcattcttgtaatgtcattgtagcttgcagatgaggataggctttttcttctatcaatggatgacgatgaagcagatcagtgcatccgcctgctttcattttgcaagaggcatcgacaaacgtcaaattaccacctagaaacagagtacatgatcaaacctgctcacaatattgccgagtatctcccacctcctaatccatctggctgtgctcgcactggtatgcagttgcattgatcaatacttgctacaaataaaagtgtagatttactgcacttatgtgggatggaattgttttgctcaaaattctcttacctcacatgtggcaatgtgtgtcttttgttcagctttaatgatgttacgttcttttatattttattctcagagatctaatctcatgtattctcacattgcgtttgcttgtattcatgttcacatctaaaattcataaaagatggcactgtataggtcagtttatagctttatcttgcaggattattaacgtattttccctctgtttctggtagagccatataattatcttggaagaagaggacgaaaggaacctgaagctcttgctggtgcttcttcaaagcgattatttgttgagaatcaaccgtatattgttggcggatactctcgacatgaattttcaacctacgaacgcatttatggatcaaagatgtcccaaataactactccgagcaatattctatctatggccgagaaatatacattcatgaaggaaacctacaggaagagattagcattcggtaagcgtttattcagaaatcgtaaaatatgctacaacttgtcaaagttgctgctatgatgcctcggtttttcatgcctttggggggtttttgaggatcaaaaatttctgtaagaagataaaattggtgggacttttttttctacttgaattcttgggatgtatggtgcattactgtgatgggtctctggaatagtgatcatttttacttatttaggattagacgggaaacgtttcccataaaacctaacatctctatcataactaataactaattttatctgaaccttttttgttttcctttaaatgatttactttcttctacagggaaatcgggaattcatggttttgggatctttgcaaagcttccgcacagagccggagatatggtaaggcattcttatattttactgtccattcttgcttagtataacgtcatgactgacaatgttgtgaattgggtgggtgcaggtgattgagtacactggtgaacttgttaggccaccaatagctgacaagagagagcatcttatatacaactcaatggtggtacgtatctgactttgtacattttatacttcttagaaaattctgaacaatattggacctaattatcagcacattgatctgtggcttttctcatctagaccgatatatcactttactttgatgtattttattgaatgatttctctggctcgagcccctgaacattctcttagcattccctttaccactctgtgttgttagtatacacatcttcctaactttcactctcttatttttagaatctgatatttttggttatgagtactgagtagttagttatcaatttaccactcctttatgatatagggtgccgggacctatatgtttagaattgataatgagcgggtcatagacgcaacaaggacaggaagcattgctcaccttatcaatcattcatgtgaggtatggtcaagcagttttgacgatttgttatttaatttacttagtatctgcaatatcatcacattacttatggatatgcttctgtacagccaaattgctattcaagagtcatcagtgttaatggtgatgagcatattatcatatttgcaaagagagatgtcgcaaaatgggaggagctgacctatgattataggtttatcttcgtgccctttagttctcgggtgactttgaaattccattattacctgattctttatctataaatttgcaggttcttttcaattgatgagcgccttgcatgttactgtggtttcccaagatgccggggtgttgttaatgacacagaagccgaagaacgacaggcaaatattcatgcttctcgctgtgagttaaaagagtggacagagtcctgagaggtaagctatatttgttaatatgttaatttgggaagagtttgttctttgcagctactgaaagctagtttccaggttagtagatgtcttatctccattgaagaagatgacttctttaacctgtcttgatatcttcgctaacggcgttatttcatggtgaggaatgcattgcaaataggattcattagtcacaaaataaaacatttatctcaatgcaagttgtctaatttacttgcaaaatcctgctgtttaccattgaatggaagctcctaaccatctgtttcgacttgcatgtgcttacttgatcttcacatctgccatttctacagtctgcacgagatatttgtgaggacatcacacatttgcgaattctcatggttctggctaactttcccctctacagatgcagattaatctccctgaacacatactgttactctcaataccctgacttgagatcgttcattctattccaaggttttgtaacaatccatttcttgtacagatagtaattatttcttactcagtaaagctttttgtagcaagaggcacattacaatctttgggtaaatgaaaaaagcagaattctcttatttctccagactcaaatgagccttaatctactgtttcacttattgatcaggttctttatacacgatggttccactaatatccatatcatcatgctaccaaacatttgatatcagaatgtgattagagatttaacagaggatgatgttgttgagtcagaaatatgaggtgcattgtttttttcagtctgacacaacatgtgaaggaagaagtccttaccactcctttaagtcctctgtagtctagctttattcccacctttttttggttatctgtgcatgtgacattattggtcgtatcccttgacccattccctcacacgcacatacacaaacgcacgtgtatacatgtttttgtgtcactgtgtctgtgtatatattactcagctctggagtatgatgcttctgtagttcagtttacttgtgtccaaatgtcaaaacctctcaagttccttctttggtcatctcttgctctcttgcttcttcaaataggtaaattcaaagcttaaaaaaattacattgtaattttacatatagacatgtgattggggttgtatgtataggttctggggcaat

SEQ ID NO: 5593 - DNA, 812 bp, Arabidopsis thaliana landsberg
gctgcactttcttgaacacataaaagaccaatgtgtaggcatctcaagatctcatttcttgatcctgcggttaaactcggatcgatcacgcttagtatagtgtcttctctccagcttctccacacctgaaaagaaaaacagaatcacaaattttatcaacaagatgaccaaaactgaaaccccatttactagcttggttttggatactgtacttacccaactaagaagatcttctgcatcttcgtcaccattcgatccaccattgttgtttcttttacctgtaatgatctcaatgactaatacaccgaagctgaaaacatctgttttcacagagaattgtccatgcattgcgtattccggagccatatatccgcttaaaattgaaatgataactggtttatactggtgtttcctggatttataagttagttaaatgaatttacttactaagttcctgcaatcctgcttgtgaatcgatgtgtcatggtttggcctgtgtcaaagagtttagctaatccaaaatctgcgattttcggattcatttcttggtccaaaagaatgttgctagctttaagatcacgatgaattatccgtaaacgagagtcttcatgaagataaaggagtcctctagcaattcctccgatcattttgtaccgcgctgcccaatccaaaagttgacgcttctcagtatctgcaacggcgcaatggtcaatgcagagcggaagaagaatggtaggatcagatcgagtaaaacccggaaaacgatttaccgaagataaattggtcaagaatagcgttaaagatgtattcag

SEQ ID NO: 5594 - DNA, 1492 bp, Arabidopsis thaliana landsberg
tgcttggtcttgaagtggaggaagaacaagtctggatataaaaacaaaggtaacacagtgttcttcttcgtgttatcgttatcttgttactaatggattaactattagttctgataaatactatctgcgtattcagttcttgggaaatcacctttgtcgggttcaattgccgaggatgagttctcgaacacagaatcactcttagttcattttgagactctaaagacagcaacagataacttttcttcagaaaacgaacttggacgtggtgggtttggttcagtttataaggtaagcttcttcgaacaaacttcttaccggtaactttggtttatttatttgagagatttataaacttgggattatgtatctcagggtgtgttccctcaggggcaagaaatcgcggtgaagagattatcgggtaattctggacaaggagacaacgagttcaagaacgaaatattactacttgcaaagcttcaacataggaacttggttaggctaataggtttctgcatagaaggagaagaaagactccttgtctatgagttcatcaagaacgctagtcttgacaatttcatcttcggtaatttttatccaccgttttctccatatgatgatcctaccgttctgttttttctgctctgtgttgatctttacgctgttacagatcttaaaaagcgtcaacttttggattggggagtgcgatacaaaatgataggtggagttgctagaggacttctttatcttcacgaagactctcgttaccggattattcaccgtgatcttaaagctagcaacattcttttggaccaagagatgaatccaaaaatcgcagattttggcttagctaaactctttgacacagaccaaacttcgacacatcgatttacaagcaaaattgcaggaacttagtaagttacttcatcttactaacacattaaccaagaaacactggtataaacctgttatttcatcttgtagcgggtatatggctccagaatacgctatttacggtcaattctcggtgaaaacagacgttttcagcttcggtgtattagtcatagagatcattacgggtaagggaaacaacaatggtcgatcaaatgatgacgaagatgcagaaaatctccttagttgggtaagtacacaaaaccaaccaggtaattgaggtttgagtttgattcatcacgttaactgaatttgtaattctgtttgtttctcaggtatggagatgttggagagaagacattatactaagcgttattgatccgagtctaaccacgggatcaagaagcgagatcttgagatgcatacacattggtcttttatgtgttcaagaaagtccagcgagtagaccaactatggattcggttgctctaatgctcaatagctattcctatactctcccaacgccttcaaggcctgcctttgcgttagagagtgtcataccttcgatgaatgttcttcttccacagaaccgttattgatg

SEQ ID NO: 5595 - DNA, 1365 bp, Arabidopsis thaliana landsberg
gactagacagtcattacaatcctgttagacaaatccggcgtacagtgtgcacttccgtagaattgcggttaccctgccacacccgaaccgctcccttgagcgtattttctatttggcccaccagctgcagcaatccctttgagtctgtccaatagttctatctgcagacgatcaaactcatctctgtttgctgatatatttttaccggcttgaaaagacagagttggggtcgtctcttttcttccatagattatcatgttcgagtaacgaaacatacagtgtgtgtaccacacaacagcttgatttgtccgcggacactgctcgatgaggtttcttgcagctatctgaatgcagctgagacaatcatctctttttacttctcttctacaaagaccaattgcataagctctttctccagatgaatctccagaagagaggttgtagaagccataaggtttggatgtgagtgacgagagagaggagacaaggctgttgagattaccatcgaaagtgctgttggccgtgaaattgcctccactagctacacagttgaaacctggaggaaactcatatttatccttctgtgctaagcagataaatggtacaaactttaggacacaagcaaagaagaaaaagataactctgacatgttccatggacgcttgaagcttttttcttcttctgtaatctatgagaaaaccccagaatgtaacgagtctaaaaatggaagaagtcaatctaacttgaccttggaattattcaaaagcagtttggtctttgaactaaatcaatatccaacagcagaaagaacacaacttgttgatgaaaaacaattttaaaacccagtagcaaacacaagtggagtctttatgaggatgtgggggtccataatggtaatagattcaaagactcacaatatgaaaccaacgacttggtttgaaaaaaacgttatttaaattagaagtgttcattgctcacttctttccccacaagtgccaggaaaaaaaaactaaagagtttgaatagttttcaaacctactagaaaataagactaactaggaaccatctaatttaatataagccatttatttttacaatttcttttacttctgtagatgattagtggatcatctttcaactctcatatttatatatgtggactcaatataaatctcttatccaattttctaaacttactgacattatatacttttatcaaattgtaccttcaaacgaaatcaagaatcgataaactggaagaaaaaaatgagacaaaggaaaaagtatctcacagcttcacattcgtgttttattcactacaagatcaagccaggctgcctgaaaaatcacacaaacaaaacccag

SEQ ID NO: 5596 - DNA, 825 bp, Arabidopsis thaliana landsberg
ctatcttgaagctttgcaacttgcaagtagtaaaatttcgttcttgaattcaatgtctccttgtcctgatgtacacgactatcttttcaccgcgatttcttgcccaccagaaaacacaccctaagacatagataatcctaattttgtaaatctctaaagacaatccaaagttacagttaaagaagttttctcacagaaacctaccttataaactgaaccaaacccacgacgtccaagttcattttctggtgaaaagttatctgttgcttcctttagagtttcaaagtcaactagcaacgaatctgagaactcattctctgcatttgattctgacaaaggacaatagttctcaggataaatagtctatcctttgtgacaagataggtataacaagaagaagaagattgtgttacctttgactctacctccagacttgttctttttccacctcaagaacaagcataggcaaattacaagtaacacaacaaaaactattgggatgactatcgcaataatgactttagatccaccttttccatttcctgcaatgaaacattcaatcttagagacaactgctgcagcagaacacattcaaatatttctatgcacctgttctctcagttcttgcagctgatgttggggagtcagcaggctgaatagcaggtggatcaggctctagatcggcatcgaactcgtagaatcgccacgtctcaaatctgtagctacaactaggaaaacaccactaagaccgaactgaccagcacaacaacctgggatcttttcataaccaaagactagacagtcattacatcctgtcagacaaat

SEQ ID NO: 5597 - DNA, 1037 bp, Arabidopsis thaliana landsberg
ctagtcggtgctaccaagtctattgccaacccctctttgccttcgtcgagaaggaagcctctaggaggtttccagagagcgaattcgtcacaaaagagatcaagatccaactcttcccggggaagccctttaacttgaatctcttcaggctcgtatggaggacgttcttcgtgataacaacaacgttgatctcaatgttaatgcctttctttaacgatgtagtcggtctcttgggggccatcggtttttggcctttaacggtttatttcccagtggaaatgtacattgcacagaagaatgttccgagatggggcacaaagtgggtttgtctacaagtcttgagtgtgacatgtctttttgtgtccgtagccgcggccgcgggatctgttattggcattgttagtgatctcaaggtctacaaacctttccagtctgaattctgagatcatacgggaaaaataaactcctgctaaaagggttaagattagaattgaatgttttaatgtcatatttgtattagttaactttgtgtaagtgttcaattataaatcatgtttctaccgagaattcttacaacatggaactatcaatgattaaaagtagtcatgtataaggatagctttttcgacacttgaggtagtagagatgtattaaacatttaatacttataattaattttagaagtctataaaccaaaggagctacaagatgttttgtgtttatctccaaaattcttcaaattcttaaatcgtttatcttcttgtaaacactctccaaaactaaagatcccctagataaaattgagctaacaatgcctaatgaagccatacaaataagataatcaatgtttaccttgacaaaacaataattaaaatttaacaaaagcaaatcgagaataatgatatgacactgaaaatattctgatctttcttttacaaagcaatcgatgaattctcagttagttacacaataaataacattagttacattcaaaagctatacaatcaaatgagtgaaagtacttaagaataatatca

SEQ ID NO: 5598 - DNA, 816 bp, Arabidopsis thaliana landsberg
caccaaatatacagaagaatttgaaacagagagccaaacaaaaaagccattgaagctggaagacaaaaaaaacagaggagattgaagaagaagagggagtaagaagatggagagttacctaaacgagaatttcgatgtgaaagcgaagcattcttcagaggaagtgcttgagaaatggcgtaatctctgtggcgttgttaagaaccctaaacgtcggtttcgtttcaccgctaatctctctaaacgctatgaagccgccgcgatgcgtcgcaccaaccaggttttgtctcttttctttttcttctatgtcatcgttgttaatgattttgttgaaatcttcgaacttttagatggattttgtgtatagcgatgaaggatcttaaaaactttctatatacaggagaaattaaggatcgctgttcttgtttctaaagctgctttccaatttatctctggtgagtttatatgtgatcaaagttgctaatttgtgtcaaagtttcaatttttgtttgtttgtttgtttatgtgagtttttgttgtaggtgtttctccaagtgactacactgtccctgaagatgtcaaagctgctggctttgagatttgtgctgacgaattaggatcaatcgttgaaagtcatgatgttaagaagctcaagttccatggtggagttgatgggcttgcaggtaagctcaaggcatctcccacagatggcctttctactgaggctgctcagttatcccaaaggcaagagcttttcggaatcaacaagtttgcagagagcgaaatgaggggtttctgggtgtttgtatgggaagc

SEQ ID NO: 5599 - DNA, 645 bp, Arabidopsis thaliana landsberg
  unsure (1)..(645): unsure at all n locations
gaactgaagtgagtatatgataagattttgttatgtcatttgtgagagctaaagaatctaaaagtttctatctttataaccttttaggtggcgaaagagagcgctgatgtcatcattctcgacgataacttcagcacgatcgtcacagttgctaaatggggacgttctgtttacataaacatccagaaattcgttcagtttcagcttaccgttaatgttgttgcactggttgttaacttctcttcagcttgtttaaccggtaggtttagaaagaataccaattcaatgtctcgaaaagaatcattttggattccttgtttgacacagctcttatgataatcttcaggaagtgctcctttaactgctgttcaattgttgtgggtgaacatgatcatggacacacttggagctcttgctttagctacagagccaccaaacgacgagctgatgaagcgtttacctgttggaaggagaggcaatttcatcactaatgcgatgtggaggaacattttaggacaagctgtttaccaattcatcgtcatttggattctccaggccaaagggaaggctatgtttagtctccccggtcctgactcaactctcatgaaaacncacttatcttcanctgcttcgtcttctgtcagg

SEQ ID NO: 5600 - DNA, 490 bp, Arabidopsis thaliana landsberg
caatatctgcatcgctatggtcttgtttcgtgaccaacagacttggatgcaaagtagatataacttgctaaatgtctgattttgtgaaataacttatgaagagaaaatcttcatttggtaagagttgttttctcaatgtaacagtttactcatcattttcaaactccaactctcacagaacacaatcaagttacaaagtgcagatgcttatggttgggaagctttacctaacaatggtacaaggcggttttgtcaggaacatagattcgttcttggagttggtacaagaccttctaaaagacaaagatgaggtataataaggacaagttgacgaataaaaaaataaatattataaggtagagaatctttcaaccccaaaaaaacagaccagaaagaatcaaatcctaaatccgaaaaacaaaagaaagcattatgcatagcattccgatacaaaaaaccgacaaatctaagtaactaatagctctagttc

SEQ ID NO: 5601 - DNA, 2629 bp, Arabidopsis thaliana landsberg
gaaaaagttttgaattcatttcctggtttcatcttttttatatatttggcacgaaacatgttgtcaggaaaaggtgagtcaggacctttccttactgcaagcaccaatatgtatagccaataataacttctctaatactcaaatatgtcaaaaatatttcaatctaatctctattttttcttgcattggataaacatatctgcagtgacctctcttataataacttcacatggtctcaaagctgcaaagagaggaagtatgttcttctattcttttcttaagtacttattttaagactttctgaaagcttaaaatatgtattttttgatgcagtaatataaacacatatgcgagctcgcgttcaacaaacagtctgtaagaacatttttgacaatcttatcaatcacaggtcattgtgtatactgttattaactcattgttcttgatacagaaccagacttcttccgtgttctgccataaacctatgccaaaattgtaaggttttgtttagttgtctcttgttttgccaaatgttcagtttcaagtttttggatatgatcttgaaagaaattcattttttgcagataataggtcgttgcatataaactgtgggggacctgatgtaaccatcgaaaactctagaggaaggtttctatatgagggtgataactatggacttaccggatcagctacgaactattatgggaaaaattggggattcagcaatactggtgactttatggatgatgcaataacagaagatacatacacagtttcatcagaatctgcagtttcagccaaatatccagacctttaccagaatgctcggcgttctcccctgagtttggcttactttgccatctgttttgaaaatggaagctacaatgtgaaactccattttgcagagattcagttctcagatgaggaacctttttctagactagcaaaacgggtttttaacatttacgttcaggtacatatagccttttggtgcagattccttaagacccctttttcagcgtttgtagttgattttttgaagtttgaactttgttatctctttaggggaagttgatttgggaggattttagcatcagggaggaggctaatggaactcacaaagaagttataaaagaagtgaacacaaccgtgactgataacactttagagatacggttgtactgggcggggaaaggcacgacgatcattcctaaaagagggaactatggctctcttatctctgcaatctcagtctgtcccagtaagtaaaatctctgtaaaagaaaacattaagtttcactcagaatcctaattcttttgttgttcttgttttatcaggttcagaatctgaatgtggcggtaagaggaagaattgtctagtcgtttgaatcctcaatttgtctaccttttatatctgaaaatgaatcactccttttcactttctgcttctgtcaattttcagttccggtgcaaattcatccagtcacaaaacaacaacacaaacaaagaaaatatcatctcattctcggcatagcagccttaatagtctctctttctttcttgatattgggcgctttatattggagaatatgcgttagcaatgcagatggagagaaaagaggtaacatcggttaaactttttttgtcggtgtttttggtaaatgaaagctcaaagagatatctatctgataacaggttccttcagtttgaggcaactaaaagttgcaacagatgattttaatccgttaaacaagattggagaaggcggcttcggatctgtttataaggtacaaaagagtctcaagctctagaaaaatcaatgttagtattcttaaaaacaggtaacgttaaaaccaaaactcaacaatgcaggggcgcttaccaaatggaacgttgattgcggtcaagaagctatcttccaaatcatgtcaaggcaataaagagtttataaacgagatcggtataatcgcttgtctgcagcacccgaatcttgtgaagctttatggatgctgtgttgagaaaacccagctgcttcttgtctatgagtacttggagaacaattgtcttgccgatgcattattcggtaaagttctgcttcttcttcacctctgtagatgatcatattgatctgatagagaccaaatccttttactgcagtctcttctatctttgagatgattgtttgcttataactgttgggtgcaggaagaagcggtctgaaactagactggagaacaagacacaaaatatgcttgggaatagcaagagggcttgcctttcttcatgaagattcagcggttaagatcattcacagagacatcaaaggaacaaatatactgctagacaaggatctgaactcaaagatatcagatttcggattggccaggctacacgaagacgatcagagtcacattaccaccagagttgcaggaacaatgtcagtcttacagtcagtcatatacacataatccatacttatgataataatgtctcagtgacagttaatgttgttatggttgcagaggatatatggctcctgaatatgcaatgaggggtcacctaacagaaaaggctgatgtttacagcttccgtgtagtagcaatggagatcgttagcggaaagagcaacg

SEQ ID NO: 5602 - DNA, 1626 bp, Arabidopsis thaliana landsberg
gttggttcacatctgagaactgaatctctgcaaaatggagtttcacgttgtagcttccattttttaagcaaaatgcaaagtaagccaaactgaggggagagcgccgagcattctggtaaaggtctggatattttgctgaaactgcagattctgatgaaactgtgtatgtatcttctgttattgcatcatccataaagtcaccagtattgctgaatccccaatttttcccataatagttcgtagctgatccggtaagtccatagctatcaccttcatacagaaaccttcctcgagaattttcgatggttacatcaggtccaccgcagtttatatgcagcgatctactatctgtggaaagtaaacaatttccagttcatatgcagaaactcgaacaatggtatttggaaatcaataaaaagcaaaagaacctacaattttggcattgctttatggcggaacatggaaagagtctggttctgtatacagaacaatgagttataacagcaccccagtagcgagtggttttaaataatttgccaaaggttttccaaacgtttttttgagtggagctttcaaaagggttaaattcccgccagggaactatgtttaaaggatccagaaaatttaagcagatgaaaggcggtagttaacaacagaaaaaacacactttctctctttgcacattggagaccacgtgaaattattataggaaagatcactgcacatatgaatattggtaaaaggagagattagtgtaataccgagaaatgacttgacatatatgactgctataaaataagaatggtcatacatatttgtgcttgcagtaaggaaagctcctgtttcaacctttccagacaacatgtttccagctaaatatctgaaaaatgaaaccaggagatgagttcaacagctatagtaaattttaatagcatacctaatccttttgatcatctgacactttaagacttacgtgtattttggggcagttgcatatgctggtatttctccagtcagcctattaaaggaaagatccctgtaaaaaaaaaaggcattataagagactggacagtgtttagcaagatgcgtggtgataaaacatgagacttacagagtcattaaactgggcagatcccagatactggttggaattggtccagataagtttatgtttctcaaaaccctgaaaatgatcaacatcagtctaaagtctaaacacaagtaattgaccatatgatcgtatctggacctgagacataaaaatgtactattacatacaaatatttcaggctcttgctagttatctgaggaacatgtcccaatcctgcaaccgtgtcactgattctcctgcatagaaagaaaaggccacaatttcgtttcaaaaaagaacataggcttctgcaacttacaaaattattgcttcaacaaatatctaaagaggataaaaaacttacacgtcgatcaaattctccagatgaaaaatggagtctggaataggtcctctaaggccactcgcatagagttctctgatacaacgttaacagcacaagtcagaaaacactgaaatgtacaaatactaactatttaagcgtaatgaaaaataaagatactttactcacaatcttt

SEQ ID NO: 5603 - DNA, 1153 bp, Arabidopsis thaliana landsberg
  unsure (1)..(1153): unsure at all n locations
ttatcctaattgtttacttgttcttgttttaccaggttcagaatctgaatgcggtggtatgaagaagaatttctcaagtctttgagtccttttgttcctactaaagcttgaatatggattaatctttttctctttgttttcttttgtccgccttcagttcaagtgcaattgcttccagtaaaaaaagatcataaaccaacaaaatatcctctaattcttggcttaacactctctcttgctttcttgctcctggccacattctgttggagaaagtgtgttagcaatgcaaatgcagcagaacgaggtattgaattcgctacttaaaaactatgtaaagttctgtttttttttttgaaaataaagagcttaagggacctgatctaagaacaggttccttcagtttgaggcaactaaaagccgcgaccaacgattttgatcccttaaacaagattggagaaggcggctttggatctgtttataaggtacaaaggagtcttcaagctctataaatcaatgttagtgttcttaaaaacaggtgacggtaaagccaaaaatttgacaatacaggggcgattaccagatggaacattgattgcggtaaagaagctatcttccaaatcacatcaaggtaacaaagagtttgtaaacgagatcggtatgatcgcttgcctgcagcacccgaaccttgtgaagctttatggatgctgtgttgagaaaaaccagctgcttcttgtctatgagtacttggagaacaattgtctttctgatgcattatttggtaaatttatctgatagatgattggaccaaatcctttgactgcattctcttctgtcttgagattgattgtttgcttgtaaactgtgggagcaggaagaagctgtctcaacctagattggggaacaagatacaaagtacgcttgggaatagcgagagggcttgctttccttcatnnnnnnnnnnnnnnnnnnnnnnnncaccgagacattaaagggacaaatgttctacttgacaaggatctgaacgcaaagatatcagatttcgggttggccaggggccatgaaggcaatcagagtcaaattacccccagagccccaggancaatgttagtagtatattacgtcaaaaagatgaattcagcataagatactgttt

SEQ ID NO: 5604 - DNA, 1624 bp, Arabidopsis thaliana landsberg
gaaagcacttaggtaaaaaaactgtaaccatgccaaggaaaaatcatcttacatttactttagctggacctacccacgagcctccagatgctatgcttgaaactctctccagtctatctgaatccctagtcaaattgggtgcggtctctgggacatcagtaaccattccttttgtctgcaaagaaaaccgacaaatactcagggaaattttaataaagtcgataagtagcctctacctatatccagaaacccaggaccctttgaaagaaattgattgctatctaaaccgaaaaagaaatgttccctacatttgtgaacacttagaacagagaaatgtttagtactcctgaaggttacatttatgaacacttagaacagcgaaatctctagtagagctgaaggttagggtgtatcatcactaataactttcagtggctgcaagtttactttggtcattgcttacccgtcccgactgctgaaggcgctgcctttctagatacttgggattcacatggatgctatgtggtgggcgctgagattgcggctcagctctggctgtggatacaacagctgctgaaccatcacttttagcattaaagccaagttctttctcaataagctgaagtgtttgcggatgaaagactcctttccaggttccaaaaagatgccgcatgttagaatgcataggagggtcaacttgcctgtaagccttaacaaaaaccttcagagaagtaaaaagagggtgatcagagatgaatttgctaggaaaaaaacattctataaccatgactatcaacaaagcaccaaacctcaggcagcctggcaccaaagtacttaatgtaatcccttccgatgttcttcacaatgctgtctaacaggtacagtgttggcagcttctgatcacttggtacctgcatgatattcttcaaatcagataacccagaagaaaaaaggccaatttgatctcatagagagtaacatcgagatttccacatgagcctctaaaggtaatgaaagaaatcaataacttaaagtagaatcaaaagcacagaccaagatgacattcaagctaatactaacacatattctgacaactagaaatccaacaatagacacagataaccattagacgatgtaaacaacactgcaatagcaattcttgtcttcactctccacacagacttgatggatcaggctccttctattgagtgcttccttgctacccaaagactgaataaaagttgacttggctttgtggagagcatgcggtaagcagaaaccgccaacagaaaatccaacctcaataaaaacagagcttatgaaagcccttgctaaatggtaaagtgagatacaaaaaactctaacgctgataaagagactacacactcatataaccaaaactcagtacaatcacatgatgagctgatatatgcattcttgatatatgaacatgaacaaaatggttgcatgggcaacagctatttttttagattgttaacagcattgtgtcagtactatgaactttgttcaaagaaatgatttgcgacttgatgaagaaatatataaacacatacatcccatacaaggatactagggttgattcaaaaactcaattttcattgaa

SEQ ID NO: 5605 - DNA, 3869 bp, Arabidopsis thaliana landsberg
acggcaggtctctcatatatgagtagaaaatatggtaaatctatagtttcattctctttttgtcaatgcgacaatgtcactatattaaagtgataaatatctaatatttgatatattttagcagatgaacatacaatgggcgtcgatacgaaaaaatccttagaaataattcatcttcgtggtaccttagctgttaacttaagaccatatacaaagatcgaggtgaaaatcatttgtaactttgattgtaaatttttgcttacaagacaacattcttacgtaattagaatgaagtaagagactaaataatttataaaatatgaaaatgtaggatcttgctgatatgatgacgaaaggtacaaaatatgcatggggaaactttgtaggtgttgttagatttcctttatgggtaagatcagaagctgattcattggaatacgtccgacgagccagagctactatggatagaaaaatactttccctagaagcgtttaacttttacggagttatcaaattcaccatgaatttttttggagaaaaggtgaagtatgaaatcaacatcaactatttgactcatatatcatattctgattataaggagatatataacaggtagtacaagctgtttcaaagaggttatatgatcatacaacattgacatattcaagtgtgatgggtccaaacgaagatataagtatttttgaccatccaatattgtatgtcgcagcaagtgcattaacaggatcacaagtaagtatatagcatatgaaaaacgtcttatatcacaagtataaagcatagatagatatttatgtttgttgttttcttttgctgaacaaggtattcaatatccatatcgtgagctacgtgaacaagattatcatcagtttagctgtcgatgcaactgtgattccagatcctcatcgactatgtgatgatatggtagaatcgcttaatatcatcaaatctgctgcgttggagagaggatcccatatttaaaggctcgaggctagctagtgtcatctgatgtactcgagcatagctaattcaatatctaaaatgaagttttatgttagaacagaaaatttcaaatttggtgaagtgttttattctcttagtttagtttgatgcaaaatgaagttgttttactaatcaatcgattttattgatgcttcttccttatcttaaagaggaaatgagtaatacactatttccattggatctctcctaatgaaaccagcttctattttctgtgaccatctagagatcatgtgcaaaccaaaccattagctgaacacgaaacatgtagagagtatgtatatatacagtaagctaaaacaaagatttaagtgaaagtataaaaatataccctattcttcgttaaaactttactttcttcagtctttgtctaagggactcgatggcgttctgtatcctgttgccttctctcattctcacttccagagacgcctcatgtaagttttgaatccctctacccaagtttgcaatcgaaggagctgaaggaagagacatagctgcacattcgatcccatctccataggcgaacaatcccgcacaagttgcaaggctggctccaaatgtcaccaatggtaaggtaccgataggttttgctcgtcttttcctcatgatctcatagaatgcagttctcatggcagataaacttgtcttttctacagaagctataatgctatgtgttactgctctgattttctcggcggataaagatgcttttaccaaagatgttgatttggctccagaactagcaaaacccggggccattgctttagacggaaccgccactttggtaaatgcaaatgtcactgccttatgggtatgtgtcaaaaagaggttcaatgatcccgggactttgaaagttacaatcttgaagaaaggagaagcagaaatggccttggatagtgaagaagccccccagatagcagttgcaccagcaccaactgctaccaccggtttatcagataacagtcgtttcaactttgaatcattagtcttctcgtcgttatcaaaatcttgtagcatattctcagacatatctttgacttcttgaggaacacaagttttccaatgcttcctaagacctgcgaggctacatgcatctactattgctactatgttcttgaactttttagcctggttacgaagaagatctgccataagtgcgtaagatttgtcttcagaagagagctgtgaaaactgaacttcggttcggcttgaacttcccatgttcttgattggtaggcgaccagcattgttcaaagcaattcttagaccttcaactgcaatctggaaaaggtaaacttcagaaataacctctgtatccatagactcccctctattaacatcagacaacattcttctggcattggctagagctttcccaatagatgggagatcactgaatatatcatgaaggtcaacaagcaagggataaatggtttgagcaaatggaggaacctcatgactacaggactgtatctcactagaaactccacttgcaacactgcttgatgggctaagttctttattgacgtgattcatctgcaaagatatcgacttcagcatccgtgcctggatatcattagttatcagaaaccttcgcgagcttgaaaatatagcagagccattaagatgtgatacgagactattagctagactttgcatcttgcctcctgcatcttccacggcagcaatatcaacaaaaggagattccagatccataaacgacgaaccaacctccccagccacccttttggcagccaataaatgaccattaaaacttgtcccgaaaatctcccttaaaaccacaatccctgaaatactttcatacttttctttgttaaccttgtctacaaaacactgtataagaactttaaaagctgatgtagggattgaatcactaatcccatctcctaatacactctcttcaacttgagcttccccaaaagctgatttgtccacttgagcaactaccgcaccaggacgaatttctcgtataagacactcagcatcagtagcagatctctctgataaattctgagcagcaagtatgtagatagttgaatcatgctcaggaactctaatagcaaacacaaagttctttgtactctctggtaacgaaagtctatgaacaagctcctttgattccttcaagtcactgttttgaaaaatcgaaaagggccatatattttgaagactattcgcaaaaaaaaatgccaccattatcgaattcgactccaaagacagagactttcaacctcagtaaaccaagccctccaaggcaaaccaaacgaatccgagaaaacacttagatcgaattcaatcgagctgggcatagataaagcaattcgtctactgaatcatgcaggcaatttcgtatctacttataatcgaattttgaagatcaaaacgagcacacagatgaatcaacaaaggcagatggagagagaatttaaaaaaaccaaccgggaaattgagaatcacagcagacggaggagacacatacactgatttcgagattagggttccgattagtatcaaattcgatggttcgaacccagtaatggattcttcaattcttctctgtgtcctttttggtcgatgaaacacagacgacgaattcgcacacacaacacagtctatattgagattccggttagtagttattcggtttggttcaagttggttatcttcattttctttatttagtcggttttgtattagaatctgaaagttattaattttggttcaactttgaataaaattagcaaagtttatatggatataataatcaatgtacagtaattaatcttataataatgtaaacaatttat

SEQ ID NO: 5606 - DNA, 2791 bp, Arabidopsis thaliana landsberg
  unsure (1)..(2791): unsure at all n locations
ataacaacttttttaatcaaatcttgacttaatatataagtatacgattttgtaattcatcagcactaaatacctcatttgtgcctacatcttgattgggtctgaaaaagctaaccactttacatttgtcggcactaaagcttacagtcatcaacaactttaattactatataaatacttctactattcgttaattagacctttaattattgtttctagagaccaaccaaaaataaatcatataaaataaaataaaggccgatatgaactaaactaaacgcaaagaatagttatcgtaataataaacctgaatcccaacgaccggaatcgatgggagggttgccgttgatggtggaggaagtgatcatgacgtcagtcttgaggggcggtgtggagtctggtttagagatgaaagaggcaagcttcacgacggaatcagaggcggatgagctcttgctttgagaagaggagacacacgaacccatatgatgatgatgatgatgtgaaagagagagaattcctgtggtttaggagaagaagtgaagatatgggtttagagacatctaaaaggcatagagagatggaagacgaagaagcaaagatgagaggaaagagagagagtagctttggaatgggagggcttggaagtgaagtaaatggncgacccaaaaaggagcagtttccgatttggtatgtgtcttaattgtctcttcagtgaattcttatttaggttatggcttcttattggtcctcacattcatattgtgggctcccctcctttaaaaataaataataatcaaatcttcctaattttctgattaattattagtcattttgatgatgttgttgtgtttcatgctctcaggtctcacaaatgtatgtcgcaatcgcatctaattggaaatatctagatttttttttttgaggttcagataaatattaagttaaatttcatcaagttttgtttagtatagattgaacttgaagggacatgacaaataaattccataattaaaggaagaaaaaagatcattagatcgttgacccacaaacaaaaaagaaagaaagaaaaagagacaattgggccaactgttttgggtggtatataaatgggccgggtcgttgtagtaataagatccattaaaaaaagaagtcgtctctctcaaattgcaaaatcacccccacaccaaaagacaaaattaccctgcgatttaattattatgaatttatgacggtacctccacgtcaacataatggctgatgccacgtcatcacgcatgttgagatttggtggagagatccggggttcttagaggtatccaactatccatccatcatcggtcagtccccaaagtcggcggaagaagatggtgtcgccgaaaatagcaccgtcgatgctgtcatcggacttcgcaaatctagcggcggaggccaatcggatgatcgatttgggcgccaactggcttcacatggatattatggtacccaccttttattctttactctgggggtgattttcgataggtagcatcaatctctgaattcgagtccaaaacttgcatcgtacacaattcgtgaaatcatcctacacaaggctcgttattttggtcttgcgggaatcatgatttcttttaacaaaatggaaactacacttgttgttgttgttgttgttgttttactatcgagtcttgtgtatattacgttacaatttactaacatgttattcaatttcatcttttcatgatggcaaagaaacttgtatctgctcttacaacgatacaatcatacaaggaccttattttgttcttctctctacttatataagatgcttataattcatttgttattccatttgcaggacgggtaaaatttgctgccttacctgtggattcttattagcatccaaacccagcttgtaacatttttgtttcaagatagtttggtataataactctgtgttgctcccgcaggcattttgtccctaatcttacgattggtgctcctgtcatcgagagtttgcgaaagcacactaagtaacgctctcctttgcttattctctttggctttgcatcatgttcaagttaagtgatgtctgaaactaaaaaactttatccattttccttcatcatagtgcatatcttgattgccaccttatggtgacgaaccccatggattacgttgcacagatggctaaagctggggcttctggtttcacattccacgtcgaggtggcccaaggtattctaccacctttccaaactattcctcatcttttaatggttttgacttggattgcttatttcagataattggcaacaacttgtcgagaagattaagtctactgggatgagaccaggcgtggctctaaagcctggaacacctgttgaacaagtctatcctctggtatgagtttcatcttctgtttggcattatgcttgttccacggtccgatcaggttatcatgcttggtccgtgacaggttgaagggacaactccggttgaaatggttcttgtgatgactgtagaacctggatttggaggccagaagtttatgcctgacatgatggacaaggttattttgggtcttacctataaaaaatgattctacagttcataatctcatattttgatattctcggatgtgaacgtgataggtccgggcattgaggcaaaaatacccaacacttgatattcagagtaaggcctctccttctattcactcagagtttgatctttccttaaactgagtccatctacatgtcatcatggatcaagtggatggcggcttagg

SEQ ID NO: 5607 - DNA, 946 bp, Arabidopsis thaliana landsberg
taccaatatgataaagaatttgattctcaatcactatgcctcatagtattgtctccactctaggatctggtgttgaatgttgtggaattcaaatgtgaaacttgtatctctgctcttagaatgaagaaacaacaaagaagctgactcatatgctaacctttgcttgtttcatactaattatttagtctgctgttttctcatttgcaggacgggtaaattttactgattttagctgtgttttcattacactaaggagtattagcatctggttagtataattctgtatttctcgggcaggcattttgtttctaacctaacgattggtgctcctgtcattgagagtttgaggaaacacacaaagtaatgttactccttccctttgaattaataacatgtgacatgttcttcaagtgaagtgatgtctttgaaaacgttttatctttcccttttatcacagtgcatatcttgattgccacttaatggtgacgaaccccatggattatgtggatcagatggctaaagctggggcgtctggtttcacattccacgttgaggtggcccaaggtatatatatagatagctgtttcccctacaccatccttcaactttttctcatctttatgatctcgacttgtattattcgcttactttcagagaattggcaagaacttgtgaagaagattaaggctgctgggatgaggccaggtgtggctctaaagcctggaacacctgttgaacaagtctatcctctggtattgaattatcgaaattgctgtttgaccagagtgcgattgggttattatgcgtgcttgacctatctatgacaggtcgaaggtacaaatccggtcgaaatggttcttgtgatgactgtggagcctggatttggaggccagaagttcatgcccagcatgatggacaaggttatgtttccaactctggaaatcaa

SEQ ID NO: 5608 - DNA, 3013 bp, Arabidopsis thaliana landsberg
  unsure (1)..(3013): unsure at all n locations
tacacctttcattgataatgcacccttataggaacattttttgtttctcattctcaattgtttatcacgtaggacgtttgggatgaatgcgttgtctggccctattcctaaagaaatcggtttgcttacagatttaagattactgtaagcttaggctgcttcttcattgtttaaatatgatagtgtcttcacattgcttctggaggattctgacggttccttatacactatatatatttctgcagtagtattagttcaaataacttttcgggttctataccagatgagattgggagatgtacaaaactacaacagatgtgagttttctgtcaatctataagtgtttatgtctttatatccttggttataatttagatatgattaaatattaacctttgaaatcatttagcgatcaccgacctcaaaattctagcgcagttgatgactgatgggaaatttcttccatctattgcagatacatagatagttcgggactcagcgggggattacctgtatcatttgctaatcttgtggagctggaacaagcgtaagacatattgaagtcgaatataagctttattgtttaactttagttgcatcttatttttgtaatctatttattactttacaatttagtcttttttgccgtgatgtgattgtttccttaatgtggtaccagttggattgcggatatggaacttacaggtcagataccagactttataggagattggaccaaacttactaccttgtaagaagttttcatttttacgggacttataataggctggttccattcatcttgttttaatatagtctgtattaattttcctcttagtagaacactcttctttatgtttaaatttgggatttaacgattggtacatgttttactgcaggagaattattggaactggtctgagtggtccgataccggcgtcattttcaaacttaacttcgttgacagaattgtatgtgttgcattggtatcataatcattatcgttttactgttgctcttctctttccctttcctcacatattcatattcgatatgtaggaggcttggtgatatatccagtgaaagctcttctcttgatgtcatcaaagacatgaaatctcttagtgtattgtaaggcagctttgattcaacttccgctccaatttatgatcagatttttgtagtgttaaactgtttctctctcctccgtgtatttaacatttatgatatatgtcgcagagttttgaggaacagcaatctcactgggacaatacagtctactattggagaacactcaagtttgagacaagtgtaagtatatatgtcaatctgtttcttcaaatgctctgaaagctgtttcagggtctttccctgtaaaaaatgtgagatcatcactgtcaaaagtcaccgtgagaatacgaaatcatcccatattgatgatttgtaaaagtccccgagaaaatacaaaacaatcttaaattgttgttaattgctgatcgtctaaacaggaatggtttaatgttataacatgtaatgcatgtctgttagcaaacaagtgtaagtaactcgtgtctggtttccagtgatttaagcttcaacaaactacatggaccaattccggcttcacttttcaacttaagtcagcttactcacttgtaagatgatgtgttttctgcttctcttgggtcttaataagttaatatacaactacatgggtagtatttttattaaaaatgttgtcttttcatattaggtttctgggaaacaacacgttgaatggctcctttcccactcaaaagacgcagtctctgagaaatgtgtgagtaacaaaattctttataattgtttcatcctgatgtagactcaagtttcatactgacgttgaaataggttccactcttggttacgcggataacttcgccagataatcaggaaaccattttgggacatattacatattatgtgtattcctaattattgttcttttatgctcacagagatgtgtcgtacaatgatttgtctggaagtcttccttcatttgtcagcttaccaagcttgaaacggtaagtggacaaaacaccatatccaacctatattcacagaaaatttctcatatgtatattcactaggcttcttcatatccagcatgatagttattataatctgtattaaacaaaactgtatgatatttctgcagcaacctagttgctaacaacttcacattagaaggtcttgacaacaggtgattatcttaaatatgttcttgttggtgattgaaacgcctatatgtttctcttttctttctttttattttcctccaaaaggatgcaagatttaatgaatctttctttaatcatttttctttctgtaaaaagggttttaccaggactgaactgcctgcagaagaacttcccatgcaatcgagggaaaggaatatgtaagtgtaacagcaatatccgcttcttgagcaaatgttggaaaaaaatccgctaaattttttctctttacactggtgtctagattctgacttctcaatcaactgcggaggcccagagataagatctgtaactgaagcagtatttgagagggaggacgaggatcttggaccagcttcatttgtcgtgagtgctggtcagagatgggcagccagtagtgtaggactttttgccggaagtagcaacaatatatacatagctacttcacaatcacaatttgtcaacactttggactcagagctatttcagtcagcaagactttctgcatcttccctaaggtattatgggttgggtctagaaaatggaggctataccgtcacacttcagtttgctgaaatacaaattctaggttctacttccaacacttggagaggtttaggaagacgacgttttgacatttatgtccaggtatgcactacttgaccgagctttctgctttacaaattaaattttggtgttattataagcaaccgcctttttaattttaacaattcccagtntaggtcactttttccagg

SEQ ID NO: 5609 - DNA, 299 bp, Arabidopsis thaliana landsberg
caggtgaatccaaccctttttgcttttccatatatgcagtcttcacaagtttctaatgtagaaactttctttttgtctagaagacccttcttcagcaatatggtcatgtttttctgactcatgtgccccaatctcctatgccaaagtacagtatcatcttgtctgtttaccactgcaagtgattcagctataaccggtctccactgcagtaagtagagagtatcatatctccttcccgtgagtagaacgcttccaccagccttgatactgagtactccattttctgatacaaaaacata

SEQ ID NO: 5610 - DNA, 7249 bp, Arabidopsis thaliana landsberg
  unsure (1)..(7249): unsure at all n locations
cgaaacagtgaatcgcaatcgccaacggcggagacgaagagaagaagataaacaaactagggttaatgattccggtttagtgatgtacgtttatatatggcttctaataatggacttaatttagagacattaaccgatcggtccgattaccgaaccgaaccgaaccgagttccgtttcccttaaattatttcaccgatcggttcagacttctctcttcgggttacgccgttaaccgaaattctcggttagatcggttcggtttcctcggtccgaaccgaactcccagggctagttcgtgacgatggagacgggtggtgaaagcgcgtggcaatcacggctcgttttctagcgagtggttcacattgtcacgaccaatctaataatttggttcctacacacacacacactagttacgtttatcccccacgcgcctgtatgcgcgtgtgtttcaaatctacactacaaactcacacgcttgaaatgtaaaaaaccatatatggaattaataattattaataattaatacttttcttttttcgtcaacgttttaatgattttatatttgattaaacttaattacagttaatattgatttccaattgtgtctgaaaaccgttgagaattaaattagcattcgtatatacaaagaactgtatatgctaactaatatgcgcataagagttgtcgaatttttttaatatttgaaaattcaaaatcagagtaagcatgtgaggaatgacattattattgtgttgtgacgttgtttggccgtatattcattcacatatgtaatgaggttttttgggatgatttctaaacttatataaatgggatgatttaaaaagtcttatttgtttcacttgttcttagtggagttcaaatgttgacagaaaccaaaaagattatgcgccaatttagataaacctaaacaacatactatcataagaaaagttgtaattagtaaaaattaatggcgacccaccctgtctattatctgttgactattgaacccaaaaagaaaaacaacttataaacatatccgtgattaggataccataattttggtatcttgttattctcacttcaaaaatgatgattcaccaacatatctatttcactattcgtaaaacgctttcacaaaattcctatatcctcaattatttcagttctatagttttgtgagaagacttcatttgtcaaaagaaacctgttttggtttccgactacttgcccgtgactcctccaatttatgtttcgattagatcggttcagaagaaccgaaccggattgaaccacttgaaatcgtgtttgaatctcaattttaaggagggtcccaacaactgacacatagcatggagagaaaatccaaagcaccccactctcttttctctctcactaatcacaaacttatcagaaccttcaaatacttttacttgtggctcatattttccatgaaaatctcgagggatgagattcaaaaaccctcattaaaaactttcaaatctttcttatataatcatagattccagaatttgacattttcggacaccaaaatccctagtttcttaatggttacgaggagaggatgatcaaggcgccaattctacagtctctattggcttctagagacgatttaactcataacccagaagtcaacaactttggagggaaagagcaagaatgtttatacctcttgaagagatgccacaacatagacgagttcaagcaagttcacgccagattcatcaagctaagtttgttctattcttcttcattctcagccagcagcgttcttgcaaaatgcgctcactcgggatttgtatacagtatgaattacgcagctttgatattcagaggcatcaatgatccttgtacctttgatttcaatacaatgattagagggtatgttaacgtaatgagtttcgaggaagcattgtgtttttacaatgagatgatgcagagagggaatgagccagataatttcacgtacccgtgtcttctcaaggcttgcactcgtttgaagtcaattcgagaagggaagcagattcatgggcaagtgtttaagctcggtcttgaagctgacgtgtttgttcagaatagtttgatcaatatgtatggaagatgtggagagatggaactttcttctgcggtttttgagaaactggaatctaaaacagctgcgtcgtggagctcgatggtctctgctcgtgcaggcatgggaatgtggagcgaatgcttgttgctattccgtgaaatgtgtagcgaaacgaatttgaaggccgaagaaagcggaatggttagtgctctcttagcttgtgccaacaccggtgcactcaatctaggaatgagcatccatggcttcatgttgagaaacataagcgaactcaacataatagtccaaacttcactagtagatatgtacgttaaatgcgggtgcttagacaaagcgttgcatatatttcagaagatggaaaagaggaataatttgacttacagtgcaatgatctcaggacttgcgttgcacggagaaggagaatcagctttaagaatgttctctaagatgatcaaagaaggtttagaaccagatcatgttgtgtatgtcagtgttctcaatgcatgtagtcactctggtcttgttaaagaaggtcgtcgagtcttcgcagaaatgttaaaggaaggtaaggtggagccaacggctgagcattacggctgtcttgtagatcttctgggaagagccggattgctcgaggaagcattggagactatccaaagcataccaattgagaaaaatgatgttatctggagaaccttcttaagtcaatgcagagttcgtcagaacattgagctaggccaaatagcagctcaagaactgcttaagctaagctcacacaacccaggtgactatttgctgatctctaacttgtattcacaaggtcaaatgtgggatgatgtagccagaactcgaacagaaatcgctatcaagggtttgaaacaaaccccaggttttagcatcgtcgagctaaaaggtaaaacccacaggttcgtttcacaagatcgatcgcacccaaaatgcaaagaaatctacaagatgctacaccagatggaatggcatctaaaattcgaagtatattcaccagtacttgacacagatattgctaaacgtagatgaacaagcaaagaaagagagattacaaggacacagccaaaaggtggctattgcctttgtcctattgtatacacatccagggtctatcattaaaatagctagaaacatgaggatgtgtagtgcctgtcacatcttagtacaaagaaaatctccatgatatacgaaagagatattgttgtaagagacagaaacaggtttcccctgtttaaaggtggaacttgttcatgtaaagataattggtagctttaaatccgccactctctctaatgttaatttcctgttccagactcttacaagcatgaagatataccaataacagaagcagtgaatggaacaaacacaaatgagaagatttgaaatcaactttattttattttcccgcaagtttttcaagagttaaagaccttacaatgggtgacaaaatgcttacaccaagaaatttagcacccaagtctatatgcaaaacagtatactcaaccgaacttggtgatgcacctaataagtggacactgccaaacagtgttgtttactcaagatgaattgatgaaacgcctgaagtaatacatgtggtgcgtggatcaccactttctaggcaaacaccgtgtggattttctctaaccaacaaggccaaaacattgtgtgaactccacgcctgagtcannnnnnnnnnnnnnnnnnnnnnnnnnnnngcaaatatggcatcagatccaccagctccaggaaccccagccagtagaactccttcagcattcattgtagaatccataagttgagtttgagattcaggctctatctgcaaatccatggtccctcaaggtcaatgatatagcaagtcaatttgttctaaatgcgggatttgtggaacccttatatcatgtatgctgctaagattctacagccagacgagtattattatgcaacatcactaagtaatcatgcacaaatggtcagttgagatctgaagcaagcatcaaaacagaataaaaatcacttaccggaacgctagcagcctcacccatctgacgcataagaattttgatcctcaacatagcttctcttgcctctaagagttctttaatgatggcttcgttgattggttcagtagcatgtaacacccactaaacatgagatacaagagtcaaaatgaaccaaactgccccttcatgtaaaatatcttacgaaatcaatactcagagaaaggaaacataccttttcagaagtaagcacactacaagacttaatgactcctagataaacatcccagtggtctttagctaatttgcttagaacgtttagcttagtttccagttctaaatttgcatctgacaacttctgccaattttctcgtgccttctctggatcagacatttgccacttctttacagcacctaccatggatggtgtggaggatccaccacttccaggttctccaaggaactaaataagacaacatcttgttagtacacaagatttcatagaggtcaaagaaataagaagttggtgaagttcacaacaggttttcccaagtaagaattttggtctgattgtttgcttacaagattcatcagtggtggtaaagagaactcagttctctcattgtcccattttcccttcaaaattgtaccaataacttcatttaatggcagacccgttactgcaacctacaaaacttgggagtcagtaaaaaattcccatccttagtggagaatttatatacaacaaacttctcgttatgaacctgagcaaatgacaagacttctggagagaagcgaacataacgctgactcccatagacagcacagctgacatcaaacccacttccgaccttcccttgtgcaagacaatgagacgtttgtgctatcatatggataacatctagatcagaacaaccaaactttccttctttacatggatcagataggtcaaccactccaagataatgtaacatagctgcaaccacagctgttgtcattgctgcagaagaacctaagccagtttttgctacttcaggcttggaattaacaccatttgactccgtagcattgaatgttattgatgcaaacggtgcaagggtacccagcgattctggtgtcagtggaagcccagccaattctatctatcagaataaacaagaatatcaacattttgtacaagcatctcaagaggatttgaataatcaaaggaaatatcaacaaacccaagtgtactttagacagtttcagcaaagaaaaagatagaaaacctggttccgatatgagtaaaagtcattggagcctaatattgttatatcaagacctgcaaacacacatttaaagaaatggttactcatacaatctcttcttcatgaacaaaaatgattaaaaaaaaaagcaaggacttgaagattgccttgcaataagagtttgtgcaatgattctttgtccttctcggttgccaaatgagcagcagctatagcatactgtatcgcatgctctacaaaggggtttcttgaatcactgtttattttttaagaaaaaaaagaaatagtgtaagtgctccatcacttatatttgtaaaatgaaatctcacagacacgtcttgatatgaacaaaaaaaatcttatattatcgagattaaaaaaaaaatatgcagcgcatctaaagaagtctctcggatcttgccttgcagacacagactgaagagtcaaatgattcagtgacagcttatacatgctttctctcgagagctgtggtgatgttaatttgacatctgtccatttctggcaaaataagcaaacaaacaaaccaacaattgtctcacacaacataataacccctcaatgctgcaacaatattacttcccaataacacataaatgagaagaggatacatacccatgcccaactttcaagcttgacttcttcgttgattggcttctcaatcgcgtaaaaccgtgcatttgtactcaacacaagccctgcatttggcttctcgagtacaaggtagcctccagtcatcaaaactttcccaggagcagaagcaacactgcatcaaggaatttttaaacacacagaattcactaatattgataccttttatagatgagagatttctaataatatcccgagaaaatagggcaaaagaagaacttacacagccattttcaaagagtgacaaagataatcgctgatcaaaaccacagattcacctacgatcaaacaaattgcaattttcttgaagcaaaagccagataaaatcacagcgcatgcacaaattcaatgtatctacacagacgaagaactatcgaacttatctatatcaataaagtacacctagaagtcgagcgaccttgaaaattctctagattgctttcataaatatggaatttatcggcggaagtaaacaaaagaaacttactaacaacctcagtttgcaattggatatcgccggaaatgatcggatagtttgaaatcggcggcagtaaatgaccggcggtacgagtagtggtggtagatcggattcggactctggcgcagggaagaagaaagaaagagacaaaaaagaagtgaaggttgttagggatatttatgggtttaccaaagtatgaaaggagggtaaaagaggaaatttagagcaacccaatgggtcgggttttttttttgggttttacccgctttttttgtccggatttttgggcgaaatcatgttaatagatgatatttggcccacatccttcttattttgcatctttaattatttgacactttcctaaaaaaattccaaacgaaattgattgatttagtaaacataattttgaaaatattgaaacggatcttgcttatatagatgatattatactcatttcttagttatcgctgattgttgattatatatttttaggtaaaatatccccacaaaaaaagaaaaccacattaacaattgcgttaatatttctttaatcaagcttttcttgaaggttacttccaacattcaagtaaaacaacatttattctccgatttgtaaaagatatggactatataaaattataacaaactttatttctcaaaggaaaaattgcctatttaacctgcgatgaataaatt

SEQ ID NO: 5611 - DNA, 1906 bp, Arabidopsis thaliana landsberg
agcttcaggttctaagtctctcggatcattcagaattgctttcaacgtctaaacacaccaaaccagagttctgggaataaatgaagttgtaatctctctgtacaaaatctaaatcagtcactttgcagctttcatttccctttcttatatttgcgttggccacttgctcttttgtgaattttccttcggtgtaattgttttttctttcgcttttaatcgagtgattggaattataatcaatgaaatcaaagaggttcttattgccttgtgtttacattaatactagtactaaagtcagtttacttagagaataacaacaccatggggccatgttcttggtcttgtttacgtcctcctcaagatgctcagtgaataagcagaatttaggagaaacacatgtctctgctttaacgcaatcattatctttctaaaaaagaccattcctttatgtcttcatacatctcaggcggataaagcctagcgtgcaccagcagtaagttttagttactctctgaaaccgccattgttcattaaccccatatgcctcaaaggctcaaagaaactgttacattcaagattcaacatacttagtcgtttgttacattcaagattcaacatacttagtcgtttgttacttagtcgtttgttacttgacattacaaacgtttgatcaggtaaatccgaccttgtttattatcgaacctgtaacgcaagagagaagctttagagaaagatggagctatcagcggagagaggagatcaacagaatcttcgagcgcaagtaatcgttttgagttgaaataaatatagggtaaaactggtattttatatgggccgatacgtgtggccctgtatcttagcccacaaagttagttgacctgcttttctgatcatcttcctcccactctctttcatctttttgtaatcgatttgcaatttcaatttcgcaaagttggatcatgggcaatgtcataagcggtggaagccgcccggaaaatcatcgggaccgtacttcgccgccgtatccaaaccctagtgctcagtaccaaggcaattatccgtcgccgtaccaagattgtgctaggtatccgtatggagagatggcgtctccagtgcaatacgtagagcatcaggaagcagtgactataaggaacgacatcaatctgaagaaagaaactttgagacttgagcctgatgaacagaaccctggcaagtttttgctctccttcacttttgacgcctctgttcctggaaggtaatgatcaatgttttatacagctcgacatcttttcactgtgtgattgctagatgttgaaggtttgatcgatgctcagttcttatggtttttgattcaacagcatcactgtaatgttctttgctaaagaaggcaaagactgtaaccttattgcgacaaaggaggatctttttccatccactcaagttagttttgcaaaaggtctggaacagagattcaagcaggcttgtgggacagggattgatttctcagatatgtcagaggcagatttggttgaggcaaacgagacagatgtgtatcatgtggcagtgaaagcagaggtagtatcagaagatgatcatcctgagtctgggacaccaaacagacagataactcatgtggttttagagaaagatcataagggtgagtacaaggcgagagtggtgaagcagatcctgtgggtgaatgggaataggtatgttcttcaagagatttatgggattggtaatacagttgatgataatggagaagatgcgaatgaaagaggaaaagaatgcgtcatctgcttatctgagccacgggataccactgttctcccttgcaggcacatggtaagcagataaatatccttaagagagagttgagaaagaagacggcttttttcttgattct

SEQ ID NO: 5612 - DNA, 3637 bp, Arabidopsis thaliana landsberg
gtcagcatgctcaatagcaagtataccagcatcagcaaagagttcctcagggaaattgtagatcaactgcctgttaacaaagcagttgattccgtggcctatgatcttcttcaccttgtctttcattttttccttctcagccccttcaatctcagcaaccttggtcatggaatccacacggacacgtgcaccgtaaatcttcactttatcggtatccatagcagtattagctactaagatatttgcattctctatgcgcttaggctgcccaattcctattttcttgtcaagaataaacctacaggcatagatttaagttgaggtgacatgagaccatattactcgatagaagaagaaacacaacacaacaagatgacatgatgactatcaacattccaaaataacactattaaatgaaattaaggtgcgtaagctatgaagaagaaaagaaacacgacagagttaccatgaacagatgaatactaaagaaagatcaatagctcagaaaactgaatttgaactgacgccaaaggcacaaagtgttgtcttacccttcatccaaaaacgaatccttcagagaccctccaggttttttgatgatctgaatagcttccaagtttgtgcttccctgttgaacgataaaagcagaatgtcagaaaaaaatcatataacaatccaaaacgaaacgatgcaactatgggaaagactaatggtgaaatgataatagcctaatttcatgacatttcgtcaaaggaagatcttctttcatgagataacacataaatcaagagaaaaagaaggaaggaacacatgacattgctgaatcagtttcaaaaggaggaagaaatggaacctttagcctgaaaacagcatccacggccatttctgcaaaatgttccttgtcctgtgagagaattttggaacataaagtagtcatcgcaatctgcaacaagtctgacctaaacttctctgcattgacaaaaatacaatgctgtaaaataacagtgtgatttccgttctgtattcaactgaaaggaaatcaccgcttgaacccaacagtcgaagtaatcacacaaacaagaaaatgctatacttaaatatgtcagcataacaaggtttaaccatctctataatgattacctgcattgtccttgttatcaatgactcttttcagtaaagcattacgagcacattccgaagccattctgtaacctaagaaaccagaaaacgaaaaaattagaaatcattgccatagtgagagaagctgatacaaagttgacatcttaacacttaaagctccaaaagtgtacctgctatgatggtcatagggtgaatcttagaagccacaagcttttctgcttccctcagaagctcgccggccaagacaacaacagaggtagttccatcaccaacctcatcatcttgaactttcgagatgtctgaagaacaaaccagatacaacgaactgtgagagaaaacccaactaagaaaaaacgaatatgaaaacttcatgccagaatgtcgcagggaaattacataccaacaagaactttagctgcagggttgtctatgtgaagtgacttgagaatagtagcaccatcgttagtaacagtgaccgcatgacctctaccagtagattgtaagattttatcctaaacaccacacaatacacctgaggcaagccaattccatacacatatagatgtttatctacacaaaatagagacgttataacggctttaactcatcctggtctgggatataactttgtggagaaatttgatagctgattaaaacattcttatatgtcatatagtccgtggagactgtagctaacgtaatgagaaggccatattacatggatgcaccaaaagctaaagaatttggagtcattgacagggtaagtttggggaagagaaaagaatggtggattttgatttcggtagcactctgagctaagaagagagacgattggggtttagtagggtttttaggccaaagccgaagcttctggatttgaagggtaattccggtatttggttttctcataattattttgtgaacggtaagtatgaatacattaattaaggataatcctgattaaaaccttattggcttgtataagaaatcatattgctttagaatgtatgcaatgaagaagataactaacacgaaaataaaccaacatacaaacgctatcccaacaagaacatgtaccaaaaacacagttttattatttgatcggatcacgaaaggggtgagtataagaaatccaacaaaaaatgtgatatgtccagatgcggtgacacgtatcaacggttgattatacaatatgaacaaggcttcgattaaagttgaagtgaggatacgcatgatgaattgtaccatcaaacgtatcgagcgaaaaaccatatatggaataaaataaactcacataacgacgataaatctgattccccgtttgaacatgtcttccccttctagacgactagacttgataaggtttgatagactgaggaaaaatccgatgacgagttattgtcaaaactttatgttggtggctaagctcaagatttttggtaaagatgatatcaatatgtatcacataagtgtgtatctaataaataaaataaaattaagagaaacttaaaataatggactgtatgtaagcaatgtcaataacgaaaaaaataaataatggaaagggacatataataaacttgtaaaaacctcaaagataattattaattttaaagatttttacaaaactttatatctctgtccattaattgtttcttctaaaaattgcattgctcaatccataattttacactttgtagatgataaattcaactgcaaaaaaattgtaagaaagaatgtataaaatatctattttctcttagaagttgtggtcgcttcccattgtttgtcacttactcacttctgtgaagataaagtggactcgatactcgataagagatttcgtccaagaggatagggtactaaacgtactaatctccaaagaggaacatgagatgagctatacgccaaatctctaccatatttctccgaaaatttgcaccacgaaaatgtttgaatggacgctatctctgaaaatgtttaaccaccgatagagtttttaaatttgtgacctaaataactttattagtgtccaaaatcattggaacatataacatatataatcaaattactacgttctcaatatcgcctgggtttcaatcggtttccacattacatataatcaaattactactttggattagtcacactattatctgtcacataaagattgcacaagccatatattaaacatctgagagcaagctttgtatacaccaccaaagtacaaaacgcataatttttttcccgcttgcaagatttcaccaagccaaacagcttttttgacttgagtttgtttcttcctagtgcatgtgccacaaacaaacccaaaccaaaaaaaaaaaaaaaggaaaagaaaacaagagaagagaagagagacaagtacgtacataaacagccaaagtgtaatgtcaagattcaagcttgagagatacaacacgagactgtcggttgcgtttggctgccttaacaaagactacggatagacaagacggtg

SEQ ID NO: 5613 - DNA, 1798 bp, Arabidopsis thaliana landsberg
taaatctcgaatttccttgattgaagccattaagcacaagagtcttcactgcttcacttccttgctcgagtgcttcctcgatctgtttctgttccaatggactaaacttctgaagaagaaaagctttcatatccatgtttccaggtggtttaccaatgcctgacaaaaatcgacaaaaaacataagagattgagagagaaacaaagaatagtctcgctttgaaacctgaatcaaaccaaaaccgtacctatgcttaaacgaggaaagtttcgacgaccatccaaatgccccattacactcttcactctgtaacagatataaaaggtgacatcagttaatatatcatagaacacatttagatgttcaagaggtatattcatacccgttgtgatagccttgacctcctttcggttgaagtctcaaaaccccatttggtaaagccatctcatcgtaaatctagtagagagaaacaaaagtgttcatatggaacatagttctggtttcaagggatgcttaagtcagtgactttaccattaaaatgtggcgcaatggtactcgatagtgtgaagctagagatccaacctttaaaacgacaacagaacagtttcaggtatgatgattatttgatcacgcagctgatctttgcaaagttatgaacagaaaatacaaaccgattcgccgctgaagttcatataagtctgaggtttagccaacaagataggtacatcttcaatagcacctgtactgattcatacatagaaccaaaaagtcatcagttttattattcttcaaaccaaagaaccaaagcaagagaagtagaacctattccgattagagctttggactgtatagtgttcatcaacaccccttcttttctagccaacacatcgatcatctcgaaaccaacctgaaaacaacacaaagttgtagcattgccaagatcaaatccagcaaataagtaaaagaaaaagattgtgtatcattacattgtgtcttgttccatgatacttgtttcctggattgcccaacccaacgataagccaaggagtgtactctactttgaatctatcattctcaccaccagaagtagatgaacaaacccgaaacctctgtttccggaaaactggcttttgcgtttgaaaatggtaaacacttggtgtatacgttgggcacaacatggaactgttgttgattcaaagacctattgaaattgaaatgactagaaactttgagattcaatacttggaatatacataaagataaaagcttttcaggatataatgaaattcgaaatcatataacaactgagaatcaaaacttaaagaaacccattaacagagatacagcgcagataaaaaataattgaagtgtaatcgaacagaggactcagcaaaatttctggagaatcagagattagcaatgagctacaaggattacacaaaaatgtatttgtggtttatattatgttataaattttcagtagaagaaggataagtgagaaggaaaatagcttacctcttcttcttcaggatttttcgaaacaatttcggaattttcttttgcgaagacgttggaacgagatagaagtagaacgatgaaatactgagacgaagatgttagaaattggtcccgttttgtattaatgggcttactaatattagcccacaaaaatgatgggttaaataatagtggcccaagttactatgatttttatacgtcaccgttactatgctcaatggcggcacgtgagtactattgaataacacgtgcggtctatatacgtcatccaaaatctaat

SEQ ID NO: 5614 - DNA, 738 bp, Arabidopsis thaliana landsberg
aaagcatgacattttcgaataaccaaagtttgtatcatactgagttttgaactcgtcgtgggacttcttgaagctggccatgatctcccgcatctcatcttctgctggcaggattgttgtcctcagatggaacacactgtcaaaatccacaagtggaatgagttcataagaagagatcagatgagcaagaaagaaacagtagtagcagattctttacccttctttctgtccaaatccagagccaggtactgtggagattcctgtggcttctaagagcttgagacagtagaaaacgtctggcacttttccagcttgttttgcagcttggagagctcccgttggtaaccgtatttgaggaaacgaatacattgcacctaacatttacaccaagaattaaaggatcaacttcaacaacatatactcccaaattttctacactgcacaggtgctaattgcttcattattgttttaccttctgtgaaattgcacacgacgtttttgcagctgttgaatccatctgtcatgagccttgctcttcttctcaaagattcaagaatccccttgctaaagaaatgtgcaaaagggcgatttgttattcaatccagggatgatgaacacgagcatgtaagcttatatatataccttttacgggcgaactgggcatatgaaatgtctccagcttttggaggattaaccattcaacccatctgcacaggtaataatcactcgcaaaacata

SEQ ID NO: 5615 - DNA, 3622 bp, Arabidopsis thaliana landsberg
  unsure (1)..(3622): unsure at all n locations
ctgtacagcgtcacttattattcctccaccattcactgacctggctgcatcggtttcattttttaatcgagcaagggaccgtgcatttgcctgttgctgtaggtaggccttcacaggaatacagacagggcagttaggttccttacaacttcgatgatgattaatcaatgtctttgtggggaggcaacgaggatatgaacattgaggtgcagcacaactgtccatgtgtttccagagcttttgaaccgtaacacaatttcgatcaggacacttcccttcaggcgctttgcagtggcgagcatggcgtagaaagaggagccatttctgttgatttttgaatctcggatcccggttgccatttccatttctacaagtggtagcagtaggattttggggattaagggattntgatctagtcgagacacgattttgacctataattgagcctccagacatattattgggctgagcttcatccgtcccagacattctttgtcggaaatcctcctgaatgtgccgttcgttcgacatactattagacatttgagtatgttcctgtgactgagattgccagtgaccacgcatcccagattctgttttcactccaacagagaggttgctaaaaccgttgacagagtctgaagccatactatgcgggtgcaacatctgctgtatctgttggctattttgaggaactgatgtgcacatatcactctgacttgtgacagggagaatctgagaacctgcatgacggtcttctgcattgttctggtattgattctgaaactgagaaagctgaaattgctcaggagtttgggagtggatagactcgctagggttctccattccaggttcatgtttaacgtgagtaaccatatcagaagccacattattttgcccaaaagcatcgtgacttataaatctctgttgctgctggccttgctgcttcaattgctgttgatgaagaaactgctgctgctgttggtgaaattgattaggttgttgctgaaaccgattaggctgttgctgaaactgctgctgttgatgtgactgcaaaaaaggtacgaaagatgattacaaatcggtattctcagattgatgtttcactggtgcactttgctgcatgtaaagtgaattccatggattgcttaccaaagaagagctagttctagacacagcctggaaacttgctgtattggcattctgagtatttgtcatcatcccaacagatgttacagcaccatacaaatttcccgatccgaatgggtcagagttgtttgtgccatatccatcacctgaaacggtaaaataacataacaattaaaatattctgatgaatacgcacaacaacaagaggttagaaactacaatttagggatgggaaataaagactttaccctgcattcctgaacgctgaagattatcataagcctgctgtgaatttctgataggattggtgtaggatgtacctgaatctacgctttttgcattcattccaacaccaccatttatggagctgttagacacattagacaatttttgttgcattccaggtctaaggccaacacccatttgacttccatggttttgcagcatacgactattttggccaccaatatcctgcctcagttgctgttgctgagtctgaggtaccatcatgggagcagtagaaaatccaccactattgttggaagcttcaacactcaagtaagactggccattattgctgttgttattagtactactgttgacaaatccaggggtaggcatcatctggccggtatttctctgggagctcatggatgacatgttccctccagacccaagaccaaagttactcgatgaatgttggtatccattagacaggttacctgcaaagagaagtaaaggtgttcagaaaaaatatgcgcagaaaattttatgcccatattttatataagttgtagtgaaagaacctccaagcatgccaccagaatttagcaggtttccagtgttcatagcactagttgtgatgttattacttccagccattgtagcatcacctgaggaagtaatcatcaaatttggattcccaccactgtgttgtaatcctggagtgggtatcattgttccaaccgaagaagaattagcgtgtcgctgattgtagttatttaactgcctgcctttgattagacttgccagccgaggttcaagggttgacgggttcacgtaatcttcctgcgattcaaaatggaagtgtagcacgttaacaagaaatttcaagttaggacattagccaacaagctggatctagtggcaaaattttaaatgccaaatacgtgcctatcctttccttaagtatattaaataaatacctttgtgttagcaattttaaacagcccctcctctaagcgtctagcaacatccatatatttagcctttgatgcttcatcagctggagatggttgcttttgctgtaagatattgaaactgaaaagaaagaagagaaatacacggatttgattggcgataaactggagatattgaatccaatccaaaataaatagccgtataacaagagcaaggaaatataactgcaaaatggtgggaagacaccaaaagtcaaaagcttgagaaaagcaaaggcttacatcctgattcgcatagcctgccgaagtttcaagatgtcattgtcaacgggagaaacgcgtgaaggtcctaaaccagcaccagtagcaggagctgaaccaccaccaactaaattctgcatttgggagttcccataatgctgccacatcgtcccttggtttgaaacctgtcccgacatgtgagcctgaacattcatagctacctcttcagtctccgtcgccttgtcctagttcttctggtaattaacagtaacaaacactgcataactttcctctcctccagaagtcacagtatccaaatttcatctcctgatttagcaccttagagaatgtcctgctaaaaaaacttggtgtaatcagagaactgaaattgtcacaatttgatctcatattaattgggagatagtatcaatcatagtatcaactaaagaagtaattaaaccccaaaatagttaccaaaaatgaacaaaatgataaaccctaaaaattcacccccaatctttgaattgatacaaaaaggagtaaaatttggcaacaaagtggagaaatttgacggagaccaaccggttgctacagattgtacgatgattggagtctgcacaatgaaacaaagccggtgaacagccgatgcggcacgtgtgaactcaaaccaaaagcgaggtcagaaattaggttcaagcagtagacaaatcccagaaagaagatggcaaatcaaaagcgaatgaattcaggttttcccaaatcgggggatgttctgggcttgtaggttcgtcgaatttgggatttttctttggactcgctcgatttggggattttgtttttttttttctttcctttctagggattcgttgtttttctaaaatagtaactcaacaaaaaatacacattaaaatattaattttgctgtctgaatacgataattgaaacaaccaaaaggcaaataaatgaaaaaatcgaccagcattatgtttagatcggacagattaggataaact

SEQ ID NO: 5616 - DNA, 1656 bp, Arabidopsis thaliana landsberg
attgatgtcggcaatgataaccacaacatcatgctcgtcggagatggcgagagaaaaacaatcatcacaagtggccgaagcgtccagcatggctacaccacctataactctgcaaccggcggttaaaactctatcttaaaatcttggctaaatccaactttaagacttctaatggtactaataagtcttttttcccaactcttttgaaggctttggaggccaaaggtttgtagcaaaagacatgacattcatcaacacggccgggccattacgtgggcaagctgttgcggttcgatcatcctctgacctctctgttttctaccgtgtcggtatccatggattccaagacaccctctacatccattcacaacgccagttctttagggaatgttatatctcaggcaccatcgacttcatcttcggaaatgcagctgttgtcttccagaactgcatgattctcgtccggcgccctcttcatggccaagccaacatcataacagctcaaggtcgtggtgacccttttcagaacacaggaataacaatccatagctcaaggataattgcagcttctgatttgaagcctgtgatccgagcttacaagacctatttaggccgaccgtggcaagcttattcacgcgtcacaatcatgaagacctatatagataactcgatcagccccttgggatggtctccttggttaagaggatccaattttgctcttaatacagttttctatggagagtataaaaattttggaccggggtcttccacaagatggcgggtccggtggaaaggattccacgccataacgagcaccgcggttgcttctcggtttacggttggaagccttatagccggcggttcatggttgccagccactggcgtgcctttcaagtcagggttgtgaggagagtcagcatgtcctatattaaagactaaacaatgtgtaatgtgtgtatgtgatccttgttttatttattactgatttatttatcacctttttatattgttttcaacaaacaaacaaaaaaatcattctaattatagagacagtggtacatatctggtatactatacacttggtcctccttgaaatctgaaacagaagctttgatcaatgttacaaaattttcactgaatgttagtggactacaagaaaatagtttgaaaattggtaaagagtaaaggaaaacatattcaaaggattagacttgtaactggtgtactctagattctagttatgtttcgaagcctaattaggtttttatgaattttcttagggcgacaatcatcatggtttgagaagattagttatcattcatctccaaatggttgataaattcatgtggcaacttggaagagtaaattcaattcttttcctatttgttgtgaacatctacaccaaaaaactacacagtcaaagtcaggtgatacgtaatacgtttaccatcttctctacacataagatatggtgaagcaatcaactaaacatggttaattttcattcaaaaaaaaaaaaaaaaactagacatggttgaagaaacctaaaaatcaaaccaaaaaatattgaatgtgcatccttactaccaaaagatatattttcgagattatgctctgcttttgttttatcaattagaaatcttaaggttattaact

SEQ ID NO: 5617 - DNA, 2147 bp, Arabidopsis thaliana landsberg
  unsure (1)..(2147): unsure at all n locations
aaaatataaaatttggttagacaatttcagataaataataatttttgttcacttgtggttacaaaagtataaacttttgtttacttgcgctctacgtataataactttaactcattcgtcagaaactagaaagtactagaatgtggtagagcagtttagttgacatatgctagttgactagtcaatgtgacttatttttgagccactaatctattttttaatgatcaaagattgggttcaagggtttttttcggagtaattaagaagtcttacgattattattattatttccccccaccattagtttcactcagttttgaataaaatttgctgcctgttgggggagtcattgttgatgccaggaggtccaaactcagcaagaaaaaggaacaattagctactatcaatatatcaataagttgatcgagacaaaaggaaatggccaaataatggatcatatataactaggtctagtatatggacggttttgcttcttagaactagtaacacaacttgatattttatgctactcaatgaatttatataagatataattagtaaattaaacatgtcattgaagtcataagccaatttaaagctagtgaaaatgttaagaattaaagagaaccggcttatacattggctgctcttttaggaacaaattcattggacagaacaaataccttgactgattccatagagttcgaggtcttgtttcccgacttgcaatgcatatcaaaaatggtgatattgtattaacaattatcgtggttctgtttttttattattatncatttttnnnnngcaaaacttcctggttttatataacttaggtaaataatacatagtttataatggaatgtgccacagcaacaacgaaatccggggtgaacaagccgggttcgaaaacaataaattaaatatgtaagagttagagagaagagcctccaacaccataattgttctgttatgctcattttgccaatggctaaatcatgtttactttgtagttatcagcgttcaacaacgacattgacatgttgcaacgactaaatcgtgttccttttgctatagatgacgacatgatgaaacatcatttggatgtttattgttggtccatacctgaggacttgctatccaagttttttagattaaacagaggattgatgatttttatttttggattgatgaattttattattttgattgatgatgaatttggttttgggaatttagttttggttcgtgtcagttaggttggttgctcacctcttaacatatttgtatatttattgtattgaaaagaaaaaaaaagaagcaaacatacaatagagaaatgaaacataatagcataaattttccagctgtaagtgctggattcgatgcccgttgagaggatctcttcttcaaaagagatgaattaactcctgcttcgatataacgctttcagatttgaacttccagatattcaaaaaaaaaaaataataatagcataacaataaagaattcaaagcatttctgtgatgatactgctgacaacttcaactgtaacatccttgaaaaatctaaacactcttcttcttttacttggacctgacacttgacctttatttgtatgttcagaattgtgtatgcctccgcattcatcattataaggctgaggatcctgagaagtgttcaaatccatttgcggttctgtagcagctggtgcagacgaattaacgcattccacgtgaacatccagcatgcatggaccgcacttgtaccgccaggacaagattgcgcctcggcaaaccatgcacgtgttgctcgctccacactgactcagctctaagagatgagcaggatgaggcacgtagctcacgtgctgatgatgttgtgtgcagagtggatggacatcgaaaccacaagtctcgcaatggtaataaaccccctcgaccaatctgtggcagatgttgcacatattttctgatccattgacaaatagccggagctcatgttgtggatgcataaagcttatgagggtaaagggacaggtggcacaatggtcatgaagaacatagtcgcacggggcacatcgataggtcttcccaaagccgtaggttttacagccaccgcatgtgaactcgccatattcgtcaacttcg

SEQ ID NO: 5618 - DNA, 4261 bp, Arabidopsis thaliana landsberg
catcttgcgcaatctcacggactagcctctgaaatggcagtttcctgataagcaactcagtactcttctggtacttacggatttcactgaacaccaaaagataagaggaatgttaacacacaatgttacataatctcaaagaatcacatacaaatcgaagaagggacaaaccggagagcaacagttccaggacggtaacgatgtggtttcttgactccaccagtagttggtgcagatttacgagcagcctgaggttaataaagaaggagattaacattcaacttcacaacacaagtattatttgaaaaaagagaaaagaaggaacaaaaccttagtagcaagttgcttccttggagctttacctccggtggacttacgagcggtttgcttggtacgagccatctgcgcatttaacaagaaattgaacagtcaattggggattttcattatccataactaaattttgaagaaattggaatactaaacgtcaccacttaaaaccctaatccagatgaatcgttatcgaaccagatataaccaaaaggggcaaaattgactcgaaaaccctagttctcgatacacggctaggtaatgacaatcgcacacagacaaatctggttatacagaacttcgaagcaagaaaaaaacgatgaagaatggatcatccaataaatcgactagactcaatcttcacaggtttatcgatccagcaaacttaaaagacggacctttattttcaaactggaatgggacaaaacccgaaactctattgtcgtaaaatcagatcgcggagacagtaacagaaaaaacattaaaaagtaatggaaagacctaaacccctgatctaattacaaacaaatcatacctgttcttcgcctgagctgacttttgttttgttttgtttttttgtctttcgtaacaaaagcagtaataggggatgattgaagtagtggttgtggccgcaatgtagttgaattattatttataatactcacgaaagggttatcacgatacgctcctttgtgctttctcacattctttatcctacggttcaaactattgtacattgtgttttctcaacacagcccaacggccacgattagagattttaagtgtcacacggattaccaatttcgtgaacgtaaaagttgttgatattgaaaagaactttgaaacagaaagcttattgataaacaataaaactcaatcatacaatatcgaacagatacagatgaaacaagagtcagaaactttaacatattcatatgtttcagagatgaattcaacaacaaaaggtgttcaacattgccaaagaagaaagcaatacacaccaaagcaaaaacgtagctaagaagaacacaagcaaatcataaaccgactagacaagaaacagaaagaaaagaaaaaaaaaacaccattgtttccaagtctcctacacccaaaagctttttaagccattatctaattccaactatctatttagaaaaccacccacattcacataatccaactacttcccaatcacaattaagcacgttctcctctgatcctgcgagcgagctgaatgtctttgggcattatggtcacacgcttggcatggatggcgcaaaggttagtgtcctcaaagagacccacaaggtatgcttcagcagcctcctggagtgcaagcacagcatggctctggaaacgcaagtcagtctgcaatcaaagagacaagataagaacacaggtttatgacaaaacaagtaaaaagttaaatccatttgtagactgaatcagacgaacagacacattaccttgaaatcctgggcaatctcacgaactagcctctggaaagggagcttcctgatcagcaactcggtactcttctggtacttacgaatttcactgtcaatcaagatcaataaaacagagaaacagagtttaatcaatgacgatatcaataaagtaaaaacacaattgaatttggggaagaaacagattgcataccgtagtgcaacagttcctggacggtaacgatggggcttcttgactcctccagtggttggtgcagacttacgtgcagccttaaattaaaacatccaccaattagaacaaatctagaaatgtgtttatcaagctactcagatcacatgtgagagcccgagtcttacctttgtagcaagctgcttcctaggagcctttcctccagtagacttacgagctgtttgcttagtacgagccatctgttcaacaaattaacaagatttagatccatacgtattcaattgcaggaatgtatcgtaagatcaacacaaaaccaaagaaaatccctaattgcaatcgcataatcaagaaaatcaaaaccctaatcaacaatcgccgaataagaacaatctatttacacatgtgaaaactatcgagaatttcagagattctagacaaagaaactatctggtgatgaaatctagctatacgattcatctctaacctaaaatctttatccggaagatcattcggcgaagaaacaagataatggccaagaatagaaactaatctcgcctaatttcgtaccacctatcgagcgattccagtagtttcacgatcaccgaaaaaatatttccaggaaaatcaaagaggatcgaagaatcgtacctcagaaaactctctagcttctccgaatttcaaacttgagctccgaattcgaaaaagataatattgtcagtcttcacgcgtgtacggctattgatattaatttataggcaacgatggtaaagcggatttatatgatcggacggtttttatcgattatcaatgtgtttctcaagttttctaatcgtacgggtaaaaatatcacaacatgtgctttcttgcaccaattcaacggtccagatctagctttactggtttgacgaggatcaccactgctacataattgattgctattggctgaatacaaaccgtcgcggatcgctgaaataaaccgttcggatttagtttaggccgtcacatcaattaatgggctcacagataaggcccattgaatacaaaatccgattggtgcgttacgtacggtacattaaattggttgcaccagtcaaactttccggttcagtactaaccgaaatattggagtcgtcgtcttcttccgtcaagaagaaaccagaatttttacagagatttgaaaatcgtctccattttctaggtatagaatctccaaagagatcgatctgtgcgattcaaattttgttatatcggatctaaatcgtaattttgtgtttttttttcttcttcagatatggattggcaagggcagaaattggcggagcagttaatgcagatcctgcttctgatcgccgccgttgtgtcgttcgttgttggttacacaacggcgtcgtttaggatgatgatgttgatttacgccggaggtgttgttctgacgactctgatcacaatacctaattggccttgctttaatcgtcatcatcttaagtggttagatccaagtgaagcagagaaacatcctaaacctcaagttgttgttgttagctccaagaagaaatcctcctctaaaaagtagtgtctcttcttaatataacttaagcttaataaagtctcaatgaaataactttaatcgattctcgccattgcttttgattgtgatatatcaatgcattgcttcgagttggatcataagaggtgttaactttgagatttgaactggttcgtaagacattcttcttcagtgtttcaagaagagggtttaaaccatgttcgaattcacaccaatcttgataccaagctcaaatgtacattcatgcatgtatctgtagtaattcttcaaatcgattacaataacagagtagaatctgaatcgttgttggtacaaattctttagtagtaaatggccattataaagacaatagtagacaaagctagaggagagtgacgagaatgaaaatgagtagagcagcgataaatgaatacttgagagcagcgacaaggatggcgaaaaagatgaagaaaagctgagacaagacttgaaggctagcccaagtcaacatccagctaatccaacagccacaaagttatcttgatgtggattcaacagctctccccacttgaaactgaaaccagcgaattggtctttcttggaaccattaccatcatcgttagtaacaggtctgtttccgccaccagaagactccttggccgagtcgttgccattttgagcatttgttctcaagattaatgaaggagatttgcacaagcgaatgtgatg

SEQ ID NO: 5619 - DNA, 579 bp, Arabidopsis thaliana landsberg
  unsure (1)..(579): unsure at all n locations
tcgcatggaaactttcaatcgaaaatacagcgaatagtatttttgggaagtatatgatttttatacgatgataacaacgagtgttatcggtaatttgaattttttgggggagattaagattcaaggacggggtagatcaggatacatatatcgacccttataacctcaaagatttacacacattcttatcctttagtggttttaaaaccatacagggttaagaaaatgggtgtgattcagctagcggttaggtttacgctacatccatgataaagatgcttcagaaatacatagatccattgcttccgcaaatacgctacattttgcactttatatttaccaattagtcagccttagagaccaagcaactcacattctctgcaacaagccagcactcagaagggatgttgtggtgtagatgctcgatatatgtgggatcaaacatttggagtctaagaagaggaagcgtgaacattgaaagtcttatctcgttttttgatggctgggttaatacttggatatggtacgttcataagctttcaaatggagagcctcatgacgatagttntgatccatatc

SEQ ID NO: 5620 - DNA, 1662 bp, Arabidopsis thaliana landsberg
  unsure (1)..(1662): unsure at all n locations
ggcatcaagatgaagtttgacatcagacaagcttctgggaaatcaacaaaaggagttcagaattttgcgattcaggacatggatgttgataaagaagcaaagctagaacctcaccaaaagtcaactatacttctcaactcagcaagctaaagaggacttttgaccacaagaagagagcaacagaaaggcgatctcagactgaagatcctacagaagatgactggtatgagatgagaaaaaaaattaaatggcaaagcagagtcatagaaggattatcttcaagagtgatgaagctgaaagatcaattatggatgtttgaaaaaagagttaaaaagttttccaatggtattaaccgagagaagatggaaactgcactaactgtcaaggaggacgaaaatttcacaacataatggtttgcaccagaagatcagaaaggagttcacttagaggaaagaagcctagagagcaagttgttgagtgaggaggaaagtcctattatgacttattctctaggagtgcctaaacagcctaccaacccctctgctgaagaagaacacttgttacttgattctgttattgaagaacttctggaactcacgatagaatacaaagctcaagaggataccattggggagctaacttacaaaatggaaggactgaaccatgcaatcttggaacttcaagaaatgattaaaggctacctaagttttgaatttaaggattggacaaaggagtctggttcagaagaagaagactactctgctgatcagaaagaagcttattttgaagaaaaatcaaatgagtacccatcctaccatatctcaagagaggatgcagagtatgatccaagcattgaagattcaaccactgaagatgaggacttttctgttcctctctttaaccttttttctaactaagctctgaaagggttaagcttagtgacttaaaacaagctcacttgggaggaaatcccatgtctatccatgtatataactatctatttttcttgctatttttgatgattttgtttaagtgtttcaggtttatttcattgatcattatggagtcaacggtcgagtaaattcaaaccaagtcaagaaagatctcaaccgttgatcgagttgaatgaggaggagtgttttgagtcgctgatttgaatgaccaaatgagagaagcaccaccaccgtttgatcgagtgatttcttgaggactattttggtctgtttgaccgaatgatcaagaacaaagagctctccaccgttcgatcaagagctgcgcaattcaagaagatgcttgatcctttactcgagctctcattatttagagagcngagcataacttgcgtgaccccacttgttcccccaacactcctttactcgatggacaaagcaattacccatgcccctcaccatttacaatcaacttttctatctcttccaaaaacaaaccaaagacctgtctcctccacccattgaattccacaaaccctccttgaaactctctctttcatcatctcgttttcgaaattctctcacaaagctttgaagtcttcattcaaaacccttccccaaacacaccctatcacactttaagaatccgttccccttcaccaatacttcacagaggagttactcgatcactcccaagtctatcctcaaacat

SEQ ID NO: 5621 - DNA, 4170 bp, Arabidopsis thaliana landsberg
taattgtcctaccggtgccaaggtatgcttgacccacaagaaacaacaaatttaactctcatgaggtttttaatttttttttttgttaatcttatttgtagagtttggtgtttagtgggtcaaataacatcaaaatcagtggtttaacgtcgatcaacagccagaaattccatatagtcatcgataatagcaataacgtgaacattgacggcgttaaggtttctgctgatgagaatagccctaataccgatgggattcacgtcgaatcatctcactccgtccatatcactaactcaagaatcggaaccggtgatgattgcatctccatcggtccaggatccactaatgtattcatacaaaccattcgatgcggtccaggccacggcatcaggtaacacacacatacatttcttgctccccatctttcttgatatttcactttctaaaatgttctcttgttttttttgtttgtgtgaactctccaacagtattggaagtcttggacgagcagaggaagaacaaggagtagataatgtgaccgtgagtaacgtggatttcatgggaacgaataacggagttaggatcaaaacatgggggaaagatagcaacagtttcgctagaaacattgttttccaacatattaacatgaagatggtcaagaacccaatcattatagaccaacactactgtcttcataaaccttgccctaaacaggtaagaatatttattaattaaccatatctttacacccataactcgatatattgactcatttaatctggatattaatctctattattataggaatcaggagttaaagtatcaaatgtgagatatgaagatatacacgggacttcgaatacggaagtggcggttttgttagattgtagtaaggagaaaccatgtaccggtattgtaatggacgatgtgaatcttgtctctgttcatcgaccggctcaggcgtcttgcgataatgcaaatggatcagcgaacgacgttgtcccattcactccttgtctaaagagggagatcattataacttaactataaatggatcgctgaacgacgtcgtcccgattgctccatgactaaaagatgagttcatgtagatatatctgcgaacgacgttgtcctatttgctacttgttgtttgatcgttgagaatcttttttttttcttttttcttgttttgtttttgataatttctttgagaatctttgtaatccaaactatgaagtaatgattaaattttggttcgcatactacatatagatgatttctgtagtaattgtgtctatagatattttgagagatatggaccaaacaacttgtgaaaaagtaacataattggatgaaatagaaggtgatggaaatatatgggtgtgaattaaagtaaaacataaactaactggaaaatgattagtatacattaatggttgattaatagccgacccattaaggcattaactattcttatactatactataattaacctatggagcatatgagatttgatactattattacataaaaaattagtggagtagcaccatattttttagtttttaatatttaaaatttaccatcatcctctccacttcactaaaaaaaagtcaaaaacccactttctccaggttgtattccattatattaaagttttatcttttaattagtttcatctatatataatctacatgggattataatccaatcaaggctttacctccaaaatagatattttgtgtaacgaactttttggttaatttcgtttatggataatagtctcaattaattacaaaaagatagaaaatttaaacggactatatacgatcgtttgtttgctgtgtgacttgtcgtcttcttcttctgactcaacctccattgaccaaccctccaaagacggcaatgtgggttttattcttaatccattgatctcttgttgtgaggttttttgagaatttgcgtaaaggaagaaactttttcaaaacttttttttgcatcaatggagaacataaccgcgcagctcaaacgaggtatctcaagacaattctcaactggttcgattcgtcgaacattgagccgacagttcacgcgtcagtcatctcttgaccctcgtaggaccaacatgaggtttagtttcggtcgtcagtcttctctcgatccgatcaggaggagtcctgattcttccaagagtgatgacgagccacatatgtcggtaccggagaatctcgattcgacgatgcagcttctctttatggctagcaaaggtgatgtcagaggaatcgaggagcttcttgacgaaggaattgatgttaatagcatcgatcttgatggccggacggcgcttcacatcgccgcttgtgagggacatcttggtgtcgttaaggctcttcttagccggagagctaacattgatgctcgtgatcgatggggaagtacggtctgtcttcttctcttaaccctctagattcgagaagttgacatttagggataaagttgacatttttatgttgtctggtgaattaggcggctgctgatgcaaagtactatgggaatttagatgtttacaatctcttgaaggctcgaggagctaaagttccggtaagaaattttcattgattttggattcgattggtgttttgttcatgtgtttgttttgtgaaaggcttttatcttcacacttatagaaaactaggaagactccgatgactgtgtcgaatccacgagaagttcctgagtatgagcttaatccacttgaggttcaagtcaggaaatctgatggcatctcaaaggcatgttctttgctctcttagatagacacatttgtgaacatcattgttcttggagcaggtttgatttattcaaatcaatggatgttgtttgattgttttcagggagcatatcaagtagctaaatggaatggcacgcgggtttcagtcaaaatacttgataaagatagttactcagacccggaacgcatgtatgcatctactacttgtgtcctttattatgtgttacatttgagtgatccacccctaaattttgtttgctaagctgtgtgatttggtttggcatgaagaaactgattctgctttgtctttctggcttttaatctgaacagaaacgcatttagacatgaattgacgttgctagaaaaagtccggcatccaaatgttatccagtttgttggagctgtcactcagaatataccgatgatgattgtagtcgagtataatccgaaagtgagcatctttacttgtcttctcccttctgagtttacctttattcactaatcatctcaatgtcgtctctgttgcagggagatttaagtgtatatctccaaaagaaaggacgtctttctccatccaaggcacttagatttgctcttgatattgccaggtatgttagattctcatgtattgctgctaaggttactgtaactgtgagtacctcaccggatggttttcgtggtttttctcgtgtcagaggcatgaactacctccatgaatgtaaaccagatccaatcattcactgtgatctaaagccaaagtaagagaattaaaggcatatgtcgattagatacgttaaaagcttttggtacatactcattgagatgtttcttttcgtttaatttttcgaaatttttcgtaaggtgtcagaaatattttgctggatagaggagggcaattaaagatctcaggatttggtatgataagattgtcgaaaatttcacaagacaaggcgaaagtagcaaaccacaaagcacatatagatctctctagtaaggagaatgcttcattcacatgcatgaaaactgaatctcttggtaagatctatgatcattgaaaaaaatgcattcttgattgcagattactacattgcaccagaggataaataaagacgaaatattcgacctaagggttgatgcacactcctttggtgtcattttatacgaggtacatttcctcgtcttgctctgtttttttattcttgtgtttctctaatcttgttagtgtgcgtttctggtcagataacagagggagtaccagttttccatccgagacctcctgaagaagttgcgagaatgatgtgcttagaaggaaagagacctgtattcaaaactaagtcaagaagttaccctccagatataaaagagtaagctctaaaac

SEQ ID NO: 5622 - DNA, 2442 bp, Arabidopsis thaliana landsberg
  unsure (1)..(2442): unsure at all n locations
taatgtacatgcatccagatttactgtatctctccaaaatatcatgcagttattaacacatacatctatcatctggtagggtaacccaagtgaagacaccaatttttgtatttcatagtaagaaccaggtgccaagtttggttctggcagtaaatccttcacaaaatctgcgattgcgtcaacacaatcctccgacaagttatactctgtttttatattcnnnnnnnnnnnnnnnnntgataaacgagagtgaccctctttacagccatcataaatcggtttcttcgctgcatctaacatatcaaaaaactttttagcttctaagtttggttcttcaattccactttcagttgtttcgcgaaaagcatttgttaccatctatattacaccgggtggatctctaattatattctcttcctcttcattactattattatcttcaggttccaacccatgaatttcatcatcttcattactatttgctaaagtttcgaaatcttccccatgagaaaaccatatgtaatatccaggcgtaaatcctctactatataaatgcttccaaatagaatctactggaagaaatttctcattaccacaagtagaacaaggacaatacatcttaccacactccaatggaatctcttgatttgcagcaaaacgcataaaatcaacaagaccttctttaaattcctttgttaattctccagtaccttcatctatataattatacatccactcacgatttttgttttttggtcctgtcattgaaaacagtttttacaaaaaaaagagagaaggagaagaagaaaagtacaagaagatgaatcttattttacctaaattttttttggggttttccgttttttttcattatttctgttttttttttccttttcttttccaacaaatattttgtcattaacttgttacaaataaattcctacaaacaaattagtttctaacaaatattttgttaataatttccaacaatttaataattattgctaatttgcaacaatatcatatttgttggaaaatttcaacaatttttctacggcgtgtgtgacaaatttatcataaccaaaatttattacaaatttgcaataaatattcaataaataaaatatttgttgcaattttataggatatcggtaagaaacttttaacaaaatacgattattgaaagcatttgttggaatatcacatgttttcttgcagtgcaatcacataatagacaaaggtttcgagttaagctaaaccaagagattatagataaaaagacaagaaagcattaaatatcaagttgtaaatcagagggagaaaagcgtcaagtctagagatattctcaaaaattagataactagtagatttaattatgattaggattgttatcgaaccgttctagaactcagatcactaaagtaaagcaaccaacactagtccacattactaactatgcctaataactaaggattacgacgctagcccacaaatctctaatcataaacaagccattaaaacaaggttggatgggttcccttaggaatttaacctcaggccctttaatagcccaccaggttcggcttcttaaatacttaggctcatctatgatagttctagtaataagtagactttcgcagtgtacctattacctatgatcaagttctaggtgatcaatctagaactagcattaagaaaatttaggatgaagaactctaaagatgatcttgacaggttggcgatcaactatataatctgaatccctaatggaaccctaaacctaacaagagaactactcatatatgattatagaagaacaaaacatgtttaaagtaaaaatcaataaagaacataagaagagaatagagtttagaagaattttctataaagggagtttcaaaagggttttgatcccaagcccaaccctatagacaacagtcagtggttctacgttctaatcacaaatttttccccaagtactttggtccttatcagattgttgacaaatgtggagaagttgcatacaagctgaagttgccagagtactctcaaatccatcccgtgtttcacgtgtctcagcttaaggtcttagtgggaaatgtctacaccacacatcacttaccttctgttccaccggacgtgtttgagaaggcacctgaagcaatcctggaatgaaagatggttaacagacagggtcgtgcagcaactaaggttttggtcaagtgggttaatgagccagcagaggaggccacctgagagtttctttttgacattcagaagaaatttccagcttttgtctcagcttaaggtcttagtgggagcttttgttgcttaaaaccttgaggacaaggttttgcaaaaggagggagatttgatgcaaaatccgcacatgtgagtgtacacgtgtgaagtcaagtggaaaataagaagtatctggaaggg

SEQ ID NO: 5623 - DNA, 1443 bp, Arabidopsis thaliana landsberg
ctcgacatggtcggtacgtcacgaagaatagccgacttgaagatcctcatagtctacatttgatattttctaaacctttggtctgtgttatatatcaaataaccagtgatgaagttcgatgtgttgctgaagttcccgctgatagtattccttctatttcgaatggtgaaatgtctaccttcctcaagaaatcaatggctcctcaggtacgtagtaaagtattgatagtataagtaaaagttttagggtgtgtttaaacatttttatggtgttgaaatggtattatttttatttcaagtggtattactatgttcaaatgactttgtttatatcattgatccctttggttttgtagatacctgaaactggaaatcttcgggagatatttttgaaaggcatagaggaaggattaccagagataaaatcaacagcgacgaaaagtatgtcatcgagattgtgtgataaaagaggagtgattgtgttgggagatgcattcaatatgcgtcatcctataatcgcgtcaggaatgatggttgcactctcggacatttgcattctacgcagtcttctcaaaccattgcctaacctcagcaatactaagaaagtctctgatcttgtcaagtccttttacatcatccgcaaggtgagttatggattacttagttttttactaggggttttggtttaattaaatggagtgactcggatatttatgtatgctagaatgtcatatatactattatcaagttgtgttggactagtggtatgactcttactttctatttgtattgattttggatggcaaaagccaatgtcagcgaccgtgaacacgctcgcgagtatcttttcacaagtgcttgttgctacaacggacgaagcaagagagggaatgcgacaaggctgcttcaattacctagctcgtggagattttaaaacaaggggattgatgactattctcggaggcatgaaccctcaccctcttactctagtccttcatcttgtatccatcacccttacgtccatgggccacttgctctctccgtttccttcgcctcgtcgcttttggcatagcctcagaattcttgccgtaagcctttctattttcttggctatctaacacaatttctaccttcttaacggttataaactctttttttgttgttaaattataaaaacatgtttcttatgatgacttttactatgtgaatcaacagtgggctttgcaaatgttgggtgcacatttagtggatgaaggattcaaggaaatgttgattccaacaaacgcagctgcttatcgaaggaactatatcgccacaaccactgtttgatcaatccataacacgaagactgttttattcggagatgaaaaataacaactcaaacagttaactttctacaaccaaataaataattgtgtgtatatgaagttgagcctatggttaa

SEQ ID NO: 5624 - DNA, 766 bp, Arabidopsis thaliana landsberg
ccgctagctcaggcagtagagcgtcttgattcagcagaggaagacgttgttgtcactgtagatgtaatgattggtgcaacggcaggagataaagcctcagagagagcctttttcgccaagtggatatcggtttgaagtcgcctttcccattggcctcttgagatgtttgagttggaattagcagaagaagacgatggtgaagatgagagcgaggaacggtcaagttcttgatgagaatcttgattgactttgttgagtttcttcttcaaatgagtgttccaatagttcttaatgtcattgtctgtcctttgtggaagatatgacgcaattgcagcccatctacaccaaatattaaatgctctctattaaaaatcaaaacaaatcttctaattttcgaaagaaaatgtgtgaagagacaaaattagagaaattgaaaagtcattattattttttacctatttcctaagagggcttggagatgaacaatcatcttttcttcatgttctgtgaaattgcctcttttgattcctggccttaaatagtttgtccatctaagtctacaactcttgctgcatctaagcagccctgaaaatttataagaacgaacaaatattgagaaccgatgagaaaatatataaataacaagatctcatgcattagatcttaatttcatggtcaataaacaaaaccctaatttctacatatgttttcattaagctgattccacaatcttaaggacctaaagaagaaccaaatgaagatcaaa

SEQ ID NO: 5625 - DNA, 274 bp, Arabidopsis thaliana landsberg
tttgaacaagaagaaaggagtgattttattgggagatgcattcaatatgcgcaatccagctttagcatttggaatgatggttttattatctgacattctcattctacgccgtcttctccaaccattaagcaaccttggcaatgcccaaaaaatctcagaagttatcaagtccttttatgatatccgcaaggtgagcatatatatctttcttttttttggtcgaaaatatgattatatttatttaaaattgtcaagatacaattgttcactgagc

SEQ ID NO: 5626 - DNA, 3568 bp, Arabidopsis thaliana landsberg
aaaaaaggggacctaacaccggaccacgaaattgcgactcaaggctcggtatacattatactctaatcaacaaaactgatcatataaggtttgattttcagtttaaattcaaaagggaaaattggatttaaaaatacacccacatggatgggagacttaaacatgacaacatcatcatgaacttgtattactaagtactaactatcgccaatgaacgaaacccttgaaaaccgaagacaacaagagattacatctttagcatttgacacgaaaccaaaaaaaaaaaaaaaagagtttgaatcatgttgtagacattattattgtgtaattttgctccatcatctaaagaagaacctcaagagtaaagaaattcgtaactcgaaaatggggtttggtttgcctcatacggagataccataattgctgatcttgttcacttcctttgtcaaagcgtttctctcttgcttcacttcagaagcacgcttcgatatctgaggttgaacaattgagatatctccattatacaatgtatataaaatggttgttaaatttattccaaccaagttcagcttctaactctagatcccagctcctatactctacctataagagccaaaagacaagtaacacttacttgagtgcggaatcgagaagcttctctcgttggcagttcttttagtacatctttcaaacctgtaaataaaaaatgatcatggtctaagtcgataagctttgttacggcgaaagttttcttcttctgttctatgcatatttttggtttcacaaactgtagcatgatagcacagaaaggtgtacctgctgcttgcttttcaatcttataagctgagctgatcgcacctctgatttgtttgcctgcttgcctgtgtaagaagatgaagaaagttaacataatattcatgttgatatataaatccaatatacagatgttgtaatttgtctggatcataaacctgagtttcatccttcctctaatgaattcctcttctgccacagttgcaactctctgaagcaatgaaagttaaaaattgttaagaattcaaaaaccgtaatccaatacctgtttctaatagactactttcactcaagaccattgactattagttggagggtatatatctatatatctattgcctagggttaagaaagagttagactcaagaatatccttgcactaaattacttcaaccgtgaaaggctatatgcctgcgaaagtagaagcattcatccatatcccctgaataaggctatatagaaatttctctggtcgaaacctaacccctttcaattttcatcataaatgccacacattttatttcaaaataaagggatgttgaagcaaaaccgaaagagagtaatatagctacctcaacgcataacataggcagtattctccacaaacgtcaacctcatgtcgaacagatcaactcattaaagcaaaagaagaggcgtacctctaactcttcactctcggctataagccgatccattgattgtcgcaactcttttactttaagatctgctctagaaagcaaagcctgaatccaaaacatactgtcaagtttcaagaacatatttaaccacagagagaccaatttataattcaacgatgttgtatacaacactgacctcttcactaacaaacatgcgtacagtattgtaatatacaaatcttctggtctctgcaaacaaacaagagcaatcactacagttcataacattctaggcgattgaaactctagggagattaaaagaatatccagaaaacgtacttttcagagcaaaaatcccaactccaaaagctaaggtgcctgatattagcggatgagatgcagcaacattcacaccatctacatacaagattgacaaacatatgagctaagagaaaaaaagcacaacaacatagaggtagccaccaaaggtagagcagacctttgatcttcccaaacaccatttgctcgtaaacgttatactcagaagcaatgtctcgaagagaatcctataatataccgaaacctcgatttcgtgagaggataaacaatcacacggatgacatagagagtagatgctgtgaatttcagattccctttggattccaatgaaaattaggaggttgtagttagcttacgatggtttggctcgtgtgagctacagaagtatctcgaatctgagacaatcgagctttggaggcgtcaatggtagaatccaccgtctccgtgatcgtcttctggtaaacaagcgcctgacgcaacgcatcatcgatccaggaagccgcattttccaccgtcgtcgttgcgatcttctgatactccggcggatgcactggcgaagattgttgaatctccggcgatttcgcgttgtccatctctgaggatgatgattctcccaacgctgccattagaaaagatctctccaatatcgcgacctccttcgctcaagttctgaagaaaaacccggtggacaaaagaatgacccgagtataatttaatcgggccccgtttcagattgacaactaagaccctgaaaagtttagtttatctccaacatttcccatctatttcttaattgttcaataaacgccagagacttttatagattagttatggttaatagattagttatttcactcaagaccattgactatgagtgtgttatgctatcaacaattgaattttttttaagttaaaaaggtgataatagtactcattgtcatttgtgagatgtataaaaagctcatgcctataatatgtgtgaagaatattgaaaatttgaatgtaaagaaactggaattgtgaaagatcgtttatactctggtaataaaccacaaaattaaaacattaacttgaaaccactgtataatatttggatcactagcagtcacttagggtggcattgtcttcaactattatctttgtcatcatttgacaaagtagagcttgcccataacatgaagcacagcgacgaaagcaatgaaaccgatgctcatgataagaacaacattgggggagatcttgagaccaggtgcgtcatcggtgtagaactgaagcatggatccggctgcaccaccagaggcacctcctccaccagcaccgctggtcggcttcctcctacgcatgcttgcagttgcagctgcacttcctctctgtggagctccacttcccaccattctttcttcttttctctatctgagaataatggttggcctttaggaaatcggaagcaaaagagcgatcatatataaaaaaaaacagagaattattaagcaaatgaaataataggagacatctaaacaccattaagctcatgtttagttttccatggtcatacattctatatgatactagaaacctctggtaaaagatttgcttcccacaaggcaactacgtatacccaaatttatatactactatcacattgtttccatttatccgtaagctcaaatcagtacaaattcaggtttaatcatgtaaattacttggtacaatcctgttctggatagcaagagttcttagaaacgtaattgaaaaaacttgtttcaatttgacatata

SEQ ID NO: 5627 - DNA, 1038 bp, Arabidopsis thaliana landsberg
gttgtcgaatggtagtcaagaatgtgtggcttgataccttttccaatttccaaaattcatctagccgtagagattcagctatcctgataattagtgttgttgagagttttcatccttctcgtagtcgtaggatcatcatactgatgctcaaataccggcccagcccaataaataggaaaagagaaaatggctttgggcctatgcttgaaggtgtttataacaagttgtctctaatctcaattagtttgaagaaatttctaggaacgaattttaaaaccaaaggcaacgtcgcaaagacgcggactataaagatgttcacattacatacggattgtcttccacgtgtcaatataaaattggatgtcttacatgtaacgaaccacgtggcgttatattattggtcgtcacgcgaacgaagcctcagaacaaacgaaaaaattcaattcataaacaaaaatagtcgacaagtctgcgatttacgttcattgacgaattcttcttaatcagaaattgaagccgaatcaggtgaaattcttttactcgaatctcgtgaatctaagagacaattatgattcatctgatctcgcaatgtttgattgttttgcgatcgaagattctacagatgtaatgaatatcggatgcatagggtttgtaacatgctcgcatatatttgtctgatctagaattctagatgttgatttcgctagcgtaacatttggacttgtccgattatgacacgctttattgatctgcatgcccaatgttgcttcttttttcggttgtgatgatgaatcttgatttttggacaatatggatcagattatcaagaattattacactgttattaagccaaattgttcatagattccatctttgatctctatggttttataaacatttgagattctacttcattctttcttaagtttgggttgttattgacttagttgaaaaacaagaagtgaagcaaaaatggttggtggtggagctccacagagaggaagtgcagctgcaactgcaagcatgaggaggaggaag

SEQ ID NO: 5628 - DNA, 2950 bp, Arabidopsis thaliana landsberg
  unsure (1)..(2950): unsure at all n locations
catccttgttggtgtacgcaaaggatggatatacacatttttgtgtttctattcgtaattatggtttgtgttatttttgaactttcacaaattgacatcaataaattggtctctttcggacatattttatattatttgaaatgaaaagtgattggggttctccttttttcttattctactatatcataacatagcattaatttttgttgttgttaaaactcatattaaaattatgcgacaagtaatctaattaattttaaaactttgattctatttagaaatttatcataaaacccaaaatttaatcatctaaaaaactaaaacatagaacaaacaaattcatagccagtctttggctataagccatggcaaccaattcgttcggtaatttgtcatcttctccgtttgaagaaactgcaaattattcaaaaaatattgtgtgacaaaaagacgagtgtatcatcattcccattcattacctcataaatatttgaagcacatttttgtacatattatttntgttctacttaaagcatgtttaattgaatagactttgatatccagtatggctcattattcatatgccgaaatgaattcaaaacttattgatggacctaccaaaaactcccaatgactttatcataaggttcataacacacaaaaaaacgcatttttgtggtctcttctcttaatcacagatttttttttcttaaaaaaactttctctaatcaaagttaaagaaaagaaattacagtcaaaacaattaaattagtattttaattaacaaaacagttaaacaaattcaaaataaaaactgccatgtggtctctttcttctctgtttctctctcccttcctttaagaacgcgtttgcagactttgatcagacttcgcgttcccgccgcccatctccctctctctctctctttttctctctcacacgtttcttttttgtctctctccctgattcatcgccgtagctgtgtgaccgaacattgctgcgagttcctcaaaacccaaatctttcttccacaaagactctgttttttctttcttcctttcttcaatggcgttatcgaaaaacagtaacagtaacagctttaacaagaagaaagtttcgtatatctcagtcccttctcagatcataaactctttatcatcttcctcattacaatctcttcttgtttctcccaagaaatcatcaagaagcaccaacagattcagcttctcttataggaaccctagaatctggttctttactctcttcctcgtctcactctttggaatgttgaaactcggtttcaacgttgacccaatctctctccctttctcacgttacccttgttcaacgacccaacaaccactaagcttcgacggagaacaaaacgctgcatcccatcttggtttggctcaagagccgattttgtctactgggtcatcgaattcgaatgcgattatacaattaaacggtggaaagaacgagactttgttaacggaaggtgatttctggaagcaacctgatgggttagggtttaagccctgtttgggatttacaagtcaatatagaaaagatagcaattcgattttgaagaacagatggaagtatttgcttgttgttgtctctggtgggatgaatcagcaaaggaatcagattgttgatgctgttgtgatcgctaggatccttggagcttctttagttgttcctgttttgcaggttaatgtcatttggggagacgaaaggtataaactttaaactcattataatctcttaaagaagaaagtaataagattgtgacattgttgatctaattgtttgttttgttgcaattttagtgaatttgcggatatattcgatttggagcatttcaaggatgttttagcagatgatgttcatatagtttcgtctttaccttctacacatgttatgacgagacctgttgaagagaagaggactccacttcatgcttctcctcaatggattcgtgctcattatcttaagcgagtaagatttcttaccaaaacaataccattttgaagtgtttctttgtttgactagattgagctaataatagtgttttatttcctctgtttttgcagattaacagagaaagagttttacttctccgtggactcgattcaagactctccaaagacctcccttcagatcttcagaaactccgatgcaaggttgctttccaagcgcttagattttctccgaggattcttgaactcggtaataaactagcttcaagaatgcgtaaccaaggacagtatctctcacttcatctaagaatggagaaagatgtttgggttagaactggttgtctccctggtttaactcccgagtacgatgaaatagtcaacagcgaaagagaacgacaccctgagcttcttaccggtagatcaaacatgacttatcacgagagaaaacttgccggtttatgccctttaactgctctagaagtcacaaggtattataccaactctatgaacaaatccttttgcttatgttttttcaagtaatactaacattttgttgtcattctacaggctgcttaaagcattagaagctccaaaggatgcgagaatctattgggcaggaggagagcctctaggaggaaaagaggttttggagccactaactaaagaattccctcagttctacaacaagcacgatcttgctttacctggcgagcttgaaccatttgccaacaaagcttcggttatggctgctatagactacattgtctgcgaaaagagcgatgttttcataccgtctcatggaggaaatatgggacacgcgttacaagggcaaagagcttacgctggtcacaagaaatacatcactcctaataagagacagatgcttccttatttcatgaactcgtcgcttcctgaatcggattttaacagaattgtgaaagatcttcatcgagaatcgctaggacagc

SEQ ID NO: 5629 - DNA, 4828 bp, Arabidopsis thaliana landsberg
aggtatacacgtggtgaggcatagttgattcagcttttatacacaaaagtctcgaggaccaacgtgagaagctctaacagaacgtgaaggccacaactattatcaaaggcacataggactctcgaacacaaaaagagacagagccaatgattattcagacaagtttcgtacctatttgattctatacattcctctctctcacacgccaaactcacatacacaatctctctctctttctcaacatgtctatataaatacacccacgtctatactaactcacatcatagattcacaattttgaacaaagaaaatttctttggagagaaaacttagaacttagattgacatagagaaatgaggaagtttggtggatcattgttcggcgtaagcctcactgctgtccgttcttctagcggcagcaaccgaagcaacggagtactataactacggaagtgctcttgataagaccttcttgttctttgaggctcaacgatcagggaagttgccagctgctcaacgtgtcaaatggcgtggcccttctggtctcaaggatggtcttgctcaaggagtaagtccatatacacacaatgcttgcagtatagttggttaatacaatggatctcttaatacattccaaaattgatacttcctgataaataccatcgtatgaattgcaaaactagtatcaaaattaccacttcttcaactagaacatgttggctagtgtggtttgtattggttctgttcttgtatcaccatctataggttcaaacagaaaacttgttgtttggaaaaaataacacttattggcatacaatatttttttaaaaccttaaatctacaaggtattgttgtcacttgtcatcagtacaaagatttaatttgtatgaaaccttgaagtactaattccaataaagaaaatatatgaagtaataaaatgatattgaggtttgtgtatgtatgaatgaataggtgagcctggagggaggatattatgatgctggagaccatgtgaaattcggtttaccaatggctttcgcagtgacgatgctatcgtgggcagcggttgataaccggaaagagctatccagttcgaaccagatgcaacagacattatggtcaatcagatggggtactgattacttcatcaaggctcatcctcaaccaaatgttctatggggtcaagttggagatggagaatcagaccattactgttgggaacgtcccgaggacatgaccacttcaagaacagcttataagcttgacccgtaccaccctggctcggacctagccggtgaaaccgctgctgctttagccgctgcttccttggctttcaagccatttaactcctcttactctgctcttctcttatctcatgccaaagaggttcgtttgttttttgttcaactcctcttactttggtttatgaatccggttcggtttagattctcaacatttttgaaactttgtttttgtatattttagctcttctcatttgctgacaagtacagaggactatacacaaattctatcccaaatgcaaaagctttctacatgtcatctggttactcggtatatatattctctcaacactttcattctctaatccttccattgaatcttgttccactactaaaatgtctctcttgtgtatttctttgaaggatgagcttctttgggctgcagcttggctacaccgcgccaccggggatcagtattacttgaagtatgctatggacaattccggttacatgggaggaactggctggggggtgaaagagttctcttgggataacaaatacgccggtgttcaaatccttctctccaaggtaaactatagttttgttaaagaatgttcttcacggtttcaaaaatactactaatcatggtacttgtttgatttgtgtgtgtatagatcttgttagaagggaaaggcggtatatatacttcgacattgaagcaatatcaaaccaaagctgactacttcgcttgtgcttgcctcaagaagaatggtggctacaacattcaaacaactcctggtggtttaatgtatgttagagagtggaacaatctgcaatatgcatccgcggctgcgtatcttctcgcggtttattcagattatctctctgcagcaaatgctaaactcaactgccctgatggtttggtgcaacctcaggggcttcttgactttgctagatctcaggtaatgatcaaatcctcccaagaaaccgaaaatttttctcgttcttttcaatccggtaaccgaggttttcctttgcaggctgattacattcttggaaagaaccgtcaaggaatgagttatgtagttggatatggaccgaaatatccaatccgtgttcatcataaaggctcttcaatcccttcaatatttgctcaacgttcttctgtgagttgtgtacaaggttttgactcttggtatagaaggtctcagggtgatcctaatgttatttatggagctcttgttggtggacctgacgagaatgataactattccgatgaccgctcaaattacgagcaatcagaaccaacattgtcaggaacagctccacttgttggcctattcgctaaactctatggaggaagtttaggtaactaaacaataaaccttgagctcaaagtctttagctttacccttatggaatcataaagtaatgtaatgaacattttgtaggatcttatggaggaggatcatataaaccttatgaaactacaaaaccagcaggtttgatcttttttacttgcagcttccaatgcaactttttctacagtgtctgattctcatttcctctaaaactgtcacagcttcatcttacaaagcaacaccaacaacatacagtccaaagcaatcaggtgcacaaatcgagtttcttcattccataactagcaactggatagccgggaacacaagatactataggcacaaagtgatcatcaaaaacaattctcaaaaaccaatatcagatctcaagcttaagattgaagatctctcaggacctatctggggtttaaacccaacgggacagaagtatacttaccagcttcctcaatggcaaaagactttgagagcaggacaagcttatgattttgtctatgtacaaggtggccctcaagctaaagtcttagttttgagttacaactagtgagaaaacaacactttcttcaatctttttgtttatgcttattatgagtgaaagatgtgaacatagccaaccaagttgagcctaaatatgagaaatgtaaatttgtgacccttggtagagaatgcttttttgtctacctattcatatggcccatacttaggtaaaataagtaatgatagacgaagataacaatgattgaacacccaaagcactcaaaattgagcttaacttaacattcagacaaaaatttaaggttctgacagaaacttaactagaacaaaaaagaaacgaaacaataaaaggatgcaaagtatcataagttaacaacataagaagagacttttcttctacagacgcttctactcgtcaccgaaggtagtcttcttacctgcaacatatattgcaaagccaaaataaacccaagaattagtgacatgttaacttcttataaagaagctagaaaacatgaatcaagaacaatttatctaaccttggggagtaaaactaggtcttccacgaccacgatcacttcccctgccaccaccactaccaaaacgaccacgacctccatctcttcctctgccaccaccactaccaaaacgaccacgacctccatctcttcctctgccaccaccactaccgaaacgaccattgccccttccaaatccaccaccaccactgctatctcctctcggtctaggctcatcgactacaagatagaatcctcctccaatatcacttccatttagttccaacgccttctctttgccttctgaaaactcaaggtaagcaattctgaggagaaaaaaaacattaatttagttagcacttaactttcaatagagaaaattcacaaactaatgacaactaagagagagtaataatcactaaccctttggagttaccagtgtcacggtcaattggaacagatacatttttgatctctccacatgaactgaaatgttccctcaaagtgttcttgatatcatcctcagaaagtgaagcgtcaaatcccttaacgaaaatcttcttttcatcaccaccatcaccaccacttctgaagttgctgcaataatttaaataagagaatattatcaacatatggaactattttacaagaaacaaaaactccaaatcatggaagactaacatacccgctttgtggagtgaatgcgggtctctcgcctctctcacctctctcctgagcaatatcaagacgaatctcacgaccgagcaatggcctaccatggaattcaagcgcctaaaaagtataaagaatttaatcagcaactgtaaatcaaatgatgacaactgaaaaatattatcattcatatgtaagaactactcaccttctgtgcttcttcagaagatgcgaactcaacatggccaaatcccctgaaagaaccatcgtctctgttggtagagaatctaacatcaacaacttcaccagcttctttgaagaaattctcactgcacatttgagtataagatgtcaggtcatgataaactttcaccaagacaagagagggaatcaaaggtttgggtacttacacatctgctctttcaatgttaaaagagagattggcagcaaagagtgtctttgatcctccagcagcaggagtggatggtgtcttttggctgacgtgtacaccaacttaactacaaca

SEQ ID NO: 5630 - DNA, 2335 bp, Arabidopsis thaliana landsberg
gcccattggatcccgactaagctaggtaaagtttctacaatagaacaaaaaacgatttaggtctaccgattgaaattgacgcaaaaaccttagagaaatgggggaaaacttacataagaggaatgcaaaacacaatttgttgaagagagaaatcggagatgcttgcgttggaggaatcaattgcaacttgcgagagagaactcgggtcactcgcttaccggatcgaactgtataagatcagtggctcgacaatccaaaaaaaaaaaactattactaagtggaaaaaaatggtgaaaagaaataataatcctaaaatatatttgtattgtgaaaataatcaaatttaacttagtgattttttcgcacaaaaaaaaaacttagtgatttttaaaaaaagtttcacatttcttatatcaaagaaaattcaaacttgatataaattaattgattgcataactaaataaatcgattcaactcgatagagaagatcaattctaaactaattttagttgaattatataactcatgtcaacaatgtcttaggattcatggtactactcaagagttactgtagtgaatttcataagacactcagtgttataactctcagaaaaatttgcatagaagtaagatcattgtgctactactattgaatatatgaattaaaattaatattgtagccacatttttcatgctaacagagaaaagaagagaagatcgaactttagtataagcaagtggtagattatataatgaaatttgacattacaagcaaaccatgcatataattttaagagctgcgggctgtttacaacttttatcaacagccacttcaacttgtcttttcttacacttcccaataattaccacataactccccagcacagtaaaaagcttaatagaaaaatacaaagtcaaagatgtggagcttctttttgtctctaccatttcgaatgtttcggtatcatcaattcactttagaccctgaaattctttccgacaaaggtttgtccaaactgccagttcgaaggagcgatgttccatgaagtagaggttctacgatcgctggatgtaacacggaaggaaagtgactgaccaacgagaacagcattagactgccaattctgtccccagttcctagttaaactcatccatccagtctttgaacctttcacgctcgtcctcacgatgtctcctgctccggcaacgtttgtaatcagcaccaagttgaagtaacggtgaccgttgatcgtgaaccttatccctccactcttcctacatgccaccctttacaaatacccacatttcataatcttagcattttgattcattgcatttacaacttctttaatatacgaatcatttctcaaatcataagctacatatagggatgtttaagtatacctgcggtaagagatggggacaatgccggcacgatactcagcgatcttgaggaaaacgggcatggcgaggtcgaaatgagagcgtggcgggttgcaccagccaccattgtcgctaggctgggctaagtttggagggcaaaagttggttgctgttacgaagacagaaggactgcccgggtgacaccatttaggatcattgacacatttgatttcgaagcatgcaccgcagctttggccactgttgaacaacgatgtgctcagcgccgcagtgtttgttccgtatccctggctatacagattcccgtatccacacgcgccacctaaataataacaacaaaaacaaaagtaaatgaaaggaaaaaaaaaacagagctctctgttttagagagttggtataaatgagaaatgaagtatggttcttgaaatatgtgtttaaggagagtagactgacccattgttcccgaagcatcgtttccaccgtagaaagtggcgtgagcggtttgccaagaaccacctgaaaagacgcgagggatttcggcgtcggtgaagctcaagagaaggaagagtgggaatatggttaagagaatcaatggattgattgccattttggtaagtatttttaattgaattggagaaagcttgagaaaattgttagactagaaggcttagagaggaacttgaggatggtggaaaatacacttgtgaagatcgctatttatattggtggagagaactccaaagttagagaaatagatggtactggccgaaattagtatttttctagacaaatattttgaaagtagatggtgaaaatataggttcataaccgtttgtgatctttttattattattgcaatgagatgagatctttaatccgattaaccctgggatctattaataatacaatgtgagattaacttcagattaaaata

SEQ ID NO: 5631 - DNA, 1696 bp, Arabidopsis thaliana landsberg
taaaatataaagtaagataacctctcttcataagtatgaaacgcctcaaataaggtcaactcgatattctttgtcgaactttttttagcatcaaaatttccaagtcttaccaattttaaaatccaggattcaacgagataatatatttgtaagtatcattatatcatctaagaaaattagattacattaaaaaaatgacaaaacggttacaaacctacctccaccttacgtagaaatagtaatcttattttaaaagttttaactttgacaaaaggaaattaaaatttagccaattatctctcgatctctctctcactctaactttggagtttccttccctccataaataccgaacctcactccttcttcctccaccatcctcatctctcaatcaacaaacctaactctttctctatacaagagcgcaagctcgaaggcgctcttgttctttcttcattttctccttaacaatcaccctcatagtaactttaaaactctctgtttctagtaattcacacacaaaatggctattaaactagcaattctatttaccacatttgttctttttagcctcgccgacgctagaatccccggtatttactccggcggcgcatggcaaaacgcacacgccactttttacggtggcagcgacgcctccggcacaatgggttagtcccataaaaacagagcataaatacaattttttagtataaagttttctattaaaagtcatttttaacaaaatgagtttaattcattacaggaggagcttgtggttacggtaacctatacagccaagggtacgggaccaacacggctgctttgagtacggcgctgtttaacaatggtatgagttgtggagcctgctttgagctaaaatgcgccaacgaccctcaatggtgtcactcaggtagtccttcgatcctcatcaccgcaaccaatttctgcccaccaaacttggctcagcctagcgacaacggaggatggtgcaacccaccacgtgaacactttgacctagccatgcctgtcttccttaagatcgctcaatatcgcgccggcattgtccccgtctcataccgcaggtacaaatcttgtttatatgtctagggtcttggcaatatttagaagataataagaccatactgtaattaactttaaaaaaattagtggaggacattttgttctctatttaccttttaactttactaaatgatactttttagttttcattaaatatttaaaataatagttaaaaattcgtagtttaagtccttgaaaatcaaattttgatgatattttactaaattttagtttattagctgtttctagtatacaaattagtcactaaatggacatataagtgagtgactaaacgagtgtgaaatgttggttttgtttgtagggtgccatgtagaaagagaggaggcataaggttcacaatcaacggtcaccgttacttcaacttggttctgatcactaacgtggctggagcaggagacatcgtgagggctagtgtgaaaggatcacggactggttggatgagtttgagcagaaactggggacaaaactggcaatctaatgctgttttggttggtcaagcactctctttccgtgtcacaggcagtgaccgtagaacatctacttcctggaacatggttccttctaactggcagtttggtcaaacctttgtcaggaa

SEQ ID NO: 5632 - DNA, 574 bp, Arabidopsis thaliana landsberg
  unsure (1)..(574): unsure at all n locations
gaaactacctatgaaaacgtaataatgaaattattaagaaatgattacttattttttgagttttttcatttaaaattttaaatggttatcattgctaaaatcattagtttaactgttttaattaacagttaatcttgaaaaactaatttaatttttaaattaatcttgaaaaaaaagtaaaaaataatggaagaatagcactttgttggatttggtagtagagcaggcccaactaacaatttctttgttttatttcaacaaccaataacaagtcggtacgttaggatcccttaacactgaaaaatcccttccttaaagaaccgaccctgatcatttttgcaattttcttttatttttgggctttttggagggactatcacctttaaagctccaaaagaaacctgctctaatgtgtataaattctaaagatcaagagatgacttttcacttgtgatactgtgaggtctctcacgcccatatacctctcaaaattntcttcggaattgcacttgcaaatttaaggagaacaataacctcgtctatagtgaatctaaaaatgatagacaagagaaat

SEQ ID NO: 5633 - DNA, 1679 bp, Arabidopsis thaliana landsberg
tcccaaagattaatggatccttaggttccttctcataaggcaagactacgaagtctataggaatcatgctctttccaatcatcccgggaacatcaataagaattccatctggaatccgggtagaacgatctaccaacacaagagtgataaaggtagcaactgaacgaggcatcagattcacactagaaccgagatcacataaagttcttggaaaggatcgtgattgatggtgacactaagtacaaaagttccaggatcacgtagctttcttgggattcgttcctgaatgatgtcgctgccctgctctgaaatcatcataacactacattctttcgtcaaattcttagtgaccattgtcttgacataccttcttattgtgggagagagatgaattgcttcaactagaggcatctcaacaatcagcttatcaatcataggcttgcatctgacatcatgtaaggcttgtcttaactttttaggactcttggggaaaggaattcgccgatttgctgacttggtttcagctggaatttgcacattatctgaatgagctgggtgtcgatcgacagggggtgtgtcgatcgacactatcgggaataatttcctcctccttcgcgaaattgtcgattccacttgacaaaggcaaaacagagtcgtcaagagtaattggtgtcgatcgacaccctgatgtatcgatcgatgatatatccctatttttacctattttatctatgatttaggattgtttttatagagtctctatagtgctttatagtgcttttggagtgtttttggtgtatttacaggtctcgtacgttctgggggttatcaagcgattatgggacactttggagcaaaaacggagcagaaaaccagtcttgaatgtagtttcgatcgataacagatttgtgtcggtcgacacgggttcgtcacgagttttgcacgaagtttgcacgaaactgtacgaaatttgcacgggctcagtttcgccccaaaaaggcctagaagttaatatttaggcccaagacgtgttttagacaattaattaggttcttaaggtcattgttagacttcggttttgttaagttttgttttggtgattgatatacattttgagagaaaaatccaatccctacagagaggattctgaactccttttacactatttctaattcatcaatgcaaactatttagattatgatttgtgtttcttttatcatgtctgagtaatcaccttgttgggtttagggagtctcaatagggatttagatggattagtagatcgaaaattccttacgattattcttagagttcttcatcttcgttattctgattgctagttttacattgattacctagaacttgatattaaatagtaggtatgcccaccataggaacttattgccggaactattatagatgagcctaggcatttacgaaagagcatgtctgctcatacaccggcaggaacaagtggaggacgtgttggatagtgcggtcatcctctctatacatatagtgagtacctttttacacctccggagcactgtggaaatatatttcctgttaagagaacggtgccaaacaaaactaacgtagcctgatcaacgacctatatatttcccgagacgaatctttatacccaattacttgctgattttgattgtacataaaaacac

SEQ ID NO: 5634 - DNA, 749 bp, Arabidopsis thaliana landsberg
agacaaacgtcttcttctattgctgatgaaactaccagaattccaaagtcctacacttctctcacctctccctatcatattcacaatctcaaacttgtctgagataaacttcttatcgatgaatttgatgtcaccactcaaacctttatgcttagcactctctggaatagcctcaagcaggtcatatactgacaaacctggtaactttgcaacttctgctgctcttgcaagactccaagctatatcgtgagcccatatgctacaaacgctcatccttgtaactacttcttcgagtcgcaaagatctcttccatctcaaagtaaagttgtgaagctcctcagtcaacggaatataagacttgaaaccaatcacaccttccatttcctcttttgctaaataatttgtgtcttgaaaattattcatgcttctcgctgtgaggatccaagcatatccttcctccatcattcctaacctccgagcacatggaaagagacgatttgcaattcgttcagaaatgtgcgcaacaaaaatccttatccccgaggccttaaactttcttagctgcttcatgatacattcctcattagatgagacagaaaattccgccttgtactcaatgtgaatggcgttctgttggaaatgtccaaccaaaggtagcatactctgtctacagtcatcatcatcctcgtagataagacagcggttctgcaatcaaaattgctgaacagagctgcaattccctttgcttc

SEQ ID NO: 5635 - DNA, 1450 bp, Arabidopsis thaliana landsberg
tcatccagtaaaggttacctcagtgttcgatttctctgaacatgttcattggatttgatggtactgtgtgataccgcgttttggcggaagctttcttaggataaagaggaccagagacgatggcaatatctccaccaactgtaagtaaacagaacacactttgtgtttagagatttgtaaaagaagctttatattcagattctaagattcacataccgggtctatatacacatgcacatatatggtatctgtagaggtgtatggaaagcttaccaagcaatatatgaagtatatgattgggtgatcataagatatgaagatctgctgcagtatcaaacgcatcaaagcacatctagaccattaacagaagatgatatgaaagatctggttagctgtggtttcggagatccaccaacacagagaattcaatcaacaagatatggtctaatggtatcaatagtatgatgtgtatatctttaccatgatacatctgatgaggaaacatgtaaagcatatggttgtcacgtagccaacctgcaattcgtacaacacataaagggggtaaggatccaagaaacggaatttaaagatcggggtaactttggtttaatattcaaggttcacctcttgtagcttcttgcgccgccctttagactctactggaaatcgttgcagcatcaggaaaagcctgcaaagaaataatcatcaaagacgataaatcaaggcgacttcatgagaaacttccttcataacagaaatgatatatgataaatcctgatatggtacaaaaaggatcttgtctagctagcaaccagtggagggcaggaatcctagttttccaaatgatatcatcaactcatttgtggcaggaaaacatgtggcagcaggtaacaagcgtttaaactaagctaccatcatcgtgtagcatatgcaagtgcaacatacttaccttcctccatataataaaaagccaagggccgcaaacaatgagacacctgcaatatacattcacaagagatgagacatagagtgcattaaaaaaatcaatctctgtgtaaaatgatctatacttcaaactatacctgcaaagaacatcttagaaatgattaccataaggtgaacaggcttccaccacaaaaccaaccaaagagcaatctgaaattttttctattcaaatgaaagattaaagctaaggaacccacaacacaaatggatcgtaaggaaattcaataagaagctcaggcccacaggtccaccaagttcaaggttaactctaaactttgaaaatttctcagatattacaaaggccaaataggtagttagtttcacctgaattacgtatacaactgcattaattgtgaagaaacttggcctcagtccatcagtcgatacagcacgtgcctgccaagatagagtaaatatcaacaacaatgcaggaaaaactaaattg

SEQ ID NO: 5636 - DNA, 5205 bp, Arabidopsis thaliana landsberg
tctaaaacggactacatttctgacaaagcaagtgtattcaagggaaaacattagattcagtttcttctcgattctccatttggggaccgttttaaaatacctggaaacaagtcttccttctctggtaagcttgttcttgcactaatatgccgttcagttagtgacaaagaaggtgaatgagatgtggatggtattcggcggtcatccaatcagatttggattaagagaattttgtatcataactggactggaatgtgggaagtatcccaagaagaaagccgtggaggctgttataaaggtgaaacttgggtgtaaaagtgtttggaagactctgtttaggccgaggtttgggaaggaaccgaatccaactattgctgaattggtgagctgggtgaaggaggaggaaagcatcgaagggtggaagcaactggttctctctcttacaattctggtagatggtgtgatagcgtcccacaataaccccaatagtccgattttgaagactgttgacaagacgaagaacgtggaattgttcttcaaatacccatggggaagggtgtcttttacccgtactttgggcaggatagcaaaattacaaacaccttctgatgttgaactactgataaggtgtttactggatgggtcttatgcactttatggcttcccattagaactccagctgtttgcttttgaaacactctcatccattgctaagctagtacatgatgatcaagctaacaggacatttactcagaggtctatccatcgactttcctcactgcaggcaacccggacatctagcatattcgagtgtgaggctgctgatgaggtgtgttcaattgtttatgtacgtacataaaaagtaaatgtacattctctatggttaacaaacttatttgtgtaggttgaggtcaactatattgtgaaaccatcggacaatgtgtaggctgatgatgaagttgatgatccaaaagttgattacattgagcgactgttgatagatgggcacgagtggcaggaggatgaatgggttggaggctatgctagagtaccaaagcaggtgcgcccaccacaacaagaagagataggtaagtataagtataaaggttggttacaaatttttttgttattgcacccagaagaaaaccaattaatagcagcaactggtctattgtagatgttaagaggaaacgaaatgcaccgggcccgagccctaaagaacctgctatgaaaaaacataaatctgaaatggactgtgataatgaagaaaatactgaagattgttttggagagcctgtgcctgagaggtttattgttgaaatgaggaggtctttcaagaagctggaagaccaaatgtatcaaatgcaagaagatatgaaagactttgtccgtgagcagatacgtgctgcccttgatccaaaaggcaaaaggccaaaacaaaccataccttcccatgattcgcgggaaccacctacttctatggataaggcaccggttactgcgaagaagccatcgagaaggatgtctacaaaaggaagcactggaacgagaaagtcttcaagcctgactcgtgtttctcatgatgtggacactcctgtactttctgttggctgtaattccaaaggggaagatttggatgtccctggagtacataccactgctttcagcggaagaagaaaaccttcaaagccgaagaaaaatgtttcttttgctgttgacactactgaggaacctgattccaataaggaagatatgcaaggattcattgatgaacaggtaagtcatgtacgtacattgctaaatattttataatccatatgtataactgtactatctgcttcgatacaggatggcgctaataatgaaagtgattttactgcaaatgatggattggattcttttgccgctgaagaagagatattaggcactggatttttaatagttccttatgctggatccacacaatcccatctggtatgtcgtctactaatactcttaacaatctgtttaaatggtgtacgtacatattcgcttaagaagttagttaaactatgtttcaggatagaggaaatgttgttgttggtaagactgtcttcttaggttcaatgtctgggactgtctttgtaacacaggaagagaggcctgtggaagaagctactgttgacaccgagatggaagaagttccatctaatgtgtctgcaagagtttcagaggtagatcttgtggcaatcgttatatacagatttccatgactatatgcatatatattacattcaattgctccacttatctaccgcttaactctattgtagcctatgtttcatgataatggaccaaaggatgttgctgaacctggcttagttggtacccatacaagtgccgatgaaatagctgatgctgacatagagatggtagacattccatcagttttaccttcaacatctgcacaggtatgtgttagtcacttgttctttttccatatgtgtacgcccataagactttgcaaattatttttgtttcaggaagaagcaagagatgccagtgcatcgactgaagctaatggcagcgagtcagaagaaacttatgagccttctgatggagatacagctcacgtacctggcacaagtgtacgtacatttttgtcactatgttctgtgtacatatatattgtttcatacattactaaaaagtttctttccgatgctaaattctacaggttgaggcggcaggagaatccaaattagtgacagggatggaagttgaaatacctgagaagacccacagtgatcccccgtcaccatttcaagtagttaacaatgtaagctaactcttgcaacaaataaaatgtactatttactgttcaaatgtataaaatttatattatgcaggtcatacgggagttggataccaaagccgttggtgatttggctgcagccactgatgtggaggtaacaatttgtgtgtttcaattcctattttcggaatagcatacataggattatatgtgtacattatatatacttgtgtacgttaacttgcacaggtagtcatggaagagccgtgtattatcgaggggtctgtagaaactgaggatcctaacccagggtcagatgaagcagacaagaccgatattcctaaaaataatgtatgtacctattttaaacatataaaaacgtatgaaactgttgttgacaatcatatttgttaacaggatgaatcagacaatgctgctgctgtcgaagcagaagaagaaaaaaaatcgtcaccaaaggtcccaaagaaagtgaagaaacaacttgtctatgaacaggatgatgcccatcctcatggttttaaggcaaaaacagtattggtgcccgatgtaccagctcaacagatagaggttgttatcaaggctggaaatgtctcatacaaccccctggacatgcttgacccttcaaaagtagaggaattcaacaatatcattaaaggaccctctgtctaagtacattatagtaaaatggattatttaatatctcaatcatcatttttccaagtcttaaggttgttatcaaatatttttctggattttacaggattcacactcttttcgggtttcgaaaagtgcccaacgacttttttgcgaaccttctaacacctggtgaatgggtcgaaagtacggtacgttgcatttatatacgtacattccttgttataaattgtacatagatgattaaatttttcgtggaagtgtacgtacactgatatattttttgaatatttcagcatttagaaatgatggcaatgttgatgtggcacaagaacggggaacagatgatagcaaacagatgtattgtattggacatgatgctgacgcatcttcttaccaagcgggtgggcgacttcaagaagtgtattaataagaacgggttcaaatggggtaaattactgtccgacattgctaatggagttcacataaaccgtgaacccaatatgaagtggatgaaggatgtcgatgttgtgtatgctccgatgaactggaagagtgaacattgggttgctttgggaatcaaccttaatgaacggctaataactgtgtatgacgctttaatatcgcacacgcgggagtcggctgtgaaggcgagaatgactcctatttgcgaaatgatgccgtacttagtcagagcgatgtgccaggatgtattgatttctccgtactcagttgaaccttttgagtatgtgcgttgtcctaccgttgctcaaaacccaactacaggagattgcgggccatacacgatgaagttcctggagttgcttgcgtttggacaccctttttcggatctgataaccattcgagaagcagatatggtcttctaccgtcagaaatactccgttgacatctacgagcacggcaagcgggaggccggtactgtgcacttggtttaatcgtccaagaacaatattctggttctttgcaaccaattattatgaacaaacctgacttatatatatgattgcaactacatttaatttggagattgtcagaagttaatttattgtcctctatcatattgtcgtacacatcgttcacttataattacataatgtaaatgtgtacgtacatatctatatgtctcgtacactgcatattaactttataacataactcaagtgataaattgatttgacagccaacgcttaccaacacaagtatgacattcatttcaaccgtaattgccccaaccaaattcacagtagtggttattaaagtgaagaaattactgacgacctctgactatctcatttcaaacatggttaacccgactcttcaagacgatttactctcgaaaatagctaagaacctggctgaccaatgctggtccgaccttggtccattggtacgatccggcactcgtggaagagacattgtctaccacccggatgtcctcaaagatgccaatattctcaccttgtgtgtctcgcccgatgacttccaagctggagggggccacaatccctccggatccgctgatgaaggccgacatcgaccatttttcttgcggtgttttgcagctaataatcccacgaccgtgtattacgaaggtattcgtgttctaacgcatgaacgaaacatcaatgaagccatcaggctcttacagcgtcatgctccagtacgagcaaatgcaacacttgcatgcgccattgtattcatatgtgctgggtatg

SEQ ID NO: 5637 - DNA, 4098 bp, Arabidopsis thaliana landsberg
  unsure (1)..(4098): unsure at all n locations
aatctcttctactgtaccgtcatcatcgcttacagtggaaccgtttctctccggtttctagaaatcgcgactgttcacaacgaagatattcttgagaatagcgccgtttttcagaacggtgaacacagggatcgtcttctccggcaatcattgcttctcctccatcagtttctcttccttgacctccatgaataagtctgtaagaacgaacgattgagagattttcgaaaatggaaaacgaataatatttttttgacacgttcagttagttttattagataccaaatcaaacaaaatccctagacccggttaatcaattgatggtttaatgtgggaaggatagaattgtccttttatcctccaaaaacaagagaatattacacgtaaaggcactattttgaaactttggccacaaataggtactttaaaagcattagtcactttaactcagtagaattacccttttaccctgaaatcgttggtttaacaaaacctaacaaatttagccggtttctttaaactggttccggtgaaccacgtcttatcaaccgtctgggtaactccatattccaaccacgatcgtaaaaaaacgcttacccagtaaaaaacctaatttactgtttctccacatcgcgactccagcgaatccggcgactgctccgaatccggcgactcctccgtcgctgtccatcaatccgccactcaggcaactctatactctttgaataaaaaccaaatagtcatttcccccaaatctctgcaataatcgaattcgatttcgatttattgttctcgtaagccagatttcattagcattccagttgattctcactgatcggaatactcaatggaaggtacaaatcgtttccaatcatcttattttnnnnnnnnnnnnnnnnnnnnnnnnnnnntcttctcgctgaatgtttctgcaattttttttttgaatcgaaaaatgtttcccaattgtttgtagctaagcacagacgtttgtggttttagtagtttgtacaaatactcgttaatctaatcgttatctcttgaactagtttcttgccaatgaacagggtcgacatctcaggaaccatcttctcagtgggattcaaaccttccaaatagactcttcgccaccgatcattatccgaggggaaggctgaacgtatactctagaccggatattctatcctttatcaagaaggtttttgatgggacagaggaattagattttatacttcagtcttgctttggtcctttattccatttgccagttagtagggttgcgacttcgggtaaggtcattcatgccttgttatgtagacagttgcttactaagaaaaagtatgagttttggacagtttttggtggacacccaatgagattttcactactagaatttgcttccgtgactggcttaccttgtggggagtttcctgacgagtatgaccctgaagattctcctgtttatgatgatggcaagaagagctactggaatgagttaattggtccagacaagacggttacattaggcgagatacttcggacgggtgagctgacgagctgcttgagactggcgagctgatgagctgacgagatgcttcagacgggtgagctgacgagctggttgagacgggagagctgacgagctgctcttagtctctaagtgtcctcgcggaatccccctttgacaagacatgctattccgtatttatagccttctgcgtgtaatgacatctttacaatcattcaataatgaaatggcgcctttcatgtcgagagaacagaaccctagcctcaagctctggagatacatagcgtaagggtttctttttgcaagacatttggagtagaatgagaagtgaacagagtcgggtgaagacatgttgatgaagtcagggcttttatctaaacgaactcgggatagtgtctcgacagagaaagctgcagatttcccttcatgaccagatttaatccagtttttcagagcctcaattccttcttctgaaacgtggctaacaattagtgcgagaattggttccggaatgtataatcttgcaatcttcctctgttgacaacgaagacgaaagtttatagaagttacatatactttgtggaatgaatgtaaactatattgtttaaaaaattgaaaaatttaacctgtgtgtcgctagattgtgtgatagagtgtagacatttcgatgatgtactcattttgtcaatttgttgcgaataacgaaagagtaagatgtgatggagagagaagttttagtactgatcaaaacggtttagaaatgagtaataaaaacagagtaattaattggatgtttctcttaataggtcacaatcgtgagggatgaagcttagtggggagtacgggttcagttaatattcactatatattaactctaaatataaaagctaccacttgaattccattaaaccaatttcatatacaaaaacgcaagtcatagttctgaaacaactcaaatcatttgtataataattgtgacaccttttacttgttgattattaagcttttggaaaacggtttatagggatggcaaatgatttgagttgtttcataattagctcgaatgatttacaaatcaacaacacagtttacaaacagaggtcaaaattaatatttttgtgtattttgaactattgttgatttgtaaatcttaatataaatgtcatccagtcatagtgaattattcaatcagacaaacgaattaatacagttatgttgtggatggattcatatggatacattaacaattatctttctcttttaacatgaaagataaatctaaaattccttctaccggaaatattgagatactgttgtatagcggaaatattcccactatcaggttttaaactaggatttttttggttcgagcataattcggggacattatggttagagcacaattatagttagatcaaaatcctttttttttttttttttattttttttttttttaattattattacgtttattatgagaagataattatggttagctctccagtgtttagcattattatatacagttactaaacaccggcgatgggttgaagtttcttccattccccattccatccatttcaacttgaaaacaaagaaattatgctcaagttagcaaaatacgacaagaatcaattaccatctggtgtcaaaaaggttgttcagcctaaactaaactacttatttttctatgttttacattcattgtaaacaaaaacttatcgtctgcatatgtttttttttttttatctcaggttgctgctatccctgaaattttcatcccggcaccaatacttgctaaaattgttagctacgttgccgaaaatggcgtggatgctttgaaacccttggttatggctgatccagcatttaaggctgcagagtattccaaggaaacactgacttgtgttctcatagacaaatctcgatatttcatgtggtggtccatgccgcattccatttattattatttcttcacaaactgtcttggagacaacaatccacatgctttgaaagctgtattgtacaaaccaatagcatatgagaattttgttgccgaatgctatagatctaccttatgggcaaagctatacggagagcattaaggataggaatcaaagaaaggaacaaatagtcccaaattttgaaagacaatgaaaagtctgtttttgatgttcatttctgatgttctacctttcatttcagaaaatagttgcttattcatttctgatgttctgcctttgtttttataaaatacataatttatactctgtttactcctatgaaaagtcagatcccatcaaaatttgttcgttgccatgaatgaggtttgcatatttatgtttaagctaagtccgcaaaaatgatttccaattgataaccctttaaggccatatacgtgtgctcacgtcgttataataaactccaaacggacatatatctttggacatgttctcttggacagaacatatatttagcatttaattacaaataaataactcgactataaacgacaccagacgaattatctatctaatattacaaccacccccaactcaataggtaatctt

SEQ ID NO: 5638 - DNA, 2604 bp, Arabidopsis thaliana landsberg
taacttccaaaataaaataaaaataatacttttacaatatacaaataaaactcataaaaaacacacacacaatcttcatcttcctcacttactctcaccctttttaaaaccaaaccctaacttacacagaaagagaaaaaaaaaacgaaaaaaaatgaagcttcttcttctcctcctcctcctccttctcctccacatttctcattccttcaccgtcgctaaaccaatcaccgagctccacgctcttctctcactcaaatcctccttcaccatcgacgaacactcacctctcctgacctcatggaacctttcaacaactctctgttcatggaccggtgtcacgtgcgacgtctctctccgtcacgtgacctctctcgacctctctggtcttaacctctccggaactctctcctccgacgtagctcatttacctctgctacagaatctatcactcgctgctaatcagatctcaggtcctattccgccgcaaatctccaatctctatgagcttcgtcacctcaatctctccaataatgtcttcaacggttcatttcccgatgaactctcctctggattggtgaatctccgggttcttgacttatacaacaacaatttaaccggagatttaccggtttcactcactaatctcactcaggtccgtcatcttcacctcggtgggaattacttctccggcaaaatcccggagacgtgcggaacctggcctgttctcgaatacttagcggtttccggtaacgagctaacttgtaaaatccctccggagatcggaaacctaacgactcttcgtgaactttacatcggatattacaacgcttttgaaaatggtcttccaccggagattggaaatttatcagagcttgttcggttcgacgctgctaattgtggtttaaccggagagattccaccggagattgggaagcttcagaagctagatacgttgtttcttcaagtaaacgcatttacagggacaataactcaagagctgggattgatttcaagcttgaaatcgatggatctgtctaacaatatgtttaccggcgagattccgacgagtttttcacagctgaagaacttaacgcttttgaatctcttcaggaataagctctacggtgctatacctgagttcatcggtgaaatgccggagcttgaagtgttgcagctttgggagaacaatttcactggtagtattcctcagaaattgggggaaaatggtagattagtgattcttgatctctcttcgaacaaactcaccggaactctgccgccgaatatgtgttctggtaaccggttaatgacgttaatcactcttggcaacttcttgtttggttaataccggattcgcttggtaaatgtgagtctctgacccggatccggatgggtgagaatttccttaacgggtcgattccaaaggagctcttcgggttacctaaattatctcaagtggagctccaagacaattaccttaccggagagttgccaataagcggaggaggagtctctggtgaccttggtcagattagtctttctaataaccagctctctggttcattacctgcagctattggaaacttgtccggtgttcaaaaactacttcttgatggtaacaagttctctggttcgattcctcccgagattgggaggcttcagcagctatctaagttggattttagccacaatctgttctccggtcggatcgcaccggagatcagtcgttgtaagctgctaacgtttgttgatcttagccgtaatgagctctcaggtgatattcctaatgaactcacaggtatgaagatcttgaattacttgaatctttcaagaaaccatctcgttggttccatacctgtgacgatagcatcaatgcagagtttgacatcggttgatttctcttacaacaatctctccggtttagttcccagcactggacagtttagttacttcaattacacatcgtttgtgggtaactctcatctttgtggtccgtatttgggtccttgcggcaaaggaactcaccagtctcatgtcaaacctttatctgctactacgaaactgttactcgtccttggattgctcttttgttcgatggtgtttgctatagtggccataatcaaagctcggtccttgcgaaatgcgagtgaagccaaggcatggagattgactgctttccagaggctagacttcacttgtgacgatgtcttggactctctcaaggaagacaacatcatcggtaaaggcggtgctgggattgtctacaaaggcactatgcctaaaggcgacctagtcgcggtcaaacgattggctacaatgtcccatggatcttcccacgatcacgggttcaacgccgagattcagacgctaggtagaatcagacacagacacatcgtgagactgctcggtttttgctccaaccacgaaacgaatctccttgtgtacgagtacatgcctaatggtagccttggagaggttcttcatggaaagaaaggaggtcatttacattggaacacacgttataagatagctcttgaagcagccaagggtctttgctatctccaccatgattgttccccgttgatcgtccatatagatgtt

SEQ ID NO: 5639 - DNA, 2173 bp, Arabidopsis thaliana landsberg
  unsure (1)..(2173): unsure at all n locations
caaaacaaaataaatgatcctttccctaataatagtatattctccatcgtacaaagttctaaataatacaatattcatttcgtcttagcatatgatgtgttggaatcagaattatctgcaaatgtttgaatttcaaatgttagtatcaggctatttttactgttttatcaaatatcgtttcttctgcaatctatcacttgattgttttatcaaatcagcactagtattattgattttgtaatttgtgtttgtctacctccaattactttttagtcatatgattagtaatgtaataaaatcacaaatctgacgtggcacctatatacaattccaaaaacaaatggaacgaatataaaacaaattcacaccttcctcatcttcttcgtcgtcttcacttaccttctctctacactcacaccatctcacaaccctaatctctcccacacaagagagatagagagaaacaatgaaactttttcttctccttctttttcttctccacatttctcataccttcaccgcaagccgaccaatctccgagttccgtgctctcctctcactcaaaacctctctcaccggcgccggagatgacaaaaactcgcctctctcttcctggaaagtctcaacaagcttctgtacatggattggtgtcacgtgcgatgtctctcgccgtcacgtgacttctcttgatctctccggtctcaacctctccggtactctttccccagatgtttctcatttacgtcttcttcagaatctatcactcgctgaaaatctaatctccggtccgattccgccggaaatctcgagcctttccggtcttcgtcacttaaatctctcgaacaatgtcttcaacggttcgtttcccgatgagatttcttctggattggtgaatctccgagttcttgatgtctacaacaacaatctaaccggagatttaccggtttccgtcaccaatctgactcagctccggcaccttcacctcggtggtaactacttcgctggaaagatcccgccttcgtacggaagctggccagttattgagtatctagcggtttccggcaacgagcttgtcgggaaaatccctccagagatcggaaacctaacgactctccgggagctttacatcggctactacaacgctttcgaagacggtcttcctccagagatcggaaatctatcggagctagtcagattcgacggagctaattgcggattaaccggtgagattccgccggagattgggaagcttcagaaactcgatacgcttttcttgcaagtgaatgtcttctccggtccattaacttgggagctaggaacgctatcgagtttaaaatcaatggatttgtctaacaacatgttcaccggagagattccagcgagtttcgcagagttgaagaatctcacgcttttgaatctcttccgtaacaaacttcacggcgagataccggagttcatcggagatttgccggagcttgaagtgttacagctttgggagaacaatttcaccggaagcatcccgcagaaattaggagaaaacggtaaactaaatctcgtcgatctctcttccaataagctgaccggaactttaccgccgaacatgtgctccggtaacaagttagaaactttaatcactcttggaaactttctctttggttcaatccctgattctcttggtaaatgtgagtctttgacccggatccgaatgggtgagaatttcctgaacgggtcaatcccaaaaggactattcggattacccaaattaactcaagtggagctccaagataattatctctccggagagttaccagtcgccggaggtgtctctgttaatcttggtcagatcagtttatcaaacaaccagctctcaggtccattacctccggcgatcgggaacttcaccggcgttcagaaacttcttcttgatggaaacaagttccaaggtcctattccttcagaggtagggaagcttcagcagctctcgaagattgatttcagccacaacttgttctccggtcgaatcgcgccggagattagtcgttgcaagctcttacacgtttgttgatctgagcagaaacgagctctccggtgaaatcccaaatgagatcactgctatgaagatagtgaatcacttgaacctgtcgagaaaccatcggttggaggcnatcccgga

SEQ ID NO: 5640 - DNA, 2028 bp, Arabidopsis thaliana landsberg
aaccaacctttctggacctgactacattttatatacctttcttttaatttgaaatattcgtttttagaattgaaaaaaaatatatagttcaatctactcattttgtgattgaatgacgatttatcaatttttatatttgggattttctttgacgtcaaacctctttagggtccaaaaagttagggcttctccctacttcttttttctataaattcagtcaatcttcacacactctctaccatcacctatctttacaaaaatggagttctcaaactctttgctctctctcttactctttctactgtatgtttctcctctctctgctcttgttttagctcataccaataaccacgaagactttcttaagtgtctttctcaccggattaacgacaacaccatcgtatccaaaatcatacacacttccaaagactcatcctttttttccatcttggattcttccatacaaaacccaagattctcggttcccgaaacacctaaaccggtctcaatcgtcactccggttagagccagtgacgttcaaaccgtgatcagatgcgcactgcttcacggaatccacgtaaggactcgcagcgccggtcacggctgggaaggtcaatcttacattgcgtacaacaaaccatacgtcgtcatcgatctgaggaatcttcggtctatatcattagacgtcgaaaaccggactggttgggttcaaaccggcgcaaccactggagagttatactttgagattgggaaaacaaccaaatctcttgctttcccagccagtatccacccaaccgttggcgtcggaggccagtttagcggcggaggttacggcacgttgcttagaaaatacggtttagcagcggataacataatcgatgcacttgtggttgacgcacgtgggaggattcttgaccgacaagcaatgggtgaggattacttttgggcgattcgtggaggcggtggatcgagctttggtgttgtactatcatggaagattaagttagtcgatgttccgtccacggtcaccgtgtttaaagtccagaaaacatcggagaaagaggccgttaggatcatcaacaagtggcagtatgttgcggataaggtccctgaagatcttttcatcagcgcaacgttggagagatcaaacgaaaactctgtgcaggctttgtttactggactctatcttggtccggtgaataatctcttggccttgatggaagaaaagtttccagaattaggtcttgatatccaagactgcacagagatgagttgggttgaatctgcactctggtttgctgatttctctaaaggagagtctcttggtgttctcgcgaatcggaagcgtacatctctgtctttcaagggtaaagacgactttgtccaagaaccgatacccgaggctgcaattcaagcgctatggaggcgattagaggcgcctgaggctcggcttgcaaaggttatattaactccatatggtgggaaaatgagtgaaatcgcagagcacgaaacgccattcccacatcgaaaagggaatctctatgagattcagtatctggctttttggagagaagaggaagacaagaacaagatggaaacagagaagtatctgaaatgggttgagagcgtttacaatcttatgactccttatgtttcgaaatctccaagaggagcttatgtcaacttcatggatcttgatttgggaatgtatcttggaaaggaagagacaaagtacgaggaagggaagagttggggagtgaagtatttcaagaacaatttcgagagattggtgagagtgaaaacaagcgttgatccaacagatttcttctgtgatgaacagagcattccgctactgaaatccgttgacgacatctaagaatatcctttgaagtttcatgtacgagtccttttcactgtgaaatcatctgcctctagtttgacccgttatgcttcaactgtgaaacttttttctagatgttgtgacatatttgcgtccgttgaataaagatttcatggtttttggatttc

SEQ ID NO: 5641 - DNA, 2346 bp, Arabidopsis thaliana landsberg
  unsure (1)..(2346): unsure at all n locations
ccctaattatttgccttgagtttcgagccttctactgtaccactccacacatttaaaatcatcagactattcaaactttcttacatggttgattagttcatctcatatatgctcagtatcatactcttgcagattaatttttcattttaattatcaacgaattttttatttaattattcatgaccaaaatacatttattttttacatttattataattaaataaaacaaataataaatttggaagtcaaaaatacaatcaatagaaaaaaaagtatgacagtgatagataatatttgcagaatattatgtgaaagctattttctctgtaacaataaatgagaaaatctttattattttacatgaaagaaaaaagaaaacaaaacagagatatttttccagctgaaaagaacaaacatctctcattgatgttcagtgaacttgcaccaaacttcacttcttctatacttcttcatagccacaaactcagttctttgcaagaaacacaaacttaagtattcaaaatatcgtcatcatgttctcaagattccatgctctgtttcttctccttgttctttcagtaagaacatataaatgtgtatcttcttcttcttcttcttcttcttcttcttcttcttcttcttctttctcattctcttcattttcttcttcgtcttcttctcaaactcttgtcttgcctctaaagacccgaataaccccaacggatcatcgacccaccgacaaacttcatttccaccacaacgtcactctcaccgttactctcaccgtcggtactcctcctcaaaacatctccatggtcattgacactnnnnnnnnnnnnnnnnnnnnnnnttgcaaacggtcctcaaacccaaacccggttaacaattttgacccgacccgttcctcctcttattccccaatcccctgttcctcacccacttgtcgtacccggacccgagacttcctcatacccgcttcttgcgattcagacaaactctgccacgcaactctatcctacgccgacgcttcctcctccgaagnnnnnnnnnnnnnnnnnnnnnnnnnnnnnnnnnnntccaccaacgactccaatctcattttcgggtgtatgggttccgtatccggatccgacccggaagaagataccaaaacaactgggttattgggtatgaaccgtggttccctctcttttatctctcaaatggtttccccaaattctcttattgcatctccggcaccgacgacttcccggggtttcttctcctcggcgactctaacttcacgtggttaacgccgttaaattacacgccgttaattcgtatctctacgccgttaccttacttcgaccgtgtagcttacaccgtccagctcacgggtattaaagttaacggtaagcttttacccatccctaaatcggttctcgtaccggatcataccggtgctggtcaaaccatggttgattccggtactcagtttactttcctgcttggaccgtttacaccgcacttcgatcccatttcttaaaccggacaaacggaatcttaacggtttacgaagacccagattttgttttccaaggaaccatggatttgtgttatcggatttcaccggttcgtatacggtccggaattctccaccgtttaccaacagtttctctggttttcgaaggagccgaaatagcggtttcgggtcagccgctattgtaccgagtcccgcatctcacggttggaaacgattcggtttattgtttcacatttggaaactccgaccttatgggaatggaggcttacgtgattggacatcatcatcagcagaacatgtggatcgaatttgatctacaaagatcaagaatcggtttagctccggtagaatgtgatgtatcgggtcagagactcnnnnnnnnnnnnnnnnnnnnnnnnnnnnnnnntgtaattatagttttttgcctacgtagaaatggtttctctagtagaaaggtatgcacgtgactacaatgagatttgtgttacggacacgagcgggtgtgtaataacttcgagtttggtagtagttagttagttgtctctgtttgcttttgacatggtcttttctttgcgtaattaatttttagctgagagttatatcacaaaatctttaatcgtcatcagttttggacttttgaatcgcactatgttttttatcgttatgcaaaataaagttacaaaagttaatgttaaaaatcgcgaaaaagcaaacttgttttgacctatgtcaatcgcaaaagtgtatatgtagattagatcctttaacggatcctcttggtacaacgacatggagtcttattgggcgatcgtgtgtctagaaga

SEQ ID NO: 5642 - DNA, 1054 bp, Arabidopsis thaliana landsberg
tcatcacaaaagaaatccatcgcaataactactgttttaactctcaccaatctatcgggagtgttctttaaatacttcactccccaaacctttgcttcctcgtactttgtcttcatattcaacccaagatacattcccaaatcaatgtctctaaaattaacataagctcttcgtggagattttgaaacataaggagtcataaattcgtatacactctcgacccatctcaaatacttttcagtattagtcttgttcttatcttcttcttcactccaataagctaaatattgaatctcataaagattaccttctctatgtgggaatggtatttcgtaatccgcaatttcactcattttgccaccaaatggagtgagtatgatctttgcaagctgagcctccggcgcctcgaatcgtttccagatatactgaatcgcggttttaggtatcggttcttcgatgaaatcatcttttcccttgaaagatcttgacgttcgtttccgtttcgcaagaatttccattgattctccttttataaaccagagaacagactcaatccaactcatttctctacaatttccaatctcaagacctaattccggaaacttatctttcattaatgctaatagatcgcttaccggaccgaggtaaagtcccgggaacgaagcataaacctcggtttccttctgtagcatagctctgatgaaaagctcattaggaaccttatccgtaatatactgccacttgttgatgatcgagacagcctctttttccgatgttttcacgactttaaagaccgttactaccgacggaacatcaagcaatctaatcttccatgacaggacaacagagaagcttgatccttcgccttcacggatagcccaaaagaaatcttcacccatgccttgtcggtcaagaaagcttccattcgcgtcaacaaatatgggcatcaattacaatgtccgccgataaaccgtaatttcttatcaacgtaccggacccaccacctccgaaatgcccctccgagccaacgggtgggataaagaccggcccggaa

SEQ ID NO: 5643 - DNA, 916 bp, Arabidopsis thaliana landsberg
tctcaggagaccgaatgattaaatcacatattaatccttaaaattcaaatgcttattatcaaaaataataaacaaatgttagattaacgactagcatatttttcttcattagcatctatgagtgcatgagcactacgattgcttccggcatcaatatctgttgttgcttccatcagtttacttaacgtgcaagaaatcataaagtcttggcgaagtaagtgttcaggttaatattttcgacctagagctaggacaagcttcttccgcaaccaaaacgtccactcagattaagtagacagagtggacgtttcttaaaactttccggtcaagtcaccgtgtacactgcttccattatcattttttttatatcctagacctactttcttttgaagaaaacttatgttcttctgagagttttctagcaaattccttccaaggatttcttgttctacacgttaatgtatttggattaaaatacaatgaaataaaatcactttggaaaatatcattcttttccttattattgctactacaaaaataacttcattttcatctaaacttgacaagatcacatataaacagacacttcactctactactatctctttgttacaggcacaaaatctcgcctctttcatttttttcaaatctttcaaataacttcaacaaacgtaaaaggaggaatactctgttcatcacagaagaaatcagaaggatcaacacttgtcttaactctcaccaatctctcaaaattattcttaaaatacttcactccccaactcttcccttcctcgtacttactcctcttaactccaacatacatccccaaatcaagatctctcagatttatataagctcctctcggagacttcgccacaaactcactcatatcatcgtaaactctctccacccatct

SEQ ID NO: 5644 - DNA, 2315 bp, Arabidopsis thaliana landsberg
  unsure (1)..(2315): unsure at all n locations
gcatagaccaagagtaattcaccttttcttctgcagtatcctaaaagctgcacaagattcttgtgccttaacttcccaataccaacaatctgagaaacaaggtgtttggtatcttgttctgcatctaaagaaactctctttacagcaatctgtgcattagaagagagctttcctttgtagactgtcccgttagcctctgtaccgaataactcgctctctttgaaccctttggttgctttgtagagagctttgtaagaaaacctctgaggactgtaatcttcctcccattcttctcgtacttcttcatacttgctgttcacatacattgatcttaatgctgctcccattcttagaaatatacctgcaaacatgtcagattttttgcagattctcaaggcagcttttagtcctctattgtcatcgttgtttctgtttggtgatttgtgtgttgtgggaaattagtagcagaccactttcttttcaggagaaggtcaactgttgtaccaggaccgtccattcttgttatttaatggtatttcatctctgataatggtattttattatactagtggcatttaaagtctccaatgaagattttcattatgagttatatgtaatttatattgcaacattgaacaggttcatctctttgatcacctggatgaattaaatactcaaatttttatgaagatgcaatattttcttcttattacagaagtcaactacaagaaggaaggaaacaaaaaccaaaaaatgagtaaaagaacaaaagaagatgtattagaatttcttatgtatgtatacaacagacttcagacaaaatgaatcttggttttggtatgataacataactaataggggaaaaagaggattgaaatagaaagcctctttcttacatagaggctttgtaaacaatgaaaaacactctatgttctttagtttggttgaagtatctttccatgattttcttcttcaacaactgcagcagaatcaaatgcatcagaatacaattgcaggtttgtcaaattgttaatagttgaggaataaaagaggaactcactttcatttgtgttggctaaaagaggagctttgtnnnnnnnnnnnnnnnnnnnnggtgccatgtttgtggctgcaccaaaactagaagtctgagaagaacctttacgaggactgatagctttagatatcactcgagaaagttctctatcgtcttcgctaggctcaaacttctgcgatatgtattccttcattgatacgcctttgtcccacacctggttacaaacacaagatgatggactgatgcatttacctaaaggcacaaacacatggaaatttatagtaccttggtattgaagccagtgggctggttagttccggcagtgttgatttctgcaacatcatttacctcttcttctcgctctgttggttctggaaaagccatatcttgaatcttcttagttatagcttgagttgcgtcagagactttagcataagcaggtgctagcttctctgtcacagtttctgttactgtcttgcttggactaataggttcctgctggcttgtgcactcttttcttgtcttctcagccgattctgttactattgttgttgtgtcagaatcagcagccttctcgtgcttgacatcagataaaacattcttctcagagatcacaggatgttctgttttggaaccagtacaatctttttgttcttgttcagcgtcctgtttggctgggagaacagacaagacatttgtctcagtgatcacaggattttctcggggatgctgccttgctgtctcctttaactcttcaggtgccttctttgattcatacactgaaaataacacaagaagatcgatcagtattaagcaaattcctaaaagggtgcggttgttacatatgaagctttgttcaatttgatttacttggggctccaagatattcaggatcttcttcttcttcttctcctccttcttctctgactttacggtctttcgaattgtcacgtggtgacaatgacgcataaccaacttctctaacttcatgatcttcggatctgcaaaacggtgacatggttgcatcaccttcttcatcatgtctcttcttggtgctgagactgtgctgcagttttttcgccttatccttcattttagagaacaaagatttcttatggtgagaatgttctccatcattttcttttcttggtgaaccagaaggtgaccgctttgaagcttcaccagctgaaaaaaagtatgacaaacagatttcaaaccaagagtttgcgtccaaaatcatcaaatcactgagagtaaa

SEQ ID NO: 5645 - DNA, 525 bp, Arabidopsis thaliana landsberg
gattctgtctcagttgcttggatttttagatatgttaagggatggctttatatattgtcaggtccaatccttttggaggactatcatctgcttgagaaactcgctaactttgacagggagcggattcctgagagggttgttcatgccaggggagccagtgctaagggtttctttgaagtcactcatgacattacccaacttacttctgctgattttcttcgaggacctggtgttcagactcctgttatcgttcgtttctcaactgtcatccatgagcgtggcagtcccgagactctcagagatccccgtggttttgctgttaagttttacaccagagaggttagctttttgtcttatccttccattgtctctctattcgatgtgtttgctgatattcaaacgtttatttgcttatctattttcgttcaccacctatatgattacttgcaaataatatcatactatactgatgagttcttttaccctctgtttgcaaactcaggggaactttgatcttgttggaac

SEQ ID NO: 5646 - DNA, 2062 bp, Arabidopsis thaliana landsberg
atatattccggtacggtttatatcttgatatatgtcattagtcaatttcttaattaaaaattgtttggtaatgagtaattgtgaagttaatgtaagtccagaatacataacgctcgtgacgtttgtttggcctttttccttttctgctcaataacctaagtatattctcaaggacttgttctcttcttaatggggtatatataatgcacgcatctatatggatatttattgcatacatgattcttttgaaaatgaacttaacgttatgaatcatatatgtatccaaaagttggtaacttatttcgtgaaggattttagtatttgttcctgattttcaaaaactactaaatcatgtttagtaaacaatttcatagttaattaagttacataaatcataatgaaaagtagatgaaacgtgtcgggtgtcgcacggaaacttatctaaacataaggaagaagaatataagatcgcatggcatgaaaatgttaaatccatgtgagaaaactaaaatcagcaatctcaaccgaaaccgcaatcttataatagacagaaagtgataagaaatgtgaatgatgatatataatcttctttttcattttctgcagacggtagttactacattaggaaacaacgatgtgatggtgatattagacaaccacctaactaaaccagggtggtgctgcgccaacgacgatggtaacggtttcttcggtgaccagttcttcgatcctaccgtatgggttgccgctttaaagaaaatggctgcgactttcaacggtgtctctaatgttgttggcatgagtctaaggaatgaacttagagggcctaaacaaaacgttaacgattggttcaagtatggtaacgttattatttagtctataatgcgcatatatacatgcatatattttagtcatagagtttaatgtacgtaggtatatgcaacaaggagcggaagcagttcattcagcaaacaacaaggtacttgtaatcctctccggtctcagcttcgacgctgatctctcctttgttaggtctcgacccgtaaagctatccttcaccggaaaactcgtcttcgagctccattggtattctttcagtgacggaaactcgtgggctgccaataaccctaacgatatatgtggtcgagttctaaaccggattggaaacggtggcggttatctccttaaccaaggctttccgttgttcctaagcgaattcggtatagatgaaagaggagtaaacaccaatgataaccggtattttgggtgtttaaccggttgggccgcggaaaatgacgttgattggtcgctatgggctcttactggaagctattacttaagacaaggcaaagtcggtatgaatgagtattacggtgtgttggattcggattggataagtgttcggaattcgagtttcttgcaaaagatctcttttcttcaatctccgcttcaaggtacatatctcgcaaaattactaaaagttgcaaacaacaattttgttaaagtttctaaagttttgaattgatttggtttactaggaccgggccctcgaactgatgcttacaatctggtttttcatcccttaaccggactctgcatagtacgatctcttgatgacccaaaaatgcttactcttggtccatgcaatagctccgaaccatggagctatactaagaaagccttaagaatcaaagaccagcaattgtgtttacagagcaacggaccaaaaaacccggttacgatgactcggactagttgttcgacatccggatcaaaatggcagaccatctcggcctcaaggatgcacttggcttcgacaacaagtaacaagacttctctttgccttgacgtggacacagcgaacaatgtcgtggctaatgcttgcaagtgtctgagcaaagacaaatcgtgtgagccgagccaatggtttaagattatcaaagccacaaggccattgaagagctcgagattgtataaagagatctcgtctatgctgtaaagctttttgacttgctataacctattaaacatttattttagtggaagcgtagaacatatattg

SEQ ID NO: 5647 - DNA, 3523 bp, Arabidopsis thaliana landsberg
  unsure (1)..(3523): unsure at all n locations
tgatgtaccttcaatcgggtgattatgttcctttgggcttaaaaagttttacattttcaagtttatcacaagaactaacaaaatgaacgtaacttaattttcattattttttcagtccgtcttgaacaaaaatcgtagcgtaaaacctcaaatctcccatatatagtagctaaacacgagaaagactcgagattcaagagattgatcgttagcaatactttcgaaacctttttaacaaaaatcaactctttcttctgtgtcctctgtttttgtctcttctcatcgagtaataaggcagcttcattggtaatgacttctctaagatgtcaataaaatctggaggaatcacatgtgaaatgtataaaatgtgaaatgtatttttgatgtgaagaggagaaacagagatagagaaacattaccatttcatgacaactactatattcaggaagaaatactttaaaaaaatcccaagtctttacgtgcatacgaagatgaagaagaaaccttgttaccagtctcaaccatttttctctttggtagtgagtgattaaatttaaaccaaagtttaaagacaaaagaatcaagtagattttagaaacagtggatcttatgagaaatgactagaggatttatcttatgtgatgttaaggaaaacatattcacattcacatcaaccctgttgtttatgagagtcaccatattcacatgttcgtgaagtttctcttccacaagaatattaagtgttataaacatttttttaccattactgaagaagattatactataagatcatatttattgcatttattttatttttaaaaagccattacatgagaaagagtagcatttcataataatatttagaggtgacaatctctggttttatttatgaacaagaaagagattgtgagtttgtaggtttgaggaatacgcatgcatgagaatatgagatcacctcacgctcaatccttttttcctttgcccttcttcttctcagaggaacccttgacccttgatgcggaagctaccttaccctttgcacgtgcagcagcagctttgcgagtcactgcagctgcagcatcgccttcagcggcggaagcacttgcagaagaaactcttgccttgcgacccttggcagtgacttgtccgctggtaaatgtgttggcactttcgaatgaattggcccctggacctttgggattgttaaaaccattagcatagctaacgacactgctggtgctgtaagttgtggcagttgcagaaagctgagctccaatgcctttggtagtagtttttggaagagaggcccctaatttggtctccgtggacaaatctttgacctgccttgcggtgacaatggcacacaaaacgccaatcacgagaagcacaagaaactttgtggcattcatcttttgattttttggattagattgtgtttgtggtgagttgtgttgtgttcttcttcccaagtcatagacctctatatatacaaaaactcgatacacttgtatttattatgatacatgaacatttcttacaagaaatatacataagcttaaattacgactaatagtcataccaacatgtcaacatgatactattttaacacctcttgccaagatcaaacacaattttatctaactagctaatattatgaatagattgtgatatccaattaatactatactataactgtgatcttttattcgaaaacctcttaatacaaatgaactgaattcatttttccaacttctgactctcaatcaagaggttaaatacatataatttttttacaatccaccaactaactacaagaaaggttctaacaacgatcattaaaatcctcaatcagggtcatccactttgattccaactaaagcttcctaattgaaaatatgaatctgaaaatataaatcataacttccgcacaatagaatccaaacagacaagcaattatgttaaatgacaaggaaaagtattgaacttgacacgactctcttagcagctcgtaacaagtactaaagaatcaatgtatccatgaaacatttttgacatatcatgatatcactcatagatactttaacaaaagcttttgtttcgtttttccattatcacatcataagattcatctagaaatctaaaactgacaacaacaaaataagaacaaaccttggcactgctcattgttgtaggtgtgccttctgatctatgaaacacgacctttggtgaatatagccatcaacgtaggcaccagctcgttgtgcttcatcacatacctgtctaaaaatccttcatcggtacacgacaaaacagaggacactgcaggtagttcacttccctttctgagcagtcctttcgacaagagagcttcgagtatgttacaccttggtataatcctcttctccatgctgtatccaaacacctgagggtgcaaaaccaaggcgtttcgtggccatttcatcttcttcaccagaaactcattcttctttttaacagactctacagaatattcaatgcaaggaggataacgcttaaccatcatcagaaactcagctctgctatatcctaggtctagaaacgtttcagccgacttcaatatcttcttcttggagactttcaaaacagaaggagtcttcttgaagatttcccacacatcatccacagtaaaacctaaacttctaaagactacaactttttcttcaatcgttttctcgctcatttggtaaagcatccgcaaagctaaaacaaacttagtggtggtgggatcaaaccccatctcaacaaccttcttaagggatgcatcaaaattttcttttccacacacaggctgcgatttggagacgagcaagggtaataacaaccgagaaggcatgcctaattctctcaaagccgatacatttcggattttattcccctgagaaccctgtgggagttcataactcgaactcgtatcggctactataatgtctttgacagcatcatagtatacagtaatagatttctttcctaagattctcggtactgtagaaacaatctcagtgatctcagagcttgaagctcctctagactgcagaatctgaagcttgcgaccaagtgctttcttagcatccgctacaagcaataacggataatccgtaatgatggtagagatctgagaatctgtgaacccgtaacttctaaacagacttagaacagaatcaggattgaccttgtcctcaaagctaactttccttgagatggattcagcgagctttttagataaacccaatgaatcaacgaggtaagagaccgtaaaattcttcccttttagaccatctcttgaccttacatcagtagcactagcagaagagaaggaatcggacaaaacaaatgcagtttgcacnnnnnnnnnnnnnnnnnnnnnnnnnnnnnnnnnnnccaaccttgttccatggagaattagagaatacattaccaaagaccatgctacgaatgttacagtgaaaaagctaaaaagacctaattactctctgtttcaattcga

SEQ ID NO: 5648 - DNA, 3193 bp, Arabidopsis thaliana landsberg
tagaacaatctagtcttccacctggagctgcaacacgcacacactcacctcggctttagcttccaaagctttagctatgaaatcagtgctgatcgcagcgactagaatggaattgacctccatcaacgttttctccgactctcaagtctttatatctctgctaaatacaaagacctctacgaacaatctacaagggattctccacgatattgcctttcttagtcgttttttttttcatatcaagttctcttttgtttcctgcaagtctaatcggttagctaacgttttggctaaaactgcactctctacttgtctgctacttcaagtttgttcttctatcaatataacttgtttgcccaaaaagaacagcaaaaccataacagttcttttgttatgtaattgttgtttgcaattttcatttccaaaattttggtttctgtcaaaatcaaatgaaaatacaagcataaatttgatttagattatgtgatctaaaactatgatttaatcaattttaaaccgcatttgaaaagcttgattgattttgtaaattgtaaatagatagaagacgtggaagtcagagatacgttgtgactttaaatgcaacaaagcttcacatttcaacttcttcctgttgactttttctctcccaaaatcacagattcatcttcttcaaatttcctccgatcaaaaaaccattacccttcaatggaatcaatcaacaccttgaaaggctacgacaaagtatccgaccaagaaaaccaaatccatcatcatcatcattctccacttccaaaaccatcatcattttcccgtaaaaccctaatcgccaccggctccgtcgtatctctcctcttaatcctctccgtcgtcgctttaaccgccggagctttcactcactctcctccacaccatccacctatctcctccgcctctctcaagtcactctgctccgtgactcgttacccagagacctgtttcaactctctatcatcttctctcaacgaatctgattcaaagcttaaccctgaatcaatcctcgagctttctcttcgagtcgctgctaaagagatctcaaacctctctatctctttccgatcaatcaacgatatgcctgaggacgcggcggttggtgattgtgtgaagctttacaccgacgcgttgagtcaactcaacgattcgattacagagatcgagagaaagaagaagaaaggtgggaataattggttgacggaagaagtcgtcggagatgttaagacttggatcagcgccgccatgactgacggtgagacttgttccgatggaattgaagaaatgggaacaattgtgggtaatgagatcaagaaaaagatggagatggctaatcagatgatgagtattagtttggccattgttagtcaaatgaagaagcttttgttgatatttcactaaaccaatcataaaggttggaacttttttcttatttctctgttttgtcaatttcgaattcataaatgtgtgtatgtgttgtgagctttcctttgtaagtaactactacattgatttgttttcggtatgtaattttgataaaagagaaatcttttcttcttgtattttacattctattcacttactttgatcaaattatagttcaaaaggtttatatcaaaacgagtttcggtgtctccttgtcttgtctacttctttcttggttgtgttcatcaactgtatgaagagaataagactgaaatctacattaccggagcttaagtagcatatttgaatagcaatgagtatgtatgtacctgcagagttaaggatctgactatctcttctgaagatttgatcttctctgcatcatctcgcgccattagtaccgcaacttcaagcttcttcgaagtcattccaagttcggtttctagtttcttcgattttagagtaagctcttccacctgagtattaaaagcttttttacttgtcttcttttacaataccttaaactacattttgattcaataggggctaaatggttggataggactaacctgtgctttgagtactgatatttcatggcttaggcactggttggatttctttggcacttcttgtagtaactcatgatcggtaatgtctgtggtgaagtctgaagtagttgcaacggattcaacggggctggactttatcgataaaggaaataactcaacagaacctctgcgtgaaaacggtagaccacaagtcaccgagtgtcttataagagaggatgtgtctgatttcgaagcgcaatgcttggtacgttgtttgccttcttcttgaactgaatcaaaagaagtaagcctagagagtcgtcgtatgcctttcaggttgaaactacctttaatatccatgtttgagtgaatcgacgacgtgcagcttcctcctgaagtttcaccaatggttttcaggtccgcgtgcttagtttgtctgaagaaatcaaatgaatccactcttagaagctgacgctgcggtgttataccaatttcatccatctcgtagctagatggtagacttgcgtttgaaaacctggcactatttgcaggtgttgctaaagattctctaattccttcgagtttgatataacagtcatcacaaacacggtaaggcctgttcgtcttgggagccatggctgctgctaaggattttttacttgtgcatgaattacagaagacactcccgcagttgtaacagttgtgaagcttcctcatgtagttaaaaggatggcgacaaccggagcacttagtactatcggtacccgtaatgggtttgtgaagacaaatggttgctgtgtaattagaaccacacaccacttttctcacctgtttacctttcaaagctttcacaagagtcggcgtgcatctatattcagtgtctccatgcccgagctgtccgtttgatcctttgccccaagtgtagacctcagctttcgagttcaaaaccgcgatatggtgaaacccgcaagccacttcttggacgaaactctttcctagacccccttcaatgcaagaaggagctctcacaatatcatgactcggatcagcagttcccattgcataaacttgtccagacatagagagagcaacagtaatgctctggccaccagccccctgttgaaagctagttgtatccagtaaagttaaacaagatgggattagtctacactctatatcaccatgtccgggtc

SEQ ID NO: 5649 - DNA, 1957 bp, Arabidopsis thaliana landsberg
cagttatgaattaatcattcccttgtgctgttacaatctttagtcccagagatgtaaataataacatatgggaaactttgaagtgatctctttctttgatcctctcttctaattttcttcaatggcgattgcaaggcttagttttctgttacggtgtagaaaatgggctaaaagtgactggcttgtcgcttctataggatgcgtattgatcgtttttttcctctctttcttcttcgatcccacttcagactctgtcccctccgttgaccgatctcggccaatcatatctcctagcgatctggtcaagctgaagttgtcgagtgtagctaaagagagaggagcttgtaactgttactaatcctctcgttttttttttgtcttacacttttgcaagtttggatttttaactgaaattgattcaattgcgcagtttgtttggatggaagcttgcctgggtaccactttcatgagggttctggatctggctcccaaagctggcttgatcatttggaggtatttgtcttttcttttgtattgattgaatttaaatataatgagtttagatggggatgagaatatatttgagtgaaagggtggaggctggtgcaacacagttgcgtcatgttctgctcgagcattgactaaattaggttcttccaactactttgaacaagaagtggcctttcaaggtgttttaagtagtgacccatctcaaaatcctggtacgagatatctctagtagcttttacattgttgtcttttatagttgacaatcttctagtatgaattaattaggtagtcttttttttgttttgttgcagaattctttaactggaacaaggttgcgataaggtactgtgatggtgcttctttttctggacgccctgaagctgaattcaaggtaataataaggcttttggtttcgaggatttgcgtcagattttgttgaaagcaattcaagttcaatagtttcatgtttagtttactctctttttccctcttcttagaatggcacacggcttttcttccggggccagcttatttgggaggctattattgatgaacttttgtcaatgggcatgtcagatgccaaacaggtaacgtcttcatgatcttataaaaatggatctgttaataatgttcttctggttaccatgaaagtctgtcttgcactccaatatccatctatgttaacaagacctaccatatatcttctgcatttagttgaattcgcctacttaggtaatttgctacagattaatttttgttcttctttgtaatttgagtaaatgtaggccatacttacaggatgttctgccggtggcttggcaagtcttatacattgtgactactttcgagatcatcttccaaaagatgcagctgtcaaatgtgtttctgatggaggctactttctcaacgtgtatgtttgtgctcatattcattttctcatgattttttttttgacagattcatgagttccactgctctttcttttagttttttgggtctaaactagttttaagaagcacacatgttagatttttagcagactatatactccacagagctaagaagttactgttgatgtgaaacaagctcacactgtctctcagtctcagtaaagctattttccttcatttcaggcctgatgtccttggaaacccaacaatgaggtctttctatcatgatgttgttaatttgcaggttccattcactttctttcaatagtcgaaataatactttgtgatatatcttgaattcttcatcgaaatgagtaagaacatatcatggggttttccattggttctgtgctgggttgctgcggttgataccaaccagggcgtatagaagagcttggatcacaaatgtgtagccaaaacggagccatctaaggtaggttttgtctcttactttgattgtattttccatctactgataaaatcgttctttacctgat

SEQ ID NO: 5650 - DNA, 1156 bp, Arabidopsis thaliana landsberg
aactaaatgcaggaaacttgctttacctgtctctctagggaaggctaatctgtgtgctaatgacttagcaaatttagctattcaaaactttaaaaagtgtgaatgcagaaaacaaaactattagttttttcatataggaaattaatagaaaaaaaaagataccagatattcttgaaagagtagctggctgcttgcgttgcaatatgtattgcatgaactctgcaatcaaatttctttttcttcttttgaaaaattcaacataccatgtttctgtttttcacacaatgatattaaattactaatattgctactagtcgatgagactaactcgatgaaatgccatgatcaggacagagtagtgttggaacattcattttttaattaatttatgaggcaattagtttatcaacataaccatatattatgcttaagcacgtaattattatattttgcggatcttataaattttgtcaacgaatatacggggattggatagaacgtggaagcaaagagtttctcaattaattccacctagctgacttttccgtatcgtgaaaactttttaactatttgtaaaagaaaaatgaagaagatttattaccccaaacatgctcatttagggagataccttattcatatggttcgtcacatccacacttatataattcacgtttcggttatataaaaaggaaaaacatgcaccgttaataacatgcactattacatttctactgttataaaagctatcgtaataagatcaaaacgatacaatctatttcagttccaatgattaacatacggaaaatccatgttcaacaagaggcattgcacggataaggacaatcgattagcttcaccggttttcggttgaagtaccaatcacctacagactctgcaatcgtctgtttcaacaaaaacaaaaagaggagacatgagtttggaaagttcattaatttgctagaagagatgctcgagagaaaagaaagcaacagattgcgtcaattgtctttttctaaccttattttcgattcttgttgaggttgcggaatgccatgactctcttatctggcaatgagaattgcacgaatttataaacatcccaccctctttgttcacatgaaattctcctatcgcatcgatcagggaactgcggaaa

SEQ ID NO: 5651 - DNA, 1077 bp, Arabidopsis thaliana landsberg
  unsure (1)..(1077): unsure at all n locations
tatcatgaagaatccagaatcatacgcatctctttctgctatttattgaatgtttcatatatgatctgtcagacttgattcttcaattccttgaatttcccatttcatcagatgacagaacgaatcagagcaagaggacccagatcatcctctgttaactctgttcctctgattcttgacattgaagacttcaaggtaaggttttcagttgcttatgttttctcacttttgaatcataagggatattgatttttttttttgtcactgacagggtnnnnnnnnnnnnnnnnnnnnnnnnnnnnnnnnnnnnnnnnnnntcttgccgtctttcctagacgaagaagcagattctggggatggccatggcaacattgctggagttgatggtttgacaaatgggcatttacgtggacagtctgctcctttgtcctctgctcctttttttcctgaagtagatggtcttttgtctctgttcaaagatgcttgcaaggagttagttgatcttcggaagcaggtgagtgtcttgcgtctacatcgatgactagcccttgttttattcttttcatcgttccgatatctgaggtttttgttaattattttggaaggttgatggaaggctcaatacactaaagaaggaagtttcgacccaagattctaaacaccggaagacactgactgaggttggcagaccaatactactactttgattaaattccttggatacatggatcactgccctatgtagaactgacactccgattatttctttaaatggtaattgaattctctttctagatagagaagggtgtggacggtctgtttgagagttttgcaaggttggacggtcgtatttcaagtgttggacagaccgctgcaaaaataggagatcatttgcaggtaaaatttaccttgcttataaccaactatctggtggtctatccaatattaacccatgtttcctttgtcagagtgcagatgctcagcgggaaactgctagccagacgatagatcttataaaggtaagtgtgcatctattgtgcaaggttggtcacatatttagttagatgaagccttaaa

SEQ ID NO: 5652 - DNA, 897 bp, Arabidopsis thaliana landsberg
ctcagaatcaggagaaaaaaatgaccttcaacatccaggtttccacatccaacagctcggaggtctttagcgggttcttgtgttctctcatatgcaactgctaacattctaaggtactaaagacaaaaattaagaattactttcttataccaattctactatgaagatagacaaaagagagataaagaggtatctacacactagtaacagtccgccttcttgcacaggtggtggactcataagagagggcttcgccaaaatcttgtctaaaatacctgtgacacgctgctccagaactctctgcgtaaaatacacgaagagttggtatagcttatccatgggctgggttaacactacagtgtccaaattattggtgccagttacctgaactaagatagccataacttcatttggagtagggaaaacagctgtaatggttgctgcttctttgcgtacagtgtctacacataagaagtaacaaaagatatgaatcggcaaagaagcatgattcaatgattgcatccaaatcaatgatcttcaaacctgtaatttccttgaataaagcagaaagtccacgggcaacattgctaggactaggctgagaaccatggtcaccaagaaccaacctaatgtctgaattcatgacttccacatcaataaacattggacgtgtagccacataatgttgcatagcactcgtacccctgttaaactgaaaatcaagaagaaaaaatactaagtatcaagaacatatgtacaagaggagaactagacatccattccttctgtgacagctctctgtagaattaaccagtatgtaaccactagatacgttaggaaggccatcactcagaatcttagataaaagaacaggttttccaactgaaatgtaaaggg

SEQ ID NO: 5653 - DNA, 498 bp, Arabidopsis thaliana landsberg
ctctatcgctcataaggtacgtatgatatgattgcatttatttttttgaaagtctctggagtgttagaggcgacggggtatctattatttgttaacaattaaaaatttaaccctcttgcttccacgacaatgaaagtttactattaaaaaaacaaggaaagtttacagttaagttatgctgcaatttatttgcatgctctccttgtcaatatcaggatcctttgctgaggaagacattggaaggcaaggtgcgagtacagctgcaggaaatgctacccctggccgaggactggaagttgcagttgctaatcttcaggattactgtaatggtaaactaattcgtttatactgtgttttctgtatatttactgaataggataattggatgttcaactttttctttgtgacatttgagtatgatgttgtagaattggagaacaggcttttatctcgctttgatgctgcatcacagcggagagatttatcaaccatgtcaga

SEQ ID NO: 5654 - DNA, 3037 bp, Arabidopsis thaliana landsberg
gcacataccagcaaattaagactcggtagtcatagtcttcaactaagaagaacgaatgtacgtacatttcttaaatataatctcgagctccagtattttacgagtccataaacctaagacttgtcgtaacctctcaacttttgtcagattcattaaatctacactcaccgacaaggctacatacaaaattgcaaacggtctcaacaactcatcatatatggtgttcacaaattcttcattcccaatgctcttttcctactcaacatcaaaacaatcaaataccttaattcctctgatatctttttccagtgtattcaaatacattatttgaaacgtgtaacaatatatatacattatatgtacctctgatatgttgtagctgatgtgaggcacgtaaggccctagaacccaaaagtttctattaaattggaattggggggactggagggaaaggtcatctctccgacagcagatatctatgatggcgagaatgtctagactagttgttgacacttcaatggcgtcaacccagttgtaggtgtctgctaaggcatatgtaatccatctattgtaaacctttcatttatattaaaaatcagaaatttttagaaaaaaaaaatgtgttcaagagaagacacttgcaagagctttaatgttttgttctcaatcttcaaaggaaccctactttttttgaagcagcagatgcctagtacaagcacctcgagacaagggcaagatgcgagtaccctgttaaatactccaatctcgggagcgaagattgataatagtttgagggtccaaagattcgagcagtttctcaagggatgtgagctttcgagaaagtatgaatgtagcgagagtgacataagacttggatgggacaaggagtcgggagaaaagttaaaagttttgaactttcgatcccaagtatcataatggttctaagtgtgagaactttcgtgcgtttcatgcaactcagtaatcgaatccaagaattgagcattccatttccaccttgatatgggacatgcatgatcacgcagctctctagatgtccacgatgattgtttataaccttttacaaagcagaaagtgatttatttaagatatgaataagcagataaaaactaataagagaaaagaaattgactgataaggagggacctgagtaatcaatgtagcaactggattcgaaccatcaggcgtgttgttggaattgataatcttcttccgcatgtccaagacgagatgagacatttgactccacacatgttcccatcgcttcgacacaacactcgtccttatggcttcttctgtggaaagtctcgataatattatgagcaatacatcgtcagggagtttgctgatccaatcaacatttttgacctgatcagatgataccattaggcaaacaaataggttaacctacgacacagtataagagttacaagtagacatgcattatataacagagaagtgaacagaattagaccttaacagagtgatcatcagagacggtatttagatagggcttatcgtcaatggccaatgtaaaagttgggtaaggtaaaccaagattccaaacctgaagatgaacaagcatgtaaacatagaatgagataacatgtgtcagaaccttactcggactgagtgccataatcaagttacatggtgcaggtccacagattttactctcgctaatttcttctgatcccataaaaccagagtgaatgatatgaaaggtacacatcttctatttcatcggcatcaccacgagacaaaatttcgaatcagattagacaaatcgtaaaaaaaaaattccctctgaggttccactctaattcgtcggcgaatttgctgatccagtcaatattacctgatcacatgacgatgatgatgacgatgacgatgacgatgatgatgatgatgataatgatgatgatgatgatgttgatgatgatgatgatgatgatgatgatgatctctccatattggcacggaagattccctcagattattaaagcgtctgtagttgattctaagatgaaagcacaagattttttgagaagaagaaaataagaaaaaaagatgtctaagagattcagattcagtcacaattgatcatattatgctagaccagattcagattcagtcacaattgatcaaacaacttctaatcacttggattggtaacgacgaattctaccactttccagaaaaattgatcaaacaacttctaatcaagaagcacataaactcaatgagaattagcaaagcaatcaaagagagaataggaacgatagtacgataccatgggaacaaaggatctgaatctccgtatttcagctttggagcagaacttaagtagatgagtagctttgccttctttgtccttgatgagttccagctccgtgtacaactataaattcaccatcgccgtcaccgtcaccttccctccgttacgaatgagcctcaattcttctctcaaatcaacaaattcatagaaatctccaatttgagccttcaacgtcttctctctcattcgcagtcccaaatcaaatcttcgattaggttaacctccgttcttcatgaactcaaagacaccatgatttcacacgtattattaatcccaatcaacggaatcggagaattctccggtttgatcgacatcgctagagagagaatcgggaaatctttcgtaaacaaaaaaattgaaattacacgagtgtttttttgttgttgttaagattaatcatccaattatggagtgccacggctctctctggtccagaaaactctctcaagagagctgactctctagattatttagttttttgatttattttaattctttctaaacaagagaacccttacttttttccaataaagcctcccattggaggtgctcttaaggtctttaaaaaaaattattatatagatttgtttcgacaatatgtaattttcggacaaacacagatttacgagggatctacttatcaaataggtgctagtcttagggcgcccagagaacaccggt

SEQ ID NO: 5655 - DNA, 2621 bp, Arabidopsis thaliana landsberg
aaaggagctagaagtagttagttagtgtacctttgcagttttgcggtttagtttctttaggtttccaacaaattcagcaaatgtccctgataaaactctaactgtagaacccgctgcaagtttcttcttcttcgcctttgtttcagtagcaagtgtagcttttctcggggctcgtttcggtttagattctgctacagtctcaataacatctgaattagataatgcgagaagttcctgtgacgctagtatactcgcttcttcttcagctctatctgcctcttcgaactcactatctgctttctcttgcgcttcttttgcttgtttgaaaatagcttccaagtcactgtcatctactggtcttggtttattaatctgtctcttgctacaaaaaaaaaatgcagatacaaattaattcacagaccttaacacacatagggtgagagtgagagtgagaatactactcacgtatttccaacttttgaacctatgaaacctccgactccatcaacgtctcttacggagtcatgtatctctttgttcaatatacatctgatgaaaatgcaaccagggaacactggtttcggtttaacagatatagaaccgttctttagctttctcttcacttgaacagatggtgcataaacctggacaaccaaattcaaaagccacttgtttcaataccaatgtatgaattccccacaaattctcaagatcacacaataacccaaaatcaaatcttttcactttccatcaacaactgtttagagtttgtcagcaattctatcaagataccagtttgatccaatctcattgtcaaaatccaaactttaaaatcacccaacacaacccaaatatccagtaaaattccaattaccgtgaattccatttcagggaattgacgagccagagctcgagctaagatttgagcagtctcatgaccacgaagtctcgaaaccctaaccgcccaccattgcggacccgactcagccaaagtatccaaattcagctcctccgtccacgttgcataccgtttttttggtttcttaatcaacttttcttcaacttcttctcgccagctataccccaatttactctcccgccgctcgttccggagctgccgtctctccttcgccgtaagctggtggttccgctcgatgacacaggcggcgatagagaattgggttttgttgattggcgtataaatcgacgggattaagctgctacgactccactggagaagtcccccttgcagcttcatcattctctgtttttcttttgggaaaattccgttgataaaattctctgtttgttttggataatcttttggaatttgtttaaccgggaacccggtttatcccaaatgccggtatgaaactaaatcagattaaaattaccggattgaagtagtaattaaactgcaaatcacaaaattggagtactttacaaagatatggggcactaactttgtattttaaaattttgaataaatatttttcgggtaatgtctagattacaaatgtttttagcttatgcaaattatcaaaaactgtttttttcttgttctataaaaatgtttttaattagtagaacttttattttggttcaagtgacgttcttttcaaaaatatcaaattaaaacttgtaaaagtgacaaaaataataataaatcatataaattactcacagcacacacaattggtaacaacatatgaatggactacaatacaatttctttaccgactacatcaaaacaaatgtgagacagagagacaaatttttgtcttctttgctctaaataatcttctttttattgttttcgatgaaatatgttttttttatcttgcttaacatttgggaagatctggtggtggcggtggcaaggtggtcgacttggtcggtccgttcttaaccacaaatatcatccctagtccgaatggtaagtgaacatcgatatgacaatgaaaaatccacgcacctgaaacaatgtagccaatatttaggtttcatgcataaacaacaataatagcctttgtaaaactctaaactatataattacatttttagtataactaaggaattggatagagagtttatacctggattattagcagtgaaacggatcacggcccatccaccaacagggacagccaaagtgttacgggattgcgggtcaacgagatttaacttgctccggtcacggctcgggtcataattaccaaacccttgagccaatacatggaaattaaatccatgtagatgcatgggatgactctccgccgctataagcgcatggttctgtaacactacctccaccgtcgtattgaatttcaaaatcttggcgctagttgatttttgagtgaacaaaagtcccgggtttgtttgggttacgttcgggttcgtgtaatcaaacttaaccggaggctggtctggaaaatccgcggtgaaaatccctttaacgtcgtgaaacactgcttccaagatcgatagcttcttgggtaacacgaaagagtgattgctcatagaagctgagaattttggacacgtggtgttatctgcgcatgcctctagcccaagaccgatggttacgagcatctcttcgtccacgtagcgtggaactggaa

SEQ ID NO: 5656 - DNA, 4021 bp, Arabidopsis thaliana landsberg
  unsure (1)..(4021): unsure at all n locations
taatttctgcgtatagtattattatatcctcttatttggcagcaccttgggattgtggatttttatcatgcacgtaagagacaacacaactgagactggaacatgttacactttcagaaactcctccaagaggaaagaaaactactagagaacacagttgcggctagaaagaagctgcttagtgactgcagaattctccacgaccggcttaaagagtacaacttaaatttgtcaatggatggaaacggtaactttgtcgacgactcaactacaatatcagacgttttgcgtttactgtcaatatctgatgatcaaattgaggaggtattgctgcatcactgctttattgccatttaaaatcagtttcctctaataagagttacttttcacgatatgcccatcaggatgaagttatttattacttattagtgtaggatagttaggtttccgctgcactaatgaaaactgtaacgttgtgcattttacaagttttaacgatttagaccattttcaggctcagctactttctgggtttgacgaaaatgctgctgctgaagacatcgataaaactctcagcatggatactgaaacaagaattatggaggacgagctgaggaagatactggcaaacatttttgttgagaatgcgaaattgagaaaacaggtgaactctgcaatgctccgtgctctccaaaaagacgtaaagaccactgaagatgtgaatgaggaaaatagtgatgagaaagatgaagcatcaagagaaacattgaagagataggtaataataataatagtcgctttgacctgagaatagactgccatttttttttctctataagcaaaggactggtcgctttataatacaaaacggttggtctcttggaggagcaaattagttgaagctgagtgttgtgtaatcgatatatatacacacacgtgacaccacccttttgagagtacataaggcaaaaagatgtgtattaagtatgtttgttgtataattgtattgcactctgttgcatatatttattgtgatccgaactcagttcttgcaaacaaagttggaattgtaaggatttaggttatacaaattgtgtcaattgatcatcattgtcctcaagtataaagcatgtttctttcttgaagcagaatttgtggcttctttctccaggtatttcagacatttctttatagcaagcaattttgagggaagaaaactgaaactagatagagaatattaaatgctaaaaacctttatcatcatctttggacaggatgaagaagttaatgacatttcctttagcgctcatagagcacactcaaaagtctatgtgcgtgaatccagctcattctctaatggtttcaataagttttgattagttgataaagttacaaggggcaattataacagttttcaaattattgaaacacttaggtgtattatcacaaaaataaaaagttaggtgtcattggcaatttaatacaagtttctaatttgatgatatacatgcattaaacgtgctttgcagtttgtgcatataacgaaatttagtgtgtattttaaaaagcatctccttacttgtgccctgaagtgtatgcttataaatttagttctcattgtgtcagcaaactgtgtgttatcaattgccttactccaatggcttcaataagcttacttcaagtttccgtagctatcctttgctttctcatccttcattactttctcttcaagaaacctcatggccggtaccctaggaactggccggttctccggatgctacccgctatgctcaaggcgcttcaccgaatctacgactacagcgtgaagattctcgaaacctctgacttgacctttccattcaaaggaccgcggttcacaggaatggatatgttgctcacggttgatccagctaacattcatcatataatgagctcaaatttctcaaactacatcaaaggaccggagttccaagatgtttttgatgtgttaggagacagtttcatcaccacggactcggagctatggaagaatatgaggaaatcttatcaagccatgctccatagtcaagagtttcaaaggttttcaatgagtaccatgacaagtaaactcaagtacggtcttgttccccttcttaatcattttgctgaggaaggaacaactcttgacttgcaaagcgtcttcgggaggttcactttcgatacaatcttcatccttgtaactggttctgatcctagatctctctccattgaaatgcctgaagacgaatttgctaaagctctcgacgatgttggagaagggattctttataggcattttaaaccaaggttcttgtggaagctgcaaaactggataggattcggacaagagaagaagctcactgaagctaatgcaacttttgaccgcgtgtgtgccaaatacatatcagccaagagagaagagattaaaagatcacaagggacttccaatggaggaagtcaggatcttttaacttccttcataaagctagacacgaccaagtacaagctcttgaatccgagtgacgataagttccttagagacaacatcttagctttcattctagcgggaagagacacaacagccaccgctctctcttggttcttctggcttctctctgaaaatccacatgtggtagccaagattcatcaagagatcaacatcaacactgatctatcaagaacaggaaatagccaagagaatgtagacaagttggtgtatttacatggtgcgttgtgtgaagcaatgagactctacccaccagtttccttcggacgcaagtctccaatcaaatcagatgtgcttccaagnnnnnnnnnnnnnnnnnnnnnnnnnaagattattatctgtctttatgcattggggaggatgcgagcggtttggggagaagatgcatcgcagttcaagccagagagatggatttcggagaatggaggcataaaacatgagccttccttcaagtttttgtcgtttaatgccggtccaagaacttgtctaggtaaacatctagctatgactcaaatgaagatagtggcagtggagatattacgaaactacgacattaaggttctccaaggacagaagattgtgccagctcttggttttatattgtcaatgaaacatggtcttcaaatcactgttactaagagatgttctgcttgaaattattcatgtattaaataaaaaaatcattttggtttggttttgatttggttcttagtttttttttttagttttacggtttaagtaaaccgaaatcctaatattgactggttcggtatagttttggttcaaaatttgcgtgcaaaaaaaagaagagactgtgcagtgttgttcctttctgggttctcatcgtcgtcaaggaacaagctttaacagagtttaacatatattagggttcttatctccaaaacccacctcactcatggctgccaaagtttctgtctctcccacaagcctcttaaatcagattgtggtccgtatatctctaaaaagttggcttttttatgatttcgattcgatttggttacaatgaagcatggtgttttcaatttttaggttccaggtgatgttgttcttgatttgtcaaacatgaataaccaaacaatcaagctcggaagtggccttcttcaggtttcatcttcttctctttcttatgtgttgtttgaatcctaacaattattccagtgggcacttgatttgtgatatacaattgcaactaaaaaggaattgtagattgacatgtgtttgtttttttggcttattttaggataatgatgctatctctgccatgagagctggcaaattaagttactccaagcctaataagtattggctcgaaagttctcataaacgggtgagctcagtggtcttactaatcttccctttctggttgcttctctattgagcttcttgtggattataactgtgtcatctaatcggataataggtccacttgattaatcatgagtagaaaagtaacaaataacctggcacaattgcatc

SEQ ID NO: 5657 - DNA, 9132 bp, Arabidopsis thaliana landsberg
  unsure (1)..(9132): unsure at all n locations
tcccgcatgacatagttacaaataacggaccgcaattcatctcacatgagcttgttgctttctgttcggattgaggaatcaaagttagttattttactccacggtatccacaagggaacgaccaagccgaagctgcaaataagacaattataagcaatcttaagaaacgtctgaatcatttgaaaggaggttggtatgatgaacttcaacctgttttatgggcgtttcgcacgactcctaggcgttcgatccgagaaaccccattctcattggtatacggaatggaggcagttgttccggccgaactaaatgtgcctggacttcgtcgaacagaagctccttgataagtgtgcattttgcctgttttgagcatccatttgtcatcactttagcatcatatcatcactgttttatatcatttctcattatttgtcatcactttgcatgtttaggatagttttgcatgcatgttgcatatttatgttgttttcaggtgatttagagctgttggcgagctaattggaagaagcggaccagatcatgtcaaaccagtcgagcaccaggtcgagtagaagcttcaagacctcaacagaccactcgaccccttagtcgagtaggggacttcacaactttatctcaccactcgaccccctagtccagtatattcacctccaccacctgaccgtcactcgatcacatcactcgacttcgaggtcgagtgtcttcacctccactacttgatcatcactcgatcgcaccactgcaccttgaagtcgagtatcaccatcacaaccactcgactacatactcgatggcgagcttcagagtcttctccattccgcactcaaccagacactcgagcacaaggaagaaaagaagactccagcttatcactcgacctctcactcgaccacctgggtcgagtacagttcttaatccgtcctaatactgcgtcattttaagtattagggtttcagaatattttgctataagtagcatgtactttacattttcgagaataagtttttatctagttttattccgcaaacactgtgtgttctagaccttttgtaatccggatttctcttaatttattcaatatttgctttcattttgtttactaagttgttcatcctgttatcatcttgctattactctgttgctatcatgttttcattcttaccatcgtttatgctttctgcaatgatgtctgattagtgactaggtttctgaggatgggttagagtagtttagaattctcagtatgctaggtggttgagtttgatttatagatcccttctacattagttgttcttaatgcttattgctttctgatccactggaatttgagcccagccatttccgcacccaaaaggtgttagatgaaatgtctgaaccactaattccagagatttgtggctatgtaccaaggtattggttacatggagcgttttggctttaactttttgattcgtaatgcctgttaggttagctctcgtcaatggtgatagagtttggtacgtgtttaacttgagggtctctattgcggcgagacttagatttggttaatgaacttgttgtctagggataattattgagcatgtcaatcacctgtaaactgaggaaacgaaactattcaattaccccatcctcgggaattcttgatctgattgaatttattgtttactctactgctgtttactgcattttgtcatctattgcttagtttctgcaattctttactgttactcgacctgatactcgaccacccagttgtttggcaatagactgtgcagtctagtatccctgtttcattttctgtctattactcgacctgtcactcgactacacctggtgctctgcaacgaactgtgttggtcgagtgttttattgtttctgcttgattttctgttttctgcatgttcacttagaactgctagaacacaccaaaacctgttattgcttggcttgtcatagtgtcttctgatcacatcttgattgttagcatcacactcattctgattgaaaaactaaaatactacaacgatatgatagtgctttaggtttaattgactaaaaacctattatcactccgagtgatcaattggtcgagtagatgcttcttcctctcttatctatatgctcagatgtctggttgagtggggaatgaggaggatccgaagatgctttgatagatcaacaagtcttgtagagatggtcgcccttggccgagtaaatgggtcgagtagaggatcgagtaggaagggcgagtagatcgatatgcttcttcttctaaggctgacttgatcgagtaggagggtcgagtagagtctgctgcctcctctatggctgcctggatcaagtgaactggtcgagtagaatgctctgctgcttctctccttgtttgatagagtagagggtcaagtagaaatccttgtaagctccttctgcacctgaaaacttactaaaacatgcaatatgtatgcaagatgatcctcaatgcatcagtatgcaaaataagctaaatgtgatacaatgagtgatcactaagctaaatgatgataaatacacacctaaaatgagtaaaatatagtgttatcaacttccccaagcttatctcttgcttgccctcaagcaaacaaaaaatcttaagttgaaggagaggtttgaaggtggggattcaaaaaccgaggcatgcaaataaatcgggtaacctcaatatccaggtagctaattctagattgcaagatgatagacccttacttaaaaacttttgccatactcgtcacaatgcaacctaacaacctgccttaatctattcaagcattcacatcaaccaattccctttaacattcattaagcacgaacagtggatcaagcaatgcaatggttatgaactcacttggtttcgggcttaggctaagagacaaaaatggtccctctaattatttgttcgagtaacaggggactctcagagaaaagattgagcttcagcataatgctaaaggtaaaagccaatggacaaatacaagaacagactcccatctacccaatgatatatagtatgatagctcagaagatgatcccagtcccatagatgtcctaactctaccctttgtctcattctttctctttttggttcaagttctaaggggttcttctttaaaacgattcaagagtctagtgggtttttggttttatactttgacaaacttaaggcttttcttctaatcttaggtcgttttacccttttctttaaatcacaatgcctgtcttctttgaattccaaaccctttactagactaacactttttgtatcccccttaagaactataaactcttactctctttttttcttttcttttcattctcattctctttcccattcaatccatacacaaccccaatcccaaatacaagtctccacctagtcctagctaacccaaaaagcgtgggctaggtctacatgaaagactgctcttgtcggctcatacctaacacgttataccaagctcaatcgaaaagacctcacaatcacacacaaatgatctttggcttgaaataaggctaggctaagggtatgggaaactgctctaaaaatgagagtcaactacttgaattaacagagggtggtgaaatgaataagataatccaagtatgtatatggtagccatgagttcacaaacaatacacagacatgataattgcaaattcagttcaggttctaatagatagggaatgacatcagataagcgagtttcgaatcaaagcagtatagtcaagttgtaaattcaaagcagggtcaggtcttattatagagaaacaatcagttatgcaacatagaactaacaacctgggcattgaacttacttcattgaattaaaacatgcttaacggtttgaaatcatcattatctcctatgcaaatgagcaatcctaaatgcaaacacactatatacaattctaaaatgaaatgcaatctacatgacactctattttgtgaaatcattttctgaaattgatttaaattttcatgggtttttctatgccttagatgatgcaaaatttgaaataagaaaacagaatacaatgttaaacatgtcttgaaccctccctcaaacttaaattacacagtcccttgtgtaataaaaatctgagaaagaattcaaaaccaaaacacaaaacacacaaagaaaaataaaaacgcaatggtatgtacaatggttgaggtggtgttatctcagtgatcaggtgaagtatatggagacatagtcatccatactctcttgagtagaggcaggggctgaagttgtggcgggagggttttgctcattctgtccggtcgagcgtgtggaagctcgtatctgccgactccttggctctctcagctcggagatcacttcccgaggctgaaaagatgaagctcggggttaatcgatcctttcagctctccatgcagctgagctcgttgaaccgctccttcttacttagggggtgggagacggttgccttggcttgctgtggaagtccttgagttgagcagccatactcttcagcgacttctgcattgttcacatcttcttcttgaaacccttcattgtcttgctgtgaagattcccaagctcttcaagcacaccgagcttcttgggaacttcagctatttcatctcctccttagtcagcaccttcttcataatgagcttgctcttattcgctagtcccttgcttcggttgatcaatatgttgctcaaactcgatttggtgctcatagtcagcttgagtaaagtactcatgttgctcatattcagcttgactatattccggttcattctctcgagctcctccaatgtcgatgttcaagacagagggagatgacatgaaattgatgttgcgccttgtcttcaccgaagtccggttctcgcttggtaggggcaaaagagaaggtccaagctccgtatgcttgaacttgaagaggtagcgatccgctggagttgttttctcaaaaaaatccttccccttgagatagtcaaggtcaatgaacttaggcaacatgttaggggttctgaattccattctcacaactcctagtattggcgttaagagaccaccaacataaagactcccgcgaattcccgagcgatggatggttgcagcatactccttgtagctcaataggtgatccaagagaacaacactcaacgatgtgtccgctctatcacccgtcatcttcctccaatcttttgtctctctcaaaatgaagaccaaagaaaggtctatcatgcatagctcctcttcaccaacaaatccggtggccttctttggaaagagggtgttggcgatgcattggtggaggtgtctaatcttgggatttcggattgaagaactcttgctcttggttggcgagaaaggcttcggaccggctattgtattccaaagagatttcagctcttcttgatcatagtcttggcggattccttctccacttggaaacccaaaaatggaatcaagatggcgaatatcaagagtatactcgacatccctaactttgaaagttatgtaaccaagacctcctctctcctctttctccgaatcatcaacacaaaaatgaaccttgagggttgcaaggagttggcagctctcctatttgtatcccccacattggcagctcatgaatgttgcatgattggccaattccatcaagtattccatatcaccacaaataccaagctcttgcatcgtttccttatgagggtatctagttccctcaaacttcaactccttcaagtattgatagtactcgctcgggattggctctctcttcctccttggccagtttcttctcccaacaggggttggtgtatcatccccaatgatctcaacctcttcctcagaaaccgcttcttcaaagggtgcctcttcatggtgttcttcttcagcttcaacgaccctctttccccgagctacttcttctctttgcatggttgagcggcttgagcttcctccttgaatcgagcttgatctttgagcacggcgagcatggcgaatttggcgttcagtcatgccactcatgtcaaacgcctcaacttcttcattatcagcagaggatcttcttgcccgagatgaactcttccttcttgaatccatggagattggtggtgagcttcgacagggcaaacaacaacaattctccaagaggtatcaaagaagaaaggaatcggtttctttggtgatgtaatttttagcttgaaaccgattgaatgtttgaggaaagactttggagtggtcaagtaattttggtgaagtattggtgaaggggaacgaattcttaaagagtgatagggagcgttttggggaagtgtttggaatgaagacttcaaagctttgtgaggggattgcgaaaatgagatgatgaaagagagagtttcatggagggtttgtcgaaatcaatgggtggaggtgattggtctttggtttgctttggaagagatagaaaagttgattggaaatggtgatgggcatgggtaaatggtttgtccgttgaataatgaagtgaaggggaacaagtgggacatgcgacatcacttcttggtctccaaataattcaagctcaagtaaaggatcgagcatcttcttgagttgcgcaaaatttgatccaacggtggagagcttttcattcttgtttactcgatcaaacggaccaaaataaacttcaggaagtcactcgctcaaacggtggtgatgcacctctcatttgatcatccaaatcaatggctaaaaatactcctcctcattctactcgataaacggttgagatctttcttgacttggtttgaatttactcgaccgttgactctcttagggtcactaaaacaaacttgaaacacttaaagaaaaacatcaaaaataacaagaaaaatagaaaattatatacatggatagacatgggacttcctcccaagtgagcttgttttaagtcactaagcttaactcttacagagcttagtcagaaaaaaggttgaagcgacgatcagagaaatcctcatcttcagtggttgaattttcagtgcttgaatcatactctgcattctctcttgagatatggtaggatgagtactcatttgatttttcttcaaagtaagcttctttttgatcagcagagtagtcttcttcttctgaaccaggctcctttgaccaatcctcaaattcaaaattagggtaagctttaaccatttcttgaagttccaagattgcatggttcagtccttccatcttgtaagttagctccccaatggtatcctcttgagctttgtattctatcctgagttcaagaagttctttagtaacagaatcaagtgtcaagtgttcttttcagcagaggggttggtaggttgtttaggcactcatggagaataagtcggaatagggattttctcctcactcaacaactttctctctaggcttctttcctctaagtgaattcctttctgatcttctggtgcaaaccattctgttgtgaaattttcgtcctccttgatagctagtgcagtttccatcttctctggatcaataccatttgaaaatttttaactcttttttcaaacatccatagttgatctttcagcttcatcacccttgaagataatccttctatgactctactttgccatttaaatgttttcctcatctcatactagtcatcttctataggatctttagtctgagctagcctttttgttgctctcttcttgtggtcaaaagtcctcttttagtttgctgagttgagaagtgtagttgacttttggtgaggtttgagcttcatcaacatgttggtgaagtatagtctgagctagcctttttgttgctctctttttgtttcttcatcaacatccatgtcctgaatctcaaaattctgaaatcctgttgttgatttccctgaagcttctctgatgtcaaacttcatcttgatgcctttttcaaggttcaaattaatttttccatttctgacatctatgactgctccagctgaagctaagaatggtctgcctaggatcaggggatccttgccttcttcatctacgtctaataccacaaaatctataggtatctcaacatttccaatcttgataggcagattttctattagaccatgagggtgtgcaacagaaccnnnnnnnnnnnnnnnnnnnnnnnnncagaacttgtattccatgatccctagcattttagctgtagagagaggcataaggctaacagatgctcccaaataacaaaggcacctattgaatgtcaatggtcctagagagcatggcagagtgaatgaaccgagatgatcaagcttttcttggatgactttcttcttgtaagtttcttgggtggtggcactgctaatcatctcttgattctgatctttcttaagtttttcaattctgaacttttttagaatggtgagtattcagcaaaggtgtgtgctctgtagtccaaaagaattgctgagtggcaggtgtagcaatttgagttgaatcccccccttcttgaatcatattgtccttagtattgagagtctgatgacttggtggagactcatcttcttggtggatggtgatagcattagcagtagcatagtccttaggattctggactgctttccctggaagttgttgaggatgcttcggagcagaggttgatgcaaattgactctccacatacttgatttttgagttcaaagcttcaaacttgacattcagatcgttgtatgaacaatcgatcttgttgtgtaattcagctatcttcttgtcaaaagccatagcgccagtagcttacccttggatggtctgttgaatgagttgcttaatttcaggatcttgagctcctagggcttgttgtggttgttgagtgaaccctggtggtggattctgctattggtagcctccattgaactgttgtttagggacataacctttgttgtactgaacaaaaggcttggacggattctgttgtggtggatacacttgatcttgggggttagctacattattgcttctataggagaggtttgggaagggcttgaattgttaagcccttgttgaaccctccttggttctgaatgtagcacagctcttcagttgagcattccc

SEQ ID NO: 5658 - DNA, 4716 bp, Arabidopsis thaliana landsberg
ccctttccaaagaatattaaaggtcctttgggggaagacccttctccaaggcattttaggccaagcccctggccaggaattggcataacctttgcttgagtggactaaagatccaacccactttaagttcctgtgtatcctgcaatgaacagtaagaaaaattaagcagccctaatcaagtaagctaaaaatcataacgttgaaattataaaacaaagacacacgtaccttagcaccctcccagagctcttcaatctcgctgtaaggcaggttaaagtcggtaagattcttggggttgaagtcttttggaagtttcatcaacgggaattttagccaatagaggtaacgtatctcatccaacggaaactcaagtccctccggaaagtttagtttgctatcagcttcacattcccgatcacaacgagaactatagaatttgaggtatctaagattgcgcatcttgatgaaggtacttctgtccaaaggaagtttcttcttcagttcagacatgtcaagaaaaatacctctcacagctccctggttaaccaattaaagacaagaaatcagcaagtagaagtcgagtgctgagtgagcttctaattatcatgaaaagagaacttcaaattttgctacagtcgctatcaaacagttctaaggtttatcttaccactctattcttcagcgcacctacaacggctttatggttccacagcctacgcgacccttgtgaaccaagttccttaccaaatgtatacagtaaatcatgcatctgcactcgtccgccagaaatgtttatcaagaatttgctggcaagatcctttatttcactcacagtatcaatggcttcagtgtcacaagattccactaaagacctcacgtaatactcatcctttgatctaaagaaacatgcgacatcaagaaagacatctttgtgagacaaacctagttcatcatagcttacccgcaagacatcttgtattgtcttattgggactttgcatcagcttgctaagtttctcttcccagtgagtcttgtcttttccatttagctccttacccaatatcttgagagctaatgggttgcctttagcataatccgcaaacaatctagacagattcatcaaagttcccactggaggacaaagcttaccactaaaggcaaaatagctaaagtactcaaagctgtctctaccagtcaatctcaggacctcatatgtatcatcaaccatcccctcgatcaccgacctgtcgctagttgtgataaagattctactacctctcttaatccagtctgattccccgagaagaacctctatctgtttcttgtcgctcacattatcaagaacaacaagagatttcgtactcagtaggtgtgccttcaaggactcaggtgaaaagtcagcgacttcttggttcacgttatcatccttcaacaactcttcaatgaaaatgctccgatccatcatgcagtctttccacatcttacggacatcatgaagaaaaacacagcgtaggaactcgtgttgccacttttcatacaacatactagccagggtggtcttgccaatacctggcatcccaacaacaccaatggtaagagtatccttgcactcaaaatccaacttctcttccaattgcttaagtcgtgtttcaatgccaaacagaggaggaggcgagtcaggagcagcttcagatacttcttctcctcctgcacaaggatcatcaatggggatttctctttccagatcaggcacaacatcagatgatagcacctttatgacttcccctacaatttgattgatggattcgccttcatcgctacaagacaagtgaaaagaatcaatcacataaaccataagatccctctaataggcaaacaaagttatgtcctttgacaattcaaggataaagttacctcatttcgctcaacgtaaagccaagctttttaggaacatcctttaaagcttgtttccacttatcgagcttttcaccatcataagtcttagccaatttacagaacgtgtcaccaaaaaccccgtttaggtttttgacatcgtctgtgtccaccatgtagaagatgggaataaccacaagtgtgcctaaatcaacacactccttaatcttctcaagctcgtccaagcaccaatgcgactccgtatacatgctcgagaaaatcgctagcgcgatcctcgactcctggattctcgagaaaaggttactgagatctctacctttggtttcgtttctgtcgataaagacgttgattccatccctcctcaaggctttctccagatggctgacgaaaccgttccgcagttgtttcccacggaaattaaggaagacttgatgctgaggcgagatataattgaccggaagaagaagaagaagaagaatcagccaccatgatcgatgatgtttcgcgttgaaattgaaatcatgacactctgggtttttcaacaggcaagtgtggaagagagaagaagactattgactaaaacactaaaagcaaacagcgacttggattgatagtggtcatttacattctcttttttttaataacttcacgtgaccgttacctttgataattaaattcttaattaggggacaaagacaaaaatttccacgaaaaatataatattttattatttaaccaaaccctagtgctaatggagtcaataatggtcttcttctttgtgcagacgaaggttttgaacttgattctcttttgcagtcatactctaatggattcttcttctgcttccctccttaggatctgtgctgctgcaatcacgattttgggtacggtttcatttctgatttatacaaaattcatcagatccaatccgcagaagaagaagataacggcttcgtctcgcaattgggaacacaatgtgttctcgagcttcagctctgtagatgtacccaaatcctttctcagtaggattaggaaagagttaagaagaaagggtttcgagccactaatcgataatgaaaccgagaggtgcgtgtcgatcggacctgagctcagaaacgcgattagtgtctcgagaatcgtgattgtcgtgctctcaaggaactacgctctctctccgtggtgtctcgacgagttggtggagataatgaagtgcaaagaagagttgggtcaaagagtggtgactattttctataatttggatccaattgatgtattgaagcagactggagattttggggataatttcagaaaaacacgaaagggtaaaacagatgaagacatttggaaatgcactagagctttggcggaattgcctagagtctataaacttaccagccgcttgttagtcttcttaatctttcttaacacatgaaagtaattcacagttttttaatatgtgtttgatgactatgtttaggtccataaagattgatgatacggctatgaacaagcacagagaagaatgtgagagaaaaaacgccgaggacattgatagatggattaaagctttggagcaagtggccacaatcgatggtttccgttcatgggactggtcggtttttcattaccacttgcctcttcttaatgctgcatcaaacaagtttttttaagtgtatgcgaattattcatgactatttatttactatatgtttagggatgacgaaaaggctacggtcgaaaaaatagctaatgatatttcgagtataatgaatacttccactcaatcaagtgctttccaaggcttagttgggatggaagctcatatggaaaagatgaaagagctgctaggtctggactcagataaagtgagactgataggtatttgtggtcttcctgggagtggtaaaaccaccatcgctaaacgtttataccaacaactccttcctcaattcgaattgagtactatcattattgatatcaaaggatgttatccaagaacttgctacaatgaggacgacaggttactgctgttacaaagccatttactgtctcaactattaaatcacaagtgtactggtgagattcttcaattggaagctgcacatgaaatgttgaaagacaagaaagtgctactcgttcttgatgacgtggacagcataggacaattagatgccttggcaaacgaagctcggtggtttggtcctggaagtcggattatcatcacaacagaaaatcaaagacttgtgatggctcataggatcaaccatatttacaaagtagaattttcatcaactgatgaggcttttcaaatcttcggtatgcgtgcctttggtcaaaagcatccctataatggtttctatgagctttctcgggaagttactgagcttgctggtgggctccctttgggattgaaggtcatgggctcgtccttacgaggaatgtccaagcaggagtggaaaaggacactaccaaggttaaggacatgccttgatggaaaaattgagagcattttaatgtttagctacgaggctttaagtcatgaagacaaagatttgtttctttgtatagcttgctttttcaactatcaaaacattaagaaagtggaaaaacatcttgcggatagattcttggatgtgaggcaagggctttatgtcttagccgaaaaatctctcatacatataggcacgggaacgatagagatgcatacttcgctagtgcaactaggtagagaaattgatcataaacaatcaactaatgaccctagaaaatctctttttttggttgatgaaagggagaattgta

SEQ ID NO: 5659 - DNA, 1701 bp, Arabidopsis thaliana landsberg
  unsure (1)..(1701): unsure at all n locations
gacatgtatgagctttgtaagcttttggattcgactcattagagctgctttagcttcttcttcttcctccattcttgattgcatcttcacttgaccttcttgtagctgttaataaattgatagctcgatctattcaccaaataggaataaactcaaacatttatgaaataacaaggtctcggggaggttagaacctgttgctttaggctcaataactcttcgtgactgacaccaactagcacaccccttcttagctgatcaagttcgactttgagggtcgagatttctttctgatatttcttaatcaatgacttctcatctatgatctgttgcaagatatgaaacaatgtattttttagccgaagtttaggttatgccatcaatagaagtcaaatacttcttcttcttttttgtatgaaaaagccaagtacttcatgaccaaaagcctaagaaatgaccttattgcgtgaggcattaatttcaattctctttgccctgctggcaaacttcaaagtattatgagtttcctcggtactgcttgacgcaggagtaactgtacatatgagctacaaaagtttcagaaaataaaattttaattagcttctgctcattgcgattttaaaattaagatcagcacacagcgtatattagatagccaataaatacaaacaaaccaacattgccttaaatatgctactgaagacaacacaattagacaatctgagacaatcaaccgtgtgaaaactattacagtaaaatgggaaatattcaccagatacagaagagtcgtaccgatacatgcccatgcccactcagtgaagattgcagaagacgagttagcttagagtcccgaaatgggacatgagttgtcttgccctcagtcagttttccaatcacctacatatttgaaccatgagatatagtttataatcaaaacatcctaaaatcgatttcaaaggttaggtgactagagatgttatccttgacataaggacacaaaaagggaacaggcttatcagaaaataaaggcattgatcattaagatacactagcaaaccaggttgttcttctaaggcagttttgcattatacttaattctgatttatatcatattataactgaaaaggaaatatctgacaaataaaagaaagctccaacagaaaagagacacctacagttccaagagtcagaagactcttgttgatgtatgcaccctctttcctcctcagtcccgttgtctcagttttggaactctcagatccagctaagtcaatcaaattctgagcaagaaagagacactgtgagagagctgtttataagacgagagaacttatgcaatgaaagaagaaagaagcccttactagctgagaaaaaataactccatcatattggtctccatgagcactactttcaatcatctgcaaacagaaaatacttgaaattgaaacttaaaatgcatagcaaggacatttgtaagagaaaaagtatctaaaggacattgagaggatcaagggtaagaaaatgggatgttcacaagattgaaaatgtaccagtgtaaatattgtgtgacttctgctgctcatcaggttgaaattatttgaaccaacatgacgatgttctgccattgaagatcaataagtcaaacagntataaaggaaacgcacataggaatattttgaaacatgtctaatcataattttt

SEQ ID NO: 5660 - DNA, 895 bp, Arabidopsis thaliana landsberg
ccaaaagctgacaaagctcatacttgtctctttttattattctattcctggatatttaggtgacagacgagctcattctcgcagcatttctgctggtaaagatgatgtaagtttgttatttagatctgattatcactgtgttcctatattcctttttaactgttgcatgttggttcctcactgcccaagaggtttgatacctgattgactcattctgttttctctctgctcttcagaagttagactctctgctcttggatagtgataatctggcatctccatcttcgactctctctctagcatcagatgcgcgacggtcttccagcaagtttaaggatgaaaactctccagttggttctcgtgcagaattaactcaagtaagttctgggattcttagcgtatatagttttacattgaatttcgtttattagaagtttggtgtattcttgttttcaatccaaatggttacagaaaagggtgtttaatgattcagtgtcgcatgcacccatttaacctttcttttatcccatgaatatgattttttcagtgtttttataagaaaatgacatttgatagttgtggctattacagggcgttatgactcccgatgaaatggatctcctcgttgagcaagttaagatgcttgctggtgagatagctttcggcacaagcacactaaagcgtttggtggatcagtccatgaatgatcctgaaaactcgaaaacccaagtaaagattcttctttatctatctagagaattatataccagtatgactgtggtctccctaatttcaagttttaaccctgaaaatcagaaaatgcatctccagaccatttgctgaactttattagcattccactttaagccatttatttacctataagcataactac

SEQ ID NO: 5661 - DNA, 3109 bp, Arabidopsis thaliana landsberg
  unsure (1)..(3109): unsure at all n locations
cggcttgctgaggatcatctggaaatattgaccgaacgacgttgtatccgaatccacatagcttgtcaagaagactcgagaagattaactcatttgatatgagcattatattagacggaggtagattgtcccaagtccaataaatgacagccgaactaagttcaaagatatctgtttcagaaacttcaagaattaaaagataaactctcaaaaaactgtagtccagagagttgaatgaaccatttaagcctgggaaaaaaaaacgaaacnnnnnnnnnnnnnnnnnnnnnnnnnnaaaaattagacccgaaattgaacccaaaaatttaccctattgggtcttaaattcctctacccgaaaacccgaaaccaaaaatttgtcaaaaagttaaaaaatgaattaattataaaagaaaattgtttaaattatttaaatgatgttcaactttttattgtgatcaataccaaaatttcccaaccattcatctacatgcaaccatttgacaaattataaaagaaaattgttcaacctattcatctacaaaaaatccaatctaataatgtaaaaagacactaaccaagagggatgtggtgaatagcgattccagaagaatagacttgtgtgaggaagtcatgaggaacgtctgttagtatgccaatggcagtggttgtgagagcaccagtgtagcctaatttctccaacgcccgttttataaacggactcacccgacgaacatcaacgtcattgggaagcggacacctgttgatgtcccaccagacgcttgtcgctgcagccccagccgaacacctgttgatgtcccaactgacgccggtcgaggccccgatcacggtcgaggcatcggcctccttggtcttcatcatcattcaagactttaaaacctgaaaagaaaaatcaaactgaaatttagaatttggagaaccaaatcaatctttaagtgtcaccaaaacgtgctagtaacttaacaatggaccgttaacttcttaatcccaccgttgattctcaaccctatagtgcgacgtaactgtccacaaaaattcatcccgatcggaataagttgagacctctatacgctgttctaaagatgacacattgaatctgtgtatctagggtttcaggaattggcagaaacagaaatttcttgcgtaagaagcaatcgttatggtgattatgatttaccttttctgacggttttgacggctcagatagcttccctaacacttcctgtatcaaaaacaaccgtcaatagtttctaaaaagctcaggtcttaccgaaaatctcctccagaaactccaacttgaatctgaaagtttatctgaaaaacagggttttgcagaaattagaaccagtgattttccctcaacgttcgagatggatttagaatggaatatacgttcgtttgaaataacgtcaatttctacggattccttgcagcaagatctatccagcgacggcaaaatctctaagtaactctctttggttcgacgggaaattagtttacaaaacccttacttgccacagtttcctcttcttcttcttcacaaataaaacctagatttaaactaaaagtttatgagatcaaaacactaacttgcagaagaagaatacataaacaggttaggtttccttacccaacaaaccaatgatgacaaggctcgactccggttagcaccggctacaacttcaatgaaagacgccacgccaacgtacgaagcaacgatggtgactttgcccactacgatcctcctttgtctcagtatttgtctctccctcactctctcgtttcttctcttggcgacgtttctcaacaaagagggagatgtttacgcttatacacatatatggcaacacacatagtcaaaacccttcccgttttaaagtttataatcacttgggcttatgggctgaagcttatcatttaatttaaatgaaagcccaacctttgagattgaggatgttacacttaaatacacaattacacattaaattttaaatctttcaacagttaagaaccagcttaaannnnnnnnnnnnnnnnnctctaacagtcaaaagaaccaatataaaaggatgaacattgtccgtacaattctgagttttaaaaatgcaaatgaaaagacaacaaacaatgtcttaatccgaatgtttaaacaacttgagagaccacatagacacgtgtgttcatcagattcatgaaagtttcgactaattttaaacattcaaagaaagcttttgagctgcaagggcttcagcctcaagagttggctcccacaggagtgtggtctctgccaaaagtgaggtcacaatgtatgggtccatgttagatgctggacggcgatcttctaagtaacctatattccaattcacaacaatacatgttagcaaatatattgcataccaaaaatgtgtgtaaccatccttgaaacagtaccttttcctttcgcctcggtgtcacgtcccacacgaatagagcatccacggttagccacgccctgcgtagtcaaaatgttttaaagcaaatgagtagagtgacacacttatatgtgaaatcattcagactaccacagcatatacatacccatgagaactggtcaatactagctgtctcgtgctttccggtcaaccttctctcgtttccttcaccgtaggcactgatgtgctccttgtggcgaagtgagaggttcaagatagccttcttgatcacctcaaatcctccttcctctctcatgctctttgtactgtaattggtgtggcaaccagcaccgttccagtctccctctatcggtttgggatcaagtgttaggacaacaccagcttgttctgtgattctctgcataaaggtaacaacatttacaaaagcttaactcacatttactcagtcattcctcactacaatagagacttttgattacctcaagaaggtatctagcaccccaaacatgatcacctgcatcgattcctacgctcgggccaacatggaactcccactgcacaaatgttttaataaccccagagccttgactaacaaataacggaatttattaacagagaaaccatttggaaagagaccagtccaggcataacttcac

SEQ ID NO: 5662 - DNA, 4689 bp, Arabidopsis thaliana landsberg
  unsure (1)..(4689): unsure at all n locations
gcaaaggactaggcaaaggggtatacaaaccgtggggttgaaccttagccttagcttgcttacaagttgcacatcgttcacatagtcgctcgacatctcttttcatgtgcggccaatggaagtgttcttgcattaccttgcacgtcttatcaactccaaagtgtcccattaagccacctccatgagcttcccttaaaaatatttctcgcaaagaagagtgaggcacacaaagtctattttcaaagaacaaatacccatcatgtcgataatattttccaaatgcaaacttctcacaagattgaaatattttgctaaaatcagaatcattagcatacaagtcttttatttgctcaaaacccaacaatcttgcatccaaagaagtaagcaaaacatacctccgagataatgcgtcggctacaacattatctttaccttttttgtacttaatcacgtatggaaaggtatctatgaattcgacccaccgagcatgacgtttgttgagcttttgttgaccctttaagtgcttgagagactcgtggtcggtatgaatgacaaactctttcggccatagatagtgttgccacgtttgtagtgcgcggaccaatgcgtaaagctccttgtcgtaggtcggataattgtgagtcgctcctcctaacttctcactaaagtaagcaatgggcttgtaatcctgcatcaagacagctccaatacctaacccggaggcgtcacacacaatctcaaaagttttcataaaattaggaagaattagaacgggagaattagtgagcttctctttcaaggcttggaaggcgttttcttgtgcatcttcccatttgaatccaatgtccttcttgataacttccgtaagcgnnnnnnnnnnnnnnnnnnnnnnnnnnacaaatcgttggtaaaatcccgctagaccgttaaagctcctcacttcgctcacattcttaggactcggccatttttgaatcgccttgaccttttcttcatcaaccttgattccatctgcactcacaacaaagcctagacaaacaaggttatccgtgcaaaaggtgcacttcttcaagttcgcataaagtttttcttttcgaagcaagtccaaaacgagtttaagatgcatgacatgatcttccaagtttttgctataaaccaagatgtcatcaaaataaacaacaacaaatactccaatatgcttcctaaggacatgattcatcaatctcatgaaagtgctaggtgcatttgttaacccaaacggcataactaaccattcatataatccttgtttagttttgaaagtccgttttccattcatcaccttccttcatccggatttgatgataaccacttttaagatcaatttttgaaaagatgctagaaccatgcaatttatcaagcatatcatctaatcgagggatagggtggcgatacttaaccgtgatattgttgatggctcggcaatccacgcacatgcgccaacttccatctttctttggtactagtaagaccggaatggcacacggactcatgctttctcgaatatgacctttgttcctaagctcattcacttgtctctcgagttcctttgtttcggtcgggttggtgcgataagttggtcggtttggtagagcggctcccggaacaaagtcgatttgatgctcgattctacggatgggtggtaaacttatgggattgtcttccggaaacacatccttatactcttgcaaaatcaacttgatcttactcgatagcaccggtacgggattagttgaacaagtaagtgtttctttgaaaacaaagagtaaactatttttacttaccttgttcttgccctttgtatcgattggttcagttggtttgatggcccgttgtttcatacttagctggtctagatagacttcgtgcggagtcatcgggatgagagttgtctttcggccattgtattcgaaggtttgtcggttggtgaagccatcatgaagaacttttcgatccgattgccatggtcgtccgagaaggatgtgactagcgtccataggtagaatatcgcacatgatctcatcatgatacttcccaattgatagtggtattttgacttgttctttgacggacatctcacccgtttcattaagccattggaacaaaaatacggtctcgggtgtttaagcacttctaaaccaagtttctcgaccatgttcctacacgcaacgttagtacaacttcaacaatcaataattaaactacataccttatctttgaccaagcaacgtgtatgaaacaagttttccctttgcgcttgttcctcggccttagttagaacactcaacgatcttctcgcaacaagcaactctcctctagcgggggattccacatcttcttccattgagtcttcttccgcacgctcatcttcagattctacttcgccattgtctccaaggaccatgatccttttgttggaacattcgctcgcataatgcccaagtccttgacacttaaagcatcagatatctctagccctggtgattacttccttaccctttccttttggatctagatcgaccggttttggcttgacgaacggcttgtaatccttttgataagcaaacttctcttccttttgataacttggctttcccgggctgtagttggtcttggtgtgacttgatcgggcgttctttctcttgatttgatgtttgaacatgaccgctttgtgaagcatctcctcaagctccacatagtgttgagtttctagacggtcttggatttctcggttaagacctcccatgaatcgggacatgaccgcttctccatcttcttgaagatcagctcttaacataagggtttccatttcctgaaagtattcttcaacggttttgcttccttgaaccaaatttctcaaccgctgatgtagttcacgatgatagtaactcggcacaaatctctttcgcatgacgaatttcagctggttccatgtttcgatcggatagtctcgggtacgtcttcggctagtaacaagttgatcccaccaacttaaggcatagtcgtaaaactcagtagccgcaattttaaccttgttggactgaagacattcttgacaaagaaagactaactcaattttcttctcctattccaagtaagtatccggattgttggttccatggaatgcgggaattttgagttttaggcctcccaagggatctctaagtggtggtctctctcgtcgatgcctacgttggctactgtgagaggaggtgtgactatagtaatttcttgcctcttcatcttcccttgcgtcttcttgtcttagacgtgcatttgcgtccgggttgatttgatgtaagtttagagcaccaagcttttcatcgattaatgttgctatagctgatgtgactgttttcaaaatcctcctttctaagctagaggcagatgacgcttcatcttcttcacttgtcaccattgtacatgaaaaattaaaaatttaacaagtaaaacagttcaaaaacaagcaaataaaaacgcgatctgaaaaattatcaaaacgactcaaaacattccgaaattaatttctaaaaatactagactcgtaaacggttcgaatgcaattggtttcttaatttttgaacgagccaaatactttataaaattcacgcaagattgaacagagatctgaaagaagaaaaacagaattttaggattggaacttcaaaacctgataacaaagtggctctgataccacatgatacattcttggacgtggatgtatgctccaaggactcactttgttggttttgaattgaaaattatgtacttgatggtgaataatggatggattcggaacaaagcggtggaaagacgataaaccgggatgaagacaagatcgggtggatacagcggaatgaaaggggaacgaattgtacttccaagagtgatgaaagacttttaaactactagcttggatccaacttagatattacacactaagaagaaaacaagttgaaaagatattacacacttttcggatcaaacaagtaaaagagaaggttttttgattaaaatgtttgatgattgcaaatgagaactacaatgagtttatataggagaggaggaagaaagggaagaggtgagagaagaaagacatgcaagagcatgcacaagtctcatgcanagagttttggaaataacaaaagcaataaatgcaaagtttgaatagaaaagagagaatgggccaaagcattttgagtgggccttggaccacgaattgggctgataaagggaggcttgaaagtgttacttaggcctcattaaaaatcttgtctagaaaacccattgggacaaaacttgacaaggaaaaaagagtgcaaaagcaacacttaaccttttaccgagcctcttgagccgtgatcactatgaaggaggattgagccacgtcttcttgattcttctttagctccttgagtaatccattgatagcttggttgaacttcttggattttgatcttcttagaggacccatcgggacgattaatgcttcctctggtacaagctgctcctcggcttcaagctgctcctcgtcttcttgtggttcaagtggtttggttgcattggtcatgttctcgtcactatactaaaagaagattcatacaccacgcttgtaatgggaatactaagtacatccattgccgtgtatgc

SEQ ID NO: 5663 - DNA, 2350 bp, Arabidopsis thaliana landsberg
acaaaactattgtattcattttaaatttttaatgggtcttctttgttaataaaggcccattaaatatactatccaggcccatttagtccaactacttattacactgttgattaatcgccgtttagatattttgcattggagagaatcttcaccgttcagaaaactgaagatcgaagatcaccaaaaccggccaaaaagtatagtacacgtccgaagattctagatccatcatgccatttgcattgcatggcctaactctcgtagaaaacccaaacaaattctcccccacacaaataatgggacaaaaaccaaattaaaccaaattgtttccctattgaagaaaataaaatcttcaacaaattttatgaatttttcataaagtcggcaacttcacacgagtccaggtcgattcttaaaacaatgatctttaaccatccacgtgtcaaaatcccaccttagcttacctcatttgttctattccaaatacctattctatcccttggatcttgacttatatgttcataagaaagtgtatcagataagggtatatacgtcatttaaatccagctcaacggttataaaatcctaattcgtgaggtttctctgaagaacaaacacaaaaatggctacggtaccattgttcacccagttaccctgcaaaaccctaaatccaagctcatcaaacactaaacaccaatcgaaagtctccgattactactaccgattaactcaataaatcggagatcggagattggagtctctgttcatcggccagatttcaaaatccgagcgacggacatcgacgacgaatggggtcaagatggagtggagagagtatttgcctcatcttcaaccgtatcggtagcagataaagcaatcgaatccgtggaggagacggagaggctaaagagatcactagcggattcgttgtacggaacagatcgaggtttaagcgcatcgagtgatacgagagctgagatcagcgagctcatcacacagctcgagtctaagaaccctactccagctcctaacgaagctctgtttctcctcaacggcaaatggatcctcgcgtaagtacttttagttctgatactctcctaggcacggcatgtaatattagttttgtcccaaacattactcaaaccggtgatctctgagcttcgtctaggatctttaccaattaagttaatgatactttaaacttaccggtggaagtttaatttcccggtgaaaactgtttagttccgttatgaatgatttgattttgatagtgaaaagcaagttgtgattacaaagaagatttaattatgaatttggattatgattctgtgtgtagttatgagccttcgtttatttttagccgttattgttatgaatcaagaacttagttttaagtgtttatctcgtgaagctacacgtcgttcgtggggttgttcccattgctctcacgaagaattgaaccgttggttaaagtggatgagatctcacaaaccattgattccgatagcttcaccgttcaaaactctgtccggttcgctggtccgttttccacaacgtcgtttagcaccaacgctaagtttgaaatccgaagtcctaaacgtgtccaggtaaatcaagaatcatcccctaaaaccacaaatggcaaatgctaatgttacataacctaattgttttttttgttttgtttgttgtagattaagttcgagcaaggtgttatagggactcctcagctaacggattcgattgaaataccggaatccgtggaggttcttggtcagaaaatcgatctcaatcccattaaaggtttacttacatcagtccaagacactgcttcttcagtggctagaaccatttcaaaccaaccaccattgaagttttctctgcctagtgacaacacgcagtcgtggctgctcacaacttatctcgacaaggaccttcggatctcgagaggcgatggtggaagcgtctatgtgctcatcaaagaaggaagctctctcttaaacccttaaatcatcataactctcatcacatccatagtaacatatatacaagtatagacccatctgtctgtgtttactagtgttgcaactgttatatagcttctttacctgttggagagttataaacttataatggatgttactcttggtatactgtactacaatacatatacataactacatacttgaacaggccagttatgggtttgcaacagcaacacttagcattggttcaaatttggtatactaggagggtttgcattatgtatggcattcggttttccggtttagtttcggttcgaacttttgactcggattggatcaggttgtcagcattttggtctggtttg

SEQ ID NO: 5664 - DNA, 2387 bp, Arabidopsis thaliana landsberg
caagaacgaaacaatgtctaacaacgaaatacgaaaaaaataatgcaggaaacaaaaagattaatacaaaagaacttatcatttatatgaaaaggaaaaatatccttcgtgagaaaggcaaaaaatatctttttaatcgagtgttattagctcaattggtaaaagatcttaagcaaagtttaaaggtcaccggtttgacgtttgggacaaaactaatattacatgctatgatttcaggtctaaaaggattatgggctttggccaaaaacttcatgctattaaaaaaatgttttttataaaaaaatcataatagttttagaaaaatgtattatactagttctggattgattttgattcttttcactaaacgttgaattaatttccctacgaaaatacaattcatgtttaagaaacaaattttatgacacgttcagttgccaaaaacaagatgagaacaactactagaaattgaactatgcactgtcttacttttttttttttaatctgttgtcaacacggatgttttacctctaatatatcactatattgcatgtactgggaacagaagcaatcaaatcaatcaaactaattagacgcgaaaaagtcaaaacaatcaaactaattttacatatttttattaaacatttgaactatggtattttcaacacaaatttctgcgtatgaaatttcttgttttagctgacgaattagtatatgatatttttgagtggcttttctaacatggcccaagcccaaaactgttcataatggcttatactttttagaatatccagaaacttgttcagttattaatatttaccaacacgaattatgtttttaagaattaattttaagatatactaaaataggtgctgcttaagtttatatggcactgttttgaagcggtttcaagagaaatgtttaatggtataaccgtataagtaatcatattaccaagtacaaacttttgcaattttttaatagttatgttttaatcgtaactagtatatacatatagactataatattttgttacagtcaaactcttatgtaatatttcgaacatttacagactaaatctaacctcaaactcttttatttatttatttattaatgtttggtttggaaactaacaaacgccaagaattaccaatatatatagtaacatccaaagtccaaacaaagccacctcttattttggaaagtttattttctttctgtacatagagcaaaagaaacagtagactaaattgaccaatgactcgtggtttattaaataacagccacctgctcattcgtcccaccatgcgctcccttcaacaatctcctaaaccacttagctgatttcttcagatacctcttacgtccatcttcaaagtccacaaacactagcccgaaccggaccgtgtatccttccgaccactcgaaattatccatcaatgaccacgcgaaatatcccttcacattcaccccgatcctgcattttatgtaatatatggttttcacttttcagaaaccttcttttaagcctccgttggcgtctcaaatacatacatacatacattatagacatggccaatctaattttggcttcgaatgctttggtttacgaaagaaagaaatttcaatataaaagattgtaaaggaggacttacgagatagcatcgctaaccatcttgaggtgatgagcatagtaatcaattctcaaatcgtcgttaagaaatattttgccaatatttgcttcatccactcctacatgatttgaagaaagagacgcgatataaaatgattagtctgaactagtttttaaattcagaaatataagtaataaaaagtctattgaatgctatgatttaccattctctgtaatgtacaagacgggatcattgtatctgaattttgcatgtagtaggagatcacgaatacccttgggatatatcaaaagccaatccgatccagcctgaattagtgaaacgaatcatagattataatatacgcatcacacaatgttaacaattatttcggataaatcatgcatttttaacttgtaaaattctacttcaagtactactaaaacagagagaaaaaaactgcgtacaaaatcaaattctatcacaattttacctaaactatcagtctatcaatgataactttgatatgatcaggagattgatctaattcttaactaaacaaagctgaatagaataaataatcgtaccgctggaccgataggcactccatttcgttcacctaatacaattaataacaattaattagttgacgaatgtctaagagaaaaaggttaaatttataggttaagaaaaagccatatggttgacggacctacgagactgacgcaagaatcggtggtcatggtgatgttttca

SEQ ID NO: 5665 - DNA, 2225 bp, Arabidopsis thaliana landsberg
  unsure (1)..(2225): unsure at all n locations
gggttgagaccgagcgcgaaaagagtgttggcagatctagcaggcatgaagatttttcaaagagaaagagtgtcgaggataatggggggaagggggagaagaaaacgcgagaagaagaactagaggatgagcagaagaagttggatgaggaagtggaaaaacgaaggagaagagtccaggagtggcaagaattgaagaggaagaaggaggaagctgaaagtgaaagtaagggtgatgcggatggtaatgagcccaaggccggtaaggcttggactcttgaaggagaatctgatgatgaagaaggccatccggaagaaaaatcagaaacagaaatggatgttgatgaagagactaaacctgaaaatgatggagatgctaagatggtagacttggagaatgagacagctgctactgtctctgagagtggaggtgatggagctgtagatgaagaggaaattgatcctttagatgcttttatgaatactatggtattacctgaggttgagaagttttgcaatggtgctcctcccccagcagtgaacgatggtactttggattctaaaatgaatgggaaggaaagtggtgaccggccaaagaaaggttttaataaggcccttggtaggataattcaaggtgaagattctgattctgattattcagaaccaaagaatgatgatgatccaagtttagacgaagacgatgaggagttcatgaagagagtaaagaagacaaaagctgagaagttgtcccttgttgaccactcaaaaatagagtatgaacctttccggaagaacttctatatcgaagtgaaggatatctctaggatgacacaagaagaagttaacacttacagaaaggaattggagctgaaagttcatggaaaggatgttccaagacccataaagttttggcaccagactgggctaaccagcaaaattttggatactatgaagaagcttaattatgaaaagccaatgcctattcaaacacaagcactccctatcatcatgagcggtcgagactgcattggggttgcaaaaaccggttcaggtaaaacccttggttttgttttgccaatgctgaggcatattaaagatcagcctcccgttgaagctggtgatgggccaattggtcttgtaatggcacctactagggagcttgttcagcagattcacagcgatatcagaaagttttctaagccattgggtataagatgcgtccctgtgtatggaggatcaggagttgcccagcaaattagtgaacttaagcgaggtactgagattgttgtgtgcactcctgggagaatgattgatatcctttgcacaagcagtgggaaaatcactaatctgcgaagagtcacatttttggtaatggatgaagctgatcgtatgtttgacatgggttttgagcctcaaattactcgtattattcagaacattcgaccggaacgccaaactgtgcttttttctgccacttttccacgccaagttgaaactttggcacgtaaagtcttgaacaagcctgtagaaatacaggtcggtggaaggagtgttgtgaataaggatataactcagttagttgaagtcagaccggagagtgataggttccttagacttctggaacttcttggggaatggtctgagaaagggaaaattctggtctttgttcagtcgcaggaaaaatgtgatgccttgtatagggatatgattaaatctagttacccttgtctgtctcttcacgggggtaaggatcagaccgatcgtgaatcaactatatctgattttaagaacgatgtctgcaatttattgattgccacaagtgttgctgctaggggtctagatgtgaaagagcttgagttggttgtaaactttgatgcgccgaaccactatgaagattatgtgcatcgcgttggcaggacaggcagggcagggcgtaagggctgtgctgtgacatttatctccgaggatgatgcaaaatatgcaccagatttagtcaaggccctggagctttctgagcagccagttcctgatgatctgaaagcacttgctgatgnnnnnnnnnnnnnnnnnnnnnagggtattgagcaagctcatggaactggctatggtggtagtggctttaaattcaacgaagaggaggaagacgttagaaagcagcatagaaagcacaagcaaggagtatggctttgaggaagacacgtctgactcagaagatgagaatgatgt

SEQ ID NO: 5666 - DNA, 1204 bp, Arabidopsis thaliana landsberg
aactccctgagttatatctttattcacaacactccttccaccgttctgtttctccacaggcttgttcaagactttacgtgccaaagtttcaacttggcgtggaaaagtggcagaaaagagcacagtttgacgatcaggtcgaatattttgaacaatgcgagttatttgaggctcaaaacccatatcaaacatacgatcagcttcatccattaccaaatatgtgacccttcgtagattggtaatttttccactgcttgtgcaaagaatatcgatcattcttccaggagtacaaacaacaatctcggtacctcgcttaagctcactgatttgctgggcaactccagatcctccatacacaggcacacatattatacccaatgccttagaaaactttctgatatcgctgtaaatctgctgaacaagttctctagtaggtgccattacaagcccaatcggcccatcaccagcttcaacgggaggctgatctttgatatgcctcaacataggcaaaacaaagccaagggttttacctgacccggttttggcaaccccaatgcagtctctaccgctcatgatgattggaagtgcttgtgcttggataggcattggcttttcatagttaagcttcttcagagtatccaaaattttgctagttaatccagtctggtgccaaaattgaatgggtcttggaacatctttcccatgaactttcagctccaattcctttctataagcgttcactgcatcctgtgtcatccttgagatatccttgacttcgatataaaaattcttccggaaaggttcatactctattttggagtggtcaacaagagacaatttctctgcttttgtcttcttaactctcttcataaactcctcgtcgtcttcgtctaaacttggatcatcatcactctttggttctgagtaatctgaatcagaatcttcaccttgaattatcctaccaagggcggccttattaaaaccttttttggcttggtcaccagtttccttcccattcattttaaaatccaaaataccatcgatcacaatattgctaagcttttcaacctcaggtaataccatagtattcataaaagcatctaagggatcaatttcgtcttcatctgcagctctgtcacctccattctcagagacagtaacagctgtctcattctccgaggcgaccatcttggcatctccacca

SEQ ID NO: 5667 - DNA, 4372 bp, Arabidopsis thaliana landsberg
atcggcaaaagaaatgacatgcctcagagtccaatcttggaagttgagatctttgatgtatgggggattgattttatgggtccattcccatcttcatacggtaataaatatatactggtcgccgtagactacgtatcaaagtgggtcgaagctattgctagtcctaccaacgatgcaaaagttgtgctgaacttgttcaagaccataatcttcccaagatttggagttcccagagtagtaatcagtgatggcggaaagcatttcatcaataaggtttttgagaacctcttgaagaagcatggagtaaagcacaaggtcgccactccctatcatccacagacaagcgggcaggttgagatccccaatagggagataaaaataattctggaatagactgttgggattacaaggaaagactggtctgcaaagctagatgatgcattatgggcttacaggacagccttcaagacccccattggtacaactcctttcaatcttctctatggaaaattatgtcatctacccgttgagctcgagtacaaagcaatgtgggcggtaaaacttctgaactttgacataaaaactgctgcggaaaagcgattgatccaactcagtgacctcaatgagatccgtctagaagcttatgaaagttctaaaatctacaaggagagaaccaagcttttccatgacaagaagatcatcactaaggatttccaggttggtgatcaggtgctgctattcaactctcgcttgaaactctttccaggaaaacttaaatccagatggtctggcccaatctgcatcactgaggtccgtccttatggagcagtcactctagctggtaagagtggagattttacagtaaatggtcaaaggctcaagaaatacttagcagaccaaatccttccagaggtgacattggttcatctccaggagcttcttgatgattaaaggagtaaaggagtcaagctaatgactttaaacaagctcacttgggaggaagtcccatgactatccttgtaaataatttttactttcttgatatttttgatttgttttagttgtgtttgtggttttcagagacaagagaacaacgcggagatagagtaaaaattcaaaacttttactctacagaagacctggagatcgagtgtacagcccgttggagtacaaaattttgaaaatcttctgttgcacctggagaccttgcactcgagtacattggtcgagtatgtgtgatgtttaaaacccaaaaacttttaaatcatcattttactcgaccaacagaagctacagagacttgcagaaatttcctgcagtttacagtaggttttctgcaaattttctcagtcaacagagtgtgggccacgcgctgcggataagctggagagaatctaaaactcaacctcaaccactctttttgaaacttcactcgacttcaccaaatccgctcgacctaccacttttcatctcaccaccgacactccaatctctctacaccacgaatcgccgtttaaagagctactcgatccagacaatttcactcgacctcgtagaatcactcgacctctgcgccgccgtcaccagttcattccctctgtcacccgaccagaccacttcactcgattcctttgatatactcgaccaattcatccacatcaaccgccgtctctttcaaaagaagttactcggcttcgataccgagtctcgtagctcactcaaccgccgggaatcactcgaccttcccaacgccgccgcattgagtactcctcctcgtcacctgtcaaagtctcagggttcaagctttcactcgacctcgagttttaactcgccctctacaactgctactcgacgtcttgttttgaaatcaacaaaacactgaagcactgttatagagattactcgacctctagactccaccggctgaactcgatatccacaattcactcgacctccaggaacagctcaggttactcgagtacagaattgtactcgatcaattaaatctatttcatttgagactaacctattgacatttgagctttgagttctaaatttctacaggagaatcatgagcaattacagtggcagttcttctgttaatcctgactacaacatggatgagacagagtcgtcatcttgaaggccagagagggaacagagagaatatgaaagcttcagaaggaaaactgagatagcccgagggaagagagcgatgacagagaggtatgagcttatacacgaagatctggaagacgagtacatgcctgaacagactcgcagagctaccaaacttctgcacaagactgacgtattgcctgctgaggaatatgttaggcttttcaagctgaatgagttctgtagcacgaggtatccttgctcgacctcacttgcacaactcggattgttggaagatgttcagcacttgtaccaaagttgtcatctggacactctgatagcttatccttatgtagcgtatgaagatgagacaatacaattcctttccacgctacaagtagagctctaccaaggtatgacctctgatgagttggattgtgaaggattgggattcttgtgattttctgtgtatggtcatgagtataggttatcaatcaagcgcttggaaggattgtttggctttcccagtggaacgggatctaagcccaagtatgacagagaagagttgaaagacttgtggatcaccatcggcagctctgtaccgttgaatgctttcaggtcaaagagcaatcagatacgcagccctgtcatcaggtacttccagcgttctgtagccaacgtactctactcccgagagattacagggactgtcactaactctgatatggagatgatcgcaatggccctcaaaggaactctctgccaaactaaaaatggcatgtccctccaaggtgaagtcaatgacacacctctctctatacttcttctgatccatctgtgtggatacaaaaactgggcggtcagcaataaccgcaagagagcacgaggcgctctgtgcataggtggcgtggtgacacctattctgatagcttgtggagtcccactcatttctgctggactcgagccgcgagcaatggatatcgagcacctacgtcactgcgaattcctggagtttgcaatggttgacgatttccacaggttcaggtttgagcactctatagacaggagagataacatccttctccctagccctgaggtcacacggataatcgagggagataacattgattttaggcctgagattggacgcctctactatgagaacgctccaccattagatgaggacgatcttcttgaagaagctgcttcggatgggatggatgaagatggagcagtgaagttcgacactagcatgtatcactttaaagagcatgtacctctagcgagggagagcaagagcttgagtgaggctcacagaaacaacatcatgttgtagaagtggtgtaagaaacatgataagttcatcatcaaatgcctaaagaccatcaaggctctgaaggctatgataaacttcacctcttccactacagctattccgcatggacctcctcctcaagacatgccatcgaggagatatgacgagcctgagccaagtcagcacaggccagagcctagtgagcaaaggatctcataagttccagcgaggcattcatcatacgagccttgggagtacgggaggaagaagaaagttgtgctcactcgatctagcagcaagaatacaagacttctccagactagaagtttacgcgacagcggtgctggccgcagcagaagacaagaggtcgagtatcttcgttgcggtgttggccgtaagagaggggatgaggtcaagtaccctcaaggacctggagctgaaacagaacagggcgactcttcaatggcctgggagcaatcacatgcagctattgacgaccaactccgctccttcttcgactgaggtaagcacctcacttcaccattgtattataccatctcttgtttttattttgtttatgtgatgatttttgtcctgagtactctcttccaagtttggtcacatagtgactgtttgatttaagtttgggggagggctcaggaagtgtgtgttgcattttatataatcttgaatctgcattcatctacggcatagaaaaaaacaaaaaaaattgataaatttcagaaaatgatttcacaaaaatagagtgttcatgttgttgcattgcatttaggatcgagtatagagtgtttcatttaggattattgcatatgcataggggctaatgatgagatagaaatgtaagaaatttggttcaccagataaactcagtgccctcgttgttagttgtctgatgcgtagtcaatgaaattgaagtaa

SEQ ID NO: 5668 - DNA, 571 bp, Arabidopsis thaliana landsberg
gaacagcggtgttaaactttttttgtattttttcctccagtggtgttaagcttcagacgaaggcaagagttaatttagttgaacaaagaaaccatcttatattcattctggatatggcgtttagttatactacaaatggtgaataacaagaaaagctaaacaaaaacaagtaaaagcattctcagaatcaccaaagttaagctcatgaatctttatccttggataagctccatgagagtctgcttataacattttcgtctactattttgtagtggtgagacaaccgcctgtgaatcgtcccgcaacacttgtctactttgctttgatatttactgtacaaagccggtattgttacagataggatggtccctgttcacaccataaaaagtataaacttcatataagaatttggttcactgagtttaaaacaacaatgtcgcaggaactaaaacgagatcaacaagccaacgtgggggatgaaactgaaggatcaaaaaacatagaagcttttttctttcatttgcatttaaggatcaagttactaaccgatgtaaagaagagtgcagagaga

SEQ ID NO: 5669 - DNA, 517 bp, Arabidopsis thaliana landsberg
gtatctagaatatatgaataatcgttatactttatcttaagataatattgatattttgtattttcttggttagtttacagggaagccacttccactaacatgcactcctatgaaatttggttcttggatgggaggtgatagagatggaaatccaaatgtcacggcaaaggttagtcttttgatattttacgatttgaactcaaaaccaaccggtaatgaaaattagtccatggtcgttattatattactctaggtcacatctcacttgtaatatgagattcttaacatttactttttgatgaagcagatcctttaaaactgcaatcacgaaaatttgattgtcacatattctcttgatatataacacacacttgaatgttgtgatatcatttgtccaggtcacgaaagaagtatctctcttgtctagatggatggctattgatttgtacataagagaggttgatagcttaagatttgaattatctacggatcgatgcagtgataggttttcaagatt

SEQ ID NO: 5670 - DNA, 5446 bp, Arabidopsis thaliana landsberg
  unsure (1)..(5446): unsure at all n locations
cttcaactagaatttcgagagacgtaatgaaacctcatgtttttcttatgcgcggcggggggaggtgtggtgactgaccttactgtcccgccacctagatcgagttctgcaaagactaggtctatgcgttctctcctagcaggtgggggagagtaacttccatcgggtgttcgttctcgttttttttgcttgggagtttgctcctcctcctgctcgtcgggaggaggggtttcaactttggggtttgaaccttttttagtctttccccacagtgcgcgacactcctcggtggaatgtactcttttcttgtggtacttgcaatattttccgaggtcaagttctggactctcgtgctcagctgcctcgtctattgcgaataaggtatgatgcccctgcgtttggtttcctttttgaagggtttcttaattgcaaggggagcattttgcgttttagattctttgaatcgtaaggccagcacagcgagctcctcttcggctttggcgaagtggagagctttgtgaagagcatcgtctaaagagactggttgcctaacagtgagttcttcacggaacctagaggagaaccaaaggccgttacgaagggctgctatggctacctcttcgtttaggtttgcaattttcgatttgattgctttgaagttttcgacgttagatcgcagggattcgttctgaagttgagtgagattccagaggtcggcttcggacgtcctatgtttgataagtatcgaatattgttttaagaaagcggcggcgagctggtcgaaggtatcaatggagttcccttcgaggctagtaaaccattcgagggcgtgacctacgaggttttctgcgaagaaacggcaatgacctgctttgttttcttcatctgtcaggtacggtcgtgttatagcgaaacagaaggatctcagatgagcctttgggtcgctcgttccgtcgtactccgggaaatggagtctctcgacgtctcggaggcgaaaaacgagcgatcctatccgtgaacggggtgcgcctggttttttcaatcacgcgatctatgtcgggagcatcgctcactgctaggtgcattcgagaatgcatttgagccatgtttgcgtttgtttgagctgtgtaattgcggaatgtttccatatccacgacgttacgcggatcaaccggtgcttggggactgttaaggaggtcgcttcctggtatccggggaacggatggcggattagcgatagaggtccgatgttgcgttgagttcctgggaatgcgggaactggatgcggttgtttggtttctagtccacgtgtacctagggggtgaacagcccatcggtaataaaggtggggccggtaggcttgggaaagcaggcgttgtgcttgtttcgtttcctcttgccaggttttcgacgagagccttcgcaggtgcctgtaaaaaggcgacctgccggttgataggatgtgagacgtctatcgaggcgaaatccagacgagttctcgaagtaggattagccgaggagacggtacctgtcaaatctatggggacctgggcaggaatcccagtttcgcgggaggggggggggggatatctccttacccgcgatatcgcgctctacctcatgtgccatgcgagtggaatcgcgtctctgctgacccacaattgcggcaaggttgcgatacgcaatttcttggtttttggttaagttgatcaagctcatgatcattgcgcagagctcggccaattcgctggcaggtcacggggggacctgattagataggatggccgagttatctccgtttggaggctgtatcgtgacgtttcgttctccgccccttgttggcggagggggagtgatttggtcagatccagaagaattcgagttttgggagatgttctccgtgtcagtgttatggatagcatcaacctaggctccgggagggagatccgttgggaggtgcccgtccgtaacgtcatcgtttgggatctgaactggtaagccagatctcgatgtgttggatgaattgggatccatgatcgttggtcacaattgatgtgttagtttcggtgttggaatgatctatttccgtccccacagacggcgccaaatgtgggttctgaaatccacattagagatttgtatttaagattatgacaaaggagggctagatcttcactgaaaccttgagagttatattgctaagaacgaatggactttttgtattgattttgacaaagcttttacaatgtgaaaggagattacaagtgtaaaagtatgtgtgtgaatgtaagcttaattgaatgtctcttccaagtcgtccttgctcccttatataggtctacgcacgtggtagctccaaccgggatctgcggagatcctcctgaatattcggcaggtcagttccgagatatcaggtctgctccgtgaatatctcctcatcagttcctaggttgttattcgtttatctcccttcatcaggtgaccgggcttatctggtccaagtacccattcgcgtatgtgggctcatcaattgcgtaggtcctctacttggtgggctttgtgggctggcttggtattttcgcaggtggattcctggaggggaatccagctccaacagatactcaggattctttcaaataccaattcaccctaatgatcaagaaaaaatcactttcacgtgtccttatggaacttttgcctataagagaatgccatttggtctttgtaatgctcctgcaacatttcagaggtgtatgacctctatcttcacagacatgattgaggacatcatggaagttttcatggatgatttttctgtttatggatcatcgtttgaggattgcttggagaatttctgcaaagtgttagcaagatgtgaggagaaacatctagttttgaattgggagaaatgtcacttcatggtacaggatggaatagttctaggacacaagatttctgagcatggtatagaggttgatagagctaagattaaggttatgacaagtcttcaagcgccggataatgtcaaagcagtgaggagtttccttggacatgctggattctacaggagattcttcaaagacttcagcagaatcgcaagaccattgactgctttactttgtaaggaagtcaaattcgagtttacacaagagtgtcatgatgcatttcagctgataaaacaggccttgatcagcgcaccaattgttcatccaccagattaggatttaccttttgaggtaatatgtgatgcgagtgattttgcagttggagctgttctaggacagaggaaggataagaagcttcatgcaatctactatgcaagtaaaactcttgatgatgctcaaaggaattatgcaactacagagaaagagttgttagctgtggtgtttgctttcgaaaaattcagatcttatctcgttggatccaaggttattgttcacacagatcatgctgccttgaagtatttgatgtataagaaggatgctaagccaagacttttgagatggattttccttcttcaagaatttgacatagaagttagagataagaaaggagttgagaatggtgtagctgatcatttgtcacgcattaggatcgatgatgatgtccctagaaatgatttcttgcctgaagagaacatttacattattgatacagctgaagacgatgactacaaacgtgacaggttgcaggatcgtgcttcagtgtcgatcgacaccccttctatgtcgatcgacactcacatttcagaggaagttgacatttgtagttgcgcgatggtgttgatcgacactggaactgtcgatcgacacccttctgaatcaacaaaaaattggtcaccaactgagaattgcgccgtcacagcggtcgagaaggactacccatggtatgctgatgttgttaattacctagctgcatatgtggaacctataatttcacagattactacaagaagagattcctaagagagattaggcgatattattgggataaaccttatctttataagcattgttctgatggagtttataggagatgcattgctgcaacagaggttcctcatatactatcgcattgtcacagctctaactatgatggtcattttgcaaccttcaagacagtatccaaagttcttcaagcaggcttttggtggcttacaatgtttcgggatgctcagaagttcatatcgcaatgtgacccgtgtcagagaaggggaaagatcagcaagcgtaatgagatgcctcagaaatttatcctcgaagtcgaagtcttcgattgttggggtatagatttcatgggacccttcccaccttccaacaagaatctctacatcctagtagctgtggattatgtccccaaatgggtagaagttatagctagtctgaagaacaattcagcggttgtcatgaaactcttcaagtctatcatcttccctcattttggagtgccatgcatagtcattagtgatggaggtaagcatttcaataacaagattcttgcaaaattgcttttacagtatggagttcaacatcgagttgctactccttaccatccacaaacgagcggtcatgttgaagttttcaacacacaaatcaaagagatttttgagaagaaagttgaaaaatcgaaaaaggagtggtcttacaagttagatgatgcgctgtgggcttacataacagctttcaaaactccgcttaggaccacaccttttcattttatatatggtaaagcttgtcatcttccagtgtaataagagcacaaagcagcttggnnnnnnnnnnnnnnnnnnnnnnncatcaaatcggctggagaaaggagacttattcagttgaatgagcttgttgtaatacgaattcacgcctatgacaactcgaagctctacaaagaacgcacaaaagcttaccacgacaagaagatcctcactcggacctttgagcctaatgaccaggtacttctttatgactctagattgacaatatttcctggaaaattgtcttctcgttggacaggtccctacacagtccactcggttaggccatatgaaacagtcattctcaaaaacaacaatggaaaaccatttgctgtgaatggacataagtcaaacactactgggctgaagccgagattccagtagaaaagcccttggatcttcaagactcacctgttgattaagcaactgcagagtgaagctattgactataaacaagcgcttagtgggaggcaacccactggtaagtatttctcctttttatttatttcattcatttgattcttaacttaggatttttgattttataggaccattgaaaaaaataataaaaataatgtcgaccaaaaacgcgaaccctcatttttcaggtaagtcgttttaacctaaaacttcatctttttcatttcatttctctctaaaatcgctgaattcactaaaatcactttagatccttca

SEQ ID NO: 5671 - DNA, 3603 bp, Arabidopsis thaliana landsberg
gctataagcaaagagcttgggataaaagcttggttgtggagtgttcaggtaaggaaacaagaatcagcaaatgatcttaaagaaaaaacgttcctcctttgtttcatcaaatccaacaacttcagcgtcatctaacaattccgctatagatggaacattgggaaaaagaagagtttccatctctcctatatgctaaattcccagcaaacatgcaagagcgcacgttcaccagacttgatgctggaaacaccaatagctaaaccggccattacttgtatctctgttcatagaggacatttcactccttagtttttaatcttgtttaaagctctgtatactaacataaacatgcatgaatcagctttaaagcaacaaaagaaagaaaggaaaactcaatttctttcctcccaaatattctttttcattaggttcacatgaaacgcaagatttaagacctcagctttactatcaactttaggtaggtaagactacctaccattttgagaaggctcacaatgcaaaaatggaactcaccatccttgactgattcggtttcagctccagcaaaccaaagtgtttctaataaacttggccgtgcattgaaccacggagttccaaaatcaatgtctgtttaaatcattggccccagaatttgaactacacacagagtcacagacattcattacgatggttgaatgaaatggtcttgactaagaagtaagaacaactatgcacaattgagaaactattagctcgatttccagaaactatcactatcgtaatataaaagtcccaggatcgaccaaatcggacgagaaagactcaatgaagaaaccccataaaaacatggtcgaagtcagtataaacaaaatcaagagtttggtcgtcgttgtggatttggaggagaggagagtgagcttacagagtatgagaagcgagaagctcaggggaagtgtgactcgtcgtcgtcgtcttcgaagtcactcacgaccatcgagagatctgatgattttggtaaaatatcaaaaaaggacttcaacttttcacttaagtcaaaacaagcccctataaataaattctgttatttaagccttgaggcttgagctgcgtctttgttgttcactaggagagttatttgagcggataatttactaaaactgaatgtccatctcccaaacaaacattttacgttttcatgttatataaaagaatactatatcgttagctagaatattgtagttaaatattaaagtagtgtattttacattttgtctgaactttgtcatctttgtttcatgaatggtcaatggtgaataatggggagagaaggaacgtgaataaagggatccacaagtgtctccaccattttctgagtaaaaacaatcacatcctttcattttcaaacccctaaaccaaattgtaaagtcagaaaaaaagaaaaaaagaaacacacatacaaatcgaaaagcttttcttcatctcccacgttacaataagccctaagaacgaataaggcaactacagagagaaaagatgaattcaactacaacaaaaaacgtttgtggagacaaatggtaccttaacctagacaggccagaagaggcattgaagattcttgtattcattgccattttcgtcgtccgaactctcctccattatctcatgaagcctgtaggccaaccttacctcaccaccgactttgctgtatgtcaaatatctttttgttctttgtctatctcttttgatttctatattaactcaaattttctatgcatcagatagggctaattctaggtaatattccaaggtttcgaggggcattctcggggccttactctataaccctcaacaacataatagaatttggaatgatctgccatatgtttgtcatgggtctagagatgaatccaagcgttcttctcagaccaccaaccaaagatgcattcattgcctacacaagcatgatcacgacctttgttctcgcctttgtcacaactcctttcctccactataccaaaacttctccttacattttctccctcgccctctccctcatggcctcaagcaccggttctcctatcctaacccgcgtcatcgccaatctcaaaatcagaaaatccgatcttggaaaacttgcatcagccgcaggtgtccatacggacatgatctctaccttgctttactgcttcggcttcattttcttccctacggagaaacctctcgctcgtcctctccacagattcttcagagccctcctcatgttttgcctcttcctcgctcaggtcactttcacttccattgtatccccaatctttcttaattgggtcaacaacgagaaccctgaaggtaaaccactcaaggggtcacaccttgttatgtccctggcatttgtcgtcttgatctgcagtttcccaacttggccacctgaatcaatgtacaacccaattctcagtgcattcacggctggtctcttccttccaaacaaaggaagaatgtcgaaatggatcatcaacaaaatcaattacttgctcagcacggtcttctaccctatcttcttcttctgggttggattcataatccacatgagaaactttgacattactgacaaaatggcgtgggtaagattcttttctcttcttggcactgttatagccggaaaagtcaccggaacagtcttgtgtggtttactactcggttatcatgtcccggaaaccgcatccttaggactgcttttgaccactaaaggccattttcatgtctacttggcagctttagccattcgggtaccatcaagctttctctttatgttttgttatttaagctatcatcaaagtaagatctttactctctttctttttcgtttgatgcaaatgcagactaacagggtgaaaagtacgaccggtgcattgatcatatttatcattgtcttcacggtggtctactccccattcgtggtcatggacatcatcaaacgcgctagaaagcgggtgcctgtgcacatcatggcgcttcaatggctcgatccaacaactgaacttcggatcttgattggtctccacggtccccacaacattggttctacgctcaacgttatggagatctgccatggtggccgtgagccgggttccatattctatgcgactgacatggtggagttgactgatgagattgcagccacgctgaagaagggcggaggagccggtcagagtaatgattcagtgacggtaacggataggtcggtgacggaaatgagagagagtataacggcagctgtgaatgggtacggagagctccgcaatggacaaggtgtgacagtgcggcggatgctggcgttgtccacgtttgtgaccatggcccatgacgtctgcggtttggctgatgaacttatggtttccattataattctaccgttccataaacggctgaatcctgatggtactctcgatgctggtcatgctgggttccgtcatgtgaaccgcaaggtaattgttccatctcagtaatactctgtttctttcagttctcagagagataatttggcatttgtgtgtgcagattctgaagaacgcaccatgttcagtaggaattcttgtggataggtcg

SEQ ID NO: 5672 - DNA, 4054 bp, Arabidopsis thaliana landsberg
aaactcctcatgctctttagtttttattattagtgctccaccaacctatcattaaaaggccaaattacatatattagtaggtgggaaagactatacatatatattattaatgtcctaaatttagacgaacaagtagattattcattgattcaatatatatgatttaaagccatgaattgcatatttaaccgatttaatatctcttctgcttttgaatttgtgctgtttagatattattgatgaattcgtgcaactccagcttaaggtatgtacaagctttaagcttatgtagtcttaaatcaaatatgtattatatatactaatttgttttagtacttcattcgtgttatttttaacgatttctccactactataacattttgtggaaagttttgaaaggtgattgagccgcctacatggaaaactttcagatattcatggtaaatgatctcactttatacacatcaacaaaacttatcaccaacctaatataaataaatatataaacaagaaacaagagagaagaagtgagctagcccactttgtttatacttaatattaacacggactagtaacccaagttgtatataaacccatcactccttctttgtcaatctcactctctcattatccactctcacattttcatttaaaacacacatattttcaatatggtaggccaaatgaaatcgtttctcttcttattcgttttccttgttctaacaaaaaccgtcatatcagctagaaaaccatccaaatcgcaaccaaaaccgtgcaaaaactttgtcctctactaccacgacataatgttcggtgtcgacgacgtgcaaaacgcgacttctgcagcagttaccaacccaccgggcctcgggaatttcaaattcgggaaactcgttatcttcgacgatcctatgaccatagacaaaaactttcagtccgaacctgtggcaagagctcaagggttctatttctacgacatgaagaatgactacaatgcatggttcgcgtacacacttgtgttcaactcgactcaacacaaagggacgttgaacataatgggagcagatctcatgatggtgcagagtagagatttgtctgttgtcggagggacaggtgattttttcatgtctcgagggattgttacgtttgagaccgatacctttgaaggtgctaagtattttagggtcaagatggatatcaaactctatgaatgttactaaaagagaccattaaatggttccagagacagagagaaagagaaagaggctgattcctttgaaactttttgataatttaataagtttaaaaggtgtgtaacaatcttatattggaattttatgttttctgttcgatatgtggtttgataattatgtagtatatgatttgttatgtcatgtgttgtttgacaaaccaaacacagtgttatacaatatcagattttgattactactgaaatttcaatctagctttataatggacacatgcatgcgatgatagtaaattgagtaggaaaaaatatttctacaacaccactagtcaatataattgtagtatctaaaattactatatgaagtattcctttgaaaaaaggatcgacttaccaaaatataaatgtctttggtcaaaattttgaactcttaacaacttgaataatctatccatcaaatcatatgttttaaggatatgatataatcagtgactcaaattcctaaatatgttttatcttacaaattcataaaaaggggagtcgtttgattcatgcatgttgatacataagagtgtttcgtgttatccatcatggtttgtgcttcaaggtaaagaaaacacaatcctctgttttcagattttcatggcgtctccaccaccgggacagagacggaacccaccacagaaggacctttcccggtgtattgttgaaccaccaaaacagacactgaagtagaaatctcatttgacacgatcaagtttccgaccggtcccagttctggacactctatcttcataaccggtaatcttgaaaccataggtcctttggaagattttcccaccaataaaatatcgcactcgtaaaattggcggataatctcaaccacttcctccgttgaattcaccgtcctctcttcaaatctagctgcattggcccttttcttgattgctgcaaggaattgctcgtctaaggaacatagtgatgtttcttgcgcttcaagcatatcaaaccttgcgctctccggaccagagataaccacaacggtcaagttaacgcccggatgttcagccattcgtaacccgtaaaccaaagcttcacgatcatcgcaaccgccaaagaacagaacattgacggaaagtgaaaagttgctcgaagctaccggagaattgttgtcgccgagaccacgatcaaccaaaattccaacagaacacggtgaattctcaagaactcttttgttaatcccctgatactccgatctcaccgtttcaaattctttctccagagatctccattgcttatggaacggcaaaatcacaaacgctgtgcatttactatcagcagagctacatatatcctcatgaattgttgacaacggtgaaatcgcggtcacagaacgcaccgaaacgctacttagcttactagacgcctcgaacgcgaccgtaacggcactagaattctctcttttcttgttccaaaagggcaaaccgttgcttctcaccttttgaaccattcgaatagaagaaggtctctcggagagttgagttaaatgcataacgtaaacgcaaaatctttctttggtttcgttgcttccacgagtagcttccattattttcatcatgggatcaatatctttactgctttgaagacataccaaaaccttaagctgctgcatcttctcgccttcttcatcattctcaatcttgcgtctatgtttgcggttcttgtagctgacgctactatgtgtttgtgttgtctcgcttggtttgtataacgccaagactattggcgttgtgatgaatgttgtgaatatcgccatgagaaccataattgcaaaagtctgatcgctcaaaacctgcgttacataaatcctaattaaatccttaactatttgattaaaatcatttcagcttgtaattatattgttttagaatagatgaaagtacctttctgtctttgccaatgttgagaacaattagctccactaaaccctttgtgttcattaaaaccccaagaacaaccgattcacgaagccttaccttgcataacaaggcaacactcacagtcccaacgattttgccaaaacaagccgtaacaatcaccaacgcgagtcgtccccacgatttcacaccttgaatcgtagttatatccgttttcaaaccgctcataacgaagtacagtggtagaagaagacccattacaagatcttcaatcttctccacaatcgcgtctgagaaatgtcctttgggaaacaaaacgcccatcacaaacgcaccgaaaatcgcgtgaatcccaatggcgtctgtcgcgaaacccgcgagtagaaccgcgcaaagggcgacgcaaacgtacatttcgcctatgggttcgccttctgggcaacgccgagagatgaatttgaaaattcgcggtacgattaaaaaacacgcgatcacaaacgcgattccacttaacagaacccagagaggaacaagcggagaattcctatcgccggagagagatacagcgagagctaggagaacccaagccgcgacgtcgttaattgcggcggcgttcattgaaatccggccgagatcggttgtgagtagctttaattcagcgagtattctcgccaaaactccgaaagcagtgatcgagagcgcgactcccatgaaaatgatgaacggaagtactttgctattgtcgccagaagaagaagcttcagggaaagcgaaggaggtgacaatgcccataccgaaggggagaagcattccggcggcggcgatggaaatcgctttcttgccggtacgtcggagagatgtcagaaagatctcgagtccgacgaggaaaaggaagagaaggaggccgcgg

SEQ ID NO: 5673 - DNA, 1053 bp, Arabidopsis thaliana landsberg
cctttttcttaggctcttctttgggcttcgcaggctgtgcagctttcttggaagcaataggagggacagcttcagtctgtttgacatcacccaacactttagtgaagtttggttggttaaccacagtccagaagtacctctcaacatgaggaaattcagaggtaaatttcttggtcatgacagtagcaaatcccaagttcaagttgcagacagtgatgatatcagcaagggtaatagagtgtccgacaaggtaagtgttagacgtgagatgtgtgttcagagcatcaagtgctctcttcaacgtagagatcgcaccttcttcagccttcatttatataacactcacggatgagactatttatatagtgaaaagaatacctagattgccatcacaaagagtgaatgaaacaaccaatgaaagtcaaaaaagcttaccggagcactgtatggcataaagcccattcttgggccgaaccacctcaagatacttgcatagatctccaatgaagagaaatcaatccattgctcaatttgtgcctgcgaaaaaacaacatgcagataaccattgagaatactaacaaatagaatgacaaacaatagaagaggtgtcaatggattagagaagagtagcccccagggaaaaaacagctacttacatattcgatcagggaggatccgttcaaagagttgtcaccattcaatcggcttactgtattgagatatcaacagatccattaaacccaaacgacaacaagcaatcaaactagacactgagagacaattaaaggagaaagttatgaatgctttaccataacgggcaattgcgttgctttcaaatactgaaccctcgggagtctcaagtacaggaacctagcaagatcaataactcttggttagctgaaaaatagacttaataatactcagtccagaaatttagcaaacaccagtgatgacaaacctttccaatagggttcatcttgaggaacgcaggggttttgttagtgacacccatctgaaagtcagagggcacattgatctgcacaccaacgtact

SEQ ID NO: 5674 - DNA, 635 bp, Arabidopsis thaliana landsberg
  unsure (1)..(635): unsure at all n locations
gggttcatggctgttccgtggaccagagatcccaaagttcataatggacgaggtgtacgacatggagctgtatgagtggactaaggttgatatctcagatgaagcccagaaggagcgtgttagccagatgattgaagacgcagagccatttgaaggtgaggctctcttggacgccaagtgcttcaagtgagaagagagaatggtttggtacttccatttacaggttttgcagctggggctttacatatctttctatctgtctgtctcacataggggttttgctctgtgacgtgtcgcatagactgtttttttcttttctaatcgagtgtcaaggacaagtctttttagttctttgttaatgttcgcctctcgtccagaattgtttactataccagttttcgaaatcctgaccggccagtctaccctggcaataggcaatacatggtctggtttatttgttttacggtaattttgccttgattgattntctttgacgcgtttcggtcaacttatatacattggtctttgagttgaacatttagtggtaaagtctttttggcacatatatagaacatttttccaattttaaaaaattgctgaaaagcaaactcttgaagaatataagtctagttaat

SEQ ID NO: 5675 - DNA, 1735 bp, Arabidopsis thaliana landsberg
ttcattttattgtagatcacgtgattttaatgatttgttttgtagtaaactctatagttcgttaaagttaaaatattctctttgtacaaatgtgcttttttgtttttttaagtctctcgtagttcgttccgttatattctccgagtcagtccaaaaatggccgcttctgttttaattttgttttagggttccacagtcaaactcaaaaccaaacccaatggagcaataaccttttttttagttttataatcgaaatcaaaccggaattttgcatgtaatttgattggtgtcgttactttaaatctttaatccacaaaacaaaatttactcgattttagtattaaccgaaccaattatagtttattgaaatttaattttaattctatcaaattgcatatgtattcttgagttattttttataaaaatactgaaaccaactaaaataatagagtttggcggaacaaccgtaccaaatttgattgtatttggagtatcatttttgcaaacctaattagcctgaagactgagatatccttgtccactcttatgaagaaccaatttaacaaggtgaaaaccagaatctctaaaccaaacatggcatcaactgaaccggatcaggcagacttaaaccaaaacaaagaacaagcacacgtagcatgaggcaaaattaagcacatgcttgctttacttcaaaacaaaaaccagctgttcacagctaaaactacacaagagtcacaaacggcgaactatactacaaaaagactaagacttgcctcccttatataaaaccccccaacacataaggtcccaatgaatgatttcaattctctatcttattgacacataaacatggaccggtccactttcatcttatctctactcttcacactcaccgtctcgactacgaccctcttctctccggttttcgcaggaacgttcgacacagaattcgatatcacttggggtgatggtcgtggcaaggttcttaacaacggagagcttctcactctctccctcgacagagcctccggctctggttttcaaaccaagaaagagtatttgttcgggaaaatcgacatgcagctcaaactcgtccctggaaactccgccggaaccgtcactgcctactacgttagtgttacttaacatcataacatatataacatggccgtttttagaataacgtgtggaaagctccaattaaaaaaattctttcttaaaggataaatttttgaatatttcctatttcctaaagaaaaattatcaacagagattcttaaataatttgagacggtcatatacgatgttactaacttaccatgtgaaatttttattatttggatattaattagaacagtttgtgattgtgtttaattttccatgcagttgaagtcaaaaggtgatacgtgggacgaaatcgatttcgagtttcttggtaatctaactggtgatccgtataccatgcatacgaatgtgtatactcaaggcaaaggtgatagagaacaacaatttcatctctggttcgatccaaccgctgatttccatacttactctgttttatggaaccctcatcacatcgtgtaagtatataaagatacatacacaacttagaaacatgagttagtctttttgtttgttctaactataatttccaacctttgggctgacataatttttgtaggtcaaaaacacgttttgatcatacttatggctgatccgcaaatataaatctttc

SEQ ID NO: 5676 - DNA, 1088 bp, Arabidopsis thaliana landsberg
tgggatcaaacccagagtttgaaatggttgttctttgtcccctttgccttgtgtgtagacatttgtgtgaagtgtgtaaggttctccacttgaattccctaaaaactcgaaatctatctcgtcccatgttgttccaggtgatttcaactgttcatatacaaaaaaccatttcagatacaagaactttataatatgcaaaaacgaaaaacagagattgttttgttgaacttacgtaaagtgttgtgactgttcctgcggagtttccagggacaagcttcatttgcatggagactttaccaaacaagtactcgtttttggattggaatccagaaccagaggatttatctagagataaagtgagaagctctccattgttcttgatctgtccacgaccatcaccccaagtgatctcaacgtctctttggaaattagctgaaacagaggaggtgatgataagagaaagaaacagaggaagcaagtaagtgatcgccattttctagagattgtagatattcttgtattgagttagattggtttgtggtttttgagggtttatggaggaatgtatatatagtaagtgagtgaagaagatttttaagaggcggttcgtatagaggaaggttcgtatggcgaaagaagaagccgcgtctttgaggcaacagctggtgattgggccatcttgtagtaaaagcctgtgttttatttattggctttggaaatcacgcggtttttgtttagtaatgttacctttttttagtaattaattattacttttatttttttggtttcagatttaattggatttgggagttttttcctcagaaaaagttggatttgagagttggattctttaccaccggcttggaccgaccttgacagaggtagagttttagtctaatataaccaaattattctgttataaaccaaaaaaagggggaaagtgttgttttttaaaaagttaattaaaatatgataaaacttttgagattttttttatctaaaagtatttatacgattttctgacattattcagtggttgtccaattctgtagttcttttgttattactcttgagagttattattcact

SEQ ID NO: 5677 - DNA, 1812 bp, Arabidopsis thaliana landsberg
aaaaaacaccagaagaagactagtcaatattggttgcgacggtcttgtagaggcgttattatctgttagataatattactataaacagtgagggataaagcagaaatgcttctgtataaatactatcactacttttgatcaaaacaaaaaataccatcactattttacttgtgtgttatttcatcaccttcaccttcaacatcaaacatcacatctctttctcttttatctctttttctcggtcttcaaagagtttcttagttaccaaatcaatggcaggtatcaaagttttcggacacccagcttccacttccaccaggagagtcctcatcgccctccatgagaaaaacctcgactttgagctcgttcatgttgaactcaaagacggtgagcacaagaaggagcctttcctctcccgcaacgtaagtatatctatctatctatgtgttgttgtaagacaagagaccaactgttttcatgtatctggcctgcatctcaaatgttttgtgtttgaacttctttcctcttcagccttttggtcaggttccagcctttgaagatggagacctcaagctcttcggtatgaaccttttccatgcatcatcttcaatctcaactctgagttgacaaaagccattagagagcaaaatcactaataagaattggatttttttatttttattttgtgtagaatcaagagcgattactcagtacatagctcaccgatatgaaaaccaaggaaccaaccttctccaaaccgactccaagaacatatctcagtacgcaatcatggccattggaatgcaagtagaagatcaccagttcgacccagtggcttcaaagcttgcttttgaacaaatattcaagtccatctacggcttgaccacagacgaatccgttgttgcagaagaggaggctaagttagccaaggtccttgatgtctacgaggctaggctcaaggagttcaagtatttggctggtgaaactttcactttgactgatcttcaccacattcccgcgattcaatacctgctcggaactcccaccaagaagctcttcaccgagcgtccacgtgtcaatgagtgggtggctgaaatcaccaagaggccagcttccgagaaggttcagtgagaaatttctaaaaggaaaatatggttttgcttcagtcacagtaataatgctaagattaaataagcggctttctcattgcccaatttctcagtactttctttctgttgtatcctctgttttctttcagttatgtgagtgtgtgtgtatgctcttgagagtatctttggcaaaaactatttatctaatcttcaagctattctaaaataaatcaattagttaactaatgcaaagattgcgatgtcttaactatggagatactgactagtgagaatagtatgtaaggactttagtctggtggaaatcttactttggaacgtttctcctggcgaaagaagttgacttaagaagactttgaacgttcttatccttaaagtttccttgctttgtcatgtctgaaaatgacaagtaaaatatagacgtaagcttcaaatcagacaaaacaaaacacatcagatttctggacctattcacctctctataaataacagaaacggttagagcagcaagtttgtgtttttcaccatcaattttgtaccttgaccgccgtaaacgcagggtgaagaaagtccacctagtgtttatctccaactgtttgctcgtctcattactctgatgactttgtggctacccaaagaattgcgagtaaagccagccatatatttgcagactctggtcatcctt

SEQ ID NO: 5678 - DNA, 1062 bp, Arabidopsis thaliana landsberg
catactgagatatgcttctcttgcttgaatggcgtagtgatcccatgctccaagaaattcattgtggatgtgtccaatcaaaccatcaatcgaaggaagaggataatctattttactagcattgaattttctgaaagaagatgattttatcaaagaagatgtaatttccatagtgtatgtggaggtcagaaaccataacagaatactttgtttcttatctatctcttaaagtgataacaaaccttgagttgtttttcttattatcaacaagtactaagaacattaagaaattcatcaagcggtttttagttacgcaaaccgaggcaaaacactaatcaacctttaaaagcctcaaggtacttcgagcttttacaacctcatatatttctttctttatgttctctttctagctaaaccggatttctgatgtggaggatccatgaatatggcaaccgcagagcatactttccataatagcatatagtagataacaactctacgatgtattacgacttaagaagataagagccaaagtttagattgccatggatcgaattcgtttgtggattcgatgatatcttggtatttgaattttccaacaacgcttaatatgaacatattctctcctgtttcatgatttgtgtttcttccattatgtggtttttgtttccaaatttagtagtaggtgaatgtgcatgcggatatagagagaatgacgagtgctcctaggataggcactagtatccacatttcaaatttttttctaattagaataaaatggcgaaaataataaggttgataatttttgtttcataaaagatttagatatttgaaaattagccgccgaacttttctttagtattaaatttaatgtgagtggttagcttaattgcatatatagatatttaactttctccaataacaaaaaaaaaactcaaaacataagaaaagaaaaggcaaaattttagcaaaaatggaaaaaagtataaacaaaatttgatctaattatgttatttgtatttgttatgtaataggtcagattaatttgtctcgtggcgggtt

SEQ ID NO: 5679 - DNA, 2323 bp, Arabidopsis thaliana landsberg
  unsure (1)..(2323): unsure at all n locations
acctatttactggttatggttattccttgctctctaggaatgggaccaattccatggctgattatgtctgaggtactaattattaaaacatggtgttccttagtgttaaaatcacaactggaaattttaatactgattaatgttggtaaaacagattctgccagtgaatataaagggtttagccggaagtatagcaactttgttaaactggttcgtgtcatggttagtgacaatgactgcaaatatgctgttagcatggagcagtgggggaactttcactctctacgctttggtttgtggattcactgtggtttttgtgagtctttgggttcctgagactaaaggaaaaacgcttgaagagatccaagctttgttcagatgatcaaaacaagaagaggaagaagaagacaaaattttcactttttgctttctccattacagatcattcttttgtcccttccctgtgtctgtatttcatgctttgttcaatgtatttcttcttgacattgattataatttgtttatcttgtacaagcatatcattatacctttaaatttgattttttgtttttgtgtgtaatttttcggattctcaagattaatagcactatatttgtgtattcaacaatatcttgaattaagtatagaaaatcagaaatgcaaattttagtgttttggatccaaatgggaaagctaccatgtgatagaaactgctttgggagttttgttgtttggcgaacatgaaaggactatttccaatgcaaacggcggtcgatttgaaaaagaaaacaacaatataataacaattttaaaatcattctttatataacattcttggcatgtcccactgtccaatttgaccactcattaagaaatcagaaccaagtaaacaatactaaggtcattttcttccaaaagtaataaactaggaaaatatctagacaatttacagatagtaacgaaataatacgttacaagaacatgaaaatggtttttgtagttaccgttccttgtttatattctcaaagtaacggattcacatattcacaccattcaacacgagtgagtgtcagtgaaaggcaaagttggacaaacgaaagttttggtttctgtaatttaatcggagcaaacttcaataatagtaaacaaacaaccttttgtttaacaatgtccctaattttattctgtgatttcgtcattacacatctaagatctgaaaacatgagctcaagaactgtaactcaaatatcacaaactctccaaaacacataaacaacaaacacattgacattgtcagagatcaaatctaagggtttcttctctaagaaaaaaaacaaccatggattagtctcgaagttacacaataacagttcctcaaacgaagctaataacttaaagttaccggatacttgtcaatacaatcttcccaaggactgttgttcgaaggtttcacatgccttaatgcttcccaaatcgcgctattacatttaaatccacttccgaacgcgatttgccaaacacgattacctcttcgcatccttcccttcgcttcaatgtaagccaattcataccaaatggagctcgaagatgtgttaccaaatcgatgaagagtcatcctcgaagcctcgacatgaactggtgaaagctgcagattcttctctaactcatcgatcacagctcttccaccagcatggatacagaaatgctcgaaagcaagtttgaaatccgggatatacggtttcactttaccgttaaagagcttcttcacaactagagtcataaagaagagaatctgctcacttatcggtagaacaagaggacccaatgtagtgatattggttttgagagtttcccctgcaatcgccattagatctttcgacaacgaaaccccggttctccctgtatcatcctgctcttgataaacacaacggaaagcnnnnnnnnnnnnnnnnnnnnnnnnnntgactacatgtacaagcctgtacttagaccgtctcttgtccctcgacttgttcgatagcaaaaccgcagagccaccagctcgaaacaagcagttcggtatcaacatcgatttcttgttaccaaaataccaattctgagtaatgttctcagtagaaacaacaaccgcataagtgttcctatgtaccaacaacatgtctttagcaagatccacagcgataactcccgcgctgcaacccataccgcctagattgtagcttctaatgttacctctaagcttatacttgttcacaaaaattacagataacgaaggagttggattaaagagactacaattcacaacaaggattccaatatcctttgc

SEQ ID NO: 5680 - DNA, 565 bp, Arabidopsis thaliana landsberg
aaacggccagagattttcgcataagggtctcgagtttacgctttgaaattagtaatgtaactgttgttttaccttagcttgggcaatggcgtcatctacttcttttctaatttccttctccatatccttaagctctttctcggttgctaggtcatgagatagtaccagcttctttattctctcaattggatcccgttcctgagtcatatagagtagcacataaatgttttgacttttgagatttcatcaatagctgagtcctcgaccaagaaatgatttatcaggtaaagagactaacgaacctgcctcacaccagatatctcatctcgggtacggtatgtgctcccaggatcagacatggagtgaccgtggtacctgtatgtgtccatctcaagaatctgtatagaagaaacgatgtattaatgcttctgtaatccatatgataggaaagaatcaacacaggaaaataaattggaaaccaaagctactacttatatgaacaactgcgatatcaaaaacacacttttttgatatccactgatccaagcgaatttctattgcaact

SEQ ID NO: 5681 - DNA, 3373 bp, Arabidopsis thaliana landsberg
ctctcggcggaggagaaacgcagccgaaggtgattgatggctaagatgctggtgatccatgattcacgagtaagaggcatggatgagagatgaagagaagtctcttgtttcaccaaaacggagagcaaccaaaaaaaaaggtgaaggtttgcaattgctttcgctggagctagccatcgaagtagtcggaatctgagtttgattttgtcatcgaaaggcaagttcatctctccttgtcgagaacaagagagctctctggggaaatgaggagacgatgacaaacaggaacgaaggcgtttgttcatcggaggagattagaggcgaagatggctgtgatgtatcatgaacgagaggccaagatgagagacaacgaggatgtctcgattcgccaaatttgatgaccggcgagaaaatgtttggcgtagaaggaggagagtcaccggaggaggatgatacactctcactgccattggctttcatgtggaagggcacgagagctggcagagtcgcagggaagtatgagcagaagaagaatactctaagtggctgagagactctaattggagaagagggttcgaagtagaatatgtaatgcgttgtcgtttcttatgtgtcgtgaactaaacctatgtatttaaagggacagtccatcttagggtttccttatgcaattatcaatcaataacaattatcaactctctttcccttcttaactcttctttcctcatctaaatctgatctaagtctcaaatcgatagtcggggactatcattggtatcagagccatggctcaaagaaacaacccgaacaatccaagcctagcttcacctgagaagacgctaatggtggaggcgaggttggagaagactgaagccgtgtcgagtgacttgcagaagatgatgatgcagttgatggctaaccaggagaagataaatcagtggttagatcaactttgtctgacgaatcaaagtgggggaagtcgcgacaatgtgctgacggtggaggagacacctgggtttacgacgccggcggagagagagaggcgtgacgcgctcttacctctcccgaagcttgctataccgtaaaactcggtggaggccacgattcagaccacgaggacggaacctaggggtgagccgcagacccctaaggtggaatcgcctggtaagctcatggatctgccagcttatgactgtcagaccccggaggactggatctttaggatggagaagtgttttagggttaaccagacacctgaagaagagaagcaggaacaagccctagcttgtatggtcggaggtgcagtgcgatgggtaagaaatgttcagttgagggacatactaagagactggctagatttcaaaagcaagctgagaaagaggtatggagcaacgcctagaggtaacatgatttggcagatgcttaagctgagacaagaagggactatagctgagtatagagatcactttgaggaaatgtcagctgaggttcctcatgtgactttgaggaaatatcagcagtgtttctgaatggaatgaaaaagagtttacaggatcaggtgatgagaaagagacctatggggatggatgagattgtggatattgcgaaggtgatagaagagctggaggctgagaaaccctatgtaccgaaaccgtttgcaagaaccacttcggcaccggtgttggctattcagaacagaagttttgggcaaaactcgagggccaatcaagagtacagcccaaccaggagatcatttaaggtaaactggagcagtttcacgaatacagagcctcgtaaaggagtccttaacccatgtaggcattatagagaaagttttttcatggggcatagatgcaagggaaatcataggtttaagtgtctggagttggaggaaggcaatggtaatgaggagatggaggaacaaaatgacgaagaggaaggtaacgaacaaggagaggtagtggaggttcagggaatgcaaaggctgtctctaaggtccatgactggattcgatgggaagtcagtgcgtatgaaagcaagaatatgaaaagtggagttcattgtgttaatagattcaagagccaccactagcttcatcagcccaactctagctaagaagtgtggactgcctgtgattgacactaaaacttttggggtttacgtgggagatggacgagttaaaacgggacagggaagatgtcagaacattgtggtcttagtgcaaggtgtggagattgtggaagagtatttggtgtttgacttgggtataactgatctggttttgggggtacacatggttagagaatctaggggataccaagattaattggaagaagaaggcgctgagtttcaaggttcacaatgagtgggtgacattggtgggagaccttagtttgcagaagacaccaatgaccttgaaatcattggagaagaatatgatggatgtagagatgatttgtttgatggaattgagcaccttgtttgaaggaactgaaccaccaccggaggagtcaaatgatgaagagccgaaaggtgttcttaaacagtactctgatgtcttccagatgcctaaagggttacccccaacaagaaacagagttcactccataaacctgaaggagggatcgccactaatcaatgtgaggccttacaggtattcttacacacagaaaaacgagactgagaagttgatgggagagatgacagaagcgggaatcataaggccgagtgtgagtccgttttctagtccagtgctgctggttaagaagaaagatggatgatggcgtttctgtgtagactatcgagctctaaataaggcaacaatccttgacagatatccaattcctattattgaagagttgttggacgagctgaaaggagcagtagtgttttccaaactggatttaaaatcaggatatcatcagatcagagtaaaagcatctgatgtggagaaaacagctttcaagactcatgatggccattacgagtttctgattatgccatttgggctgacgaatgcaccatcgactttccaaagtatcatgaatgatgttttcaggccctatttgcgtaagttcgtcttggtattttttgacgatattctagtgtacagtcctagcttggaggaacacaaaaaacatttggagatagtgctagaagtcttgaggcagtagagattttaagcaaatgagaagaagtacagtttcggatgtcagaaagtggcttacttggggcatgtgatctctgacgaaggtgtgtcagcagacccacagaaggtggctgcaatggtcaaatggcctgaacctaaaaacgtgatggagttgagaggttttttgggattaactggatactacaacgatttgtagggattttt

SEQ ID NO: 5682 - DNA, 1648 bp, Arabidopsis thaliana landsberg
gatttgctcgcttccacaggcatgctccgactttttttattatcttaaccccgggatctttctggtgaggtttttagcctcaacttgcacggtgggaacacttgtgacatcgctgacaggaccaccatgcactgagcactcacctctgggacctgccacaatgccaatctggggagtcccactagtacgtgataccactgctgtcaggagaagctgcatccagagtatgtagactacaagatgcgcgcttctcacgtttctctggcctggaattcataatttcatcatcgttctttctcttcgcatatctctcagcagagtcggataaagatccaacgccctcatcaccaggttctctgcattgttgactctggtgccttgattgccgagaccttttatatccatttggaaaaacaaaagatggaagctgccgtcttcgaacatgagaaacatgcacatccatcccaggtctccaaaacatatacatgtttacctcttgcctgaattcgtccactgttccacgtatatcaaactgttgacattcttggccaccaaatccatctgccctctgcaagcccatgaaaaaggcacaatgtcgaaactgcttcgaagtgtctacatactcgtttggttgagggtggcacattaacatcccatttgtgtctcgttctatctgcattattggatataaaaagagaagacgaagaatccttaaatcattgtttattctcccagtaaaaaattcgagaacacactgaggacacggaaggtgtactccacaacattaaacgaacataaggctatctaccttcaaggtcagttgcctgaaccgtgactccacccaacctttccatgccaataaatcttcggcatctgcagctagtacatcaacctgaaggtagtttttatatgcctcgaagaacatatattgctgaaataaggaactccagtgttgtttatttaactcaatctcctgcatataaaaaattagttagcaacaggatcctgggtaaacttttcataaacaaaatcgggtgttatgcttcctaacctgacagatcgtgttgccaaactggaattgctctgtcataacacgaagagtgctttgagagacattgtaactagaattcatgcatgggtatgcaggagttattattggcataagatgatagcggtcacgatgattttttcgtgggtcccaaacaggaaagctaaggtcatcttcttctattgcacaaagcatgactggattcggccagcgccattgtgtatatactctaaaaaatcgagaaaccaacatactaggaatagcatttggataaaactggcaaaggcgtgcaaccagaagtgcccagtttacaccaccaagaaatccagtaacctgctcaatataacagagattacaagagctttaacctaagaatattgtcaacagatgtaatattcagaaagacaccaccttacatttgaatagaccccacgcttcttagcccagtacttcaggcatcttaatgttgtccggaagtgctacatttgcacatcacatcagagatggcttacatgattccttagtttataacataaacaactggcactcaacgactttacctcggaatttggaacaagtttaagaatctgatcagcaacc

SEQ ID NO: 5683 - DNA, 1086 bp, Arabidopsis thaliana landsberg
accactgatggatacagacctcaaattacgatctaagttttcttcctgcccacttacacatgctaccacatcaacagttttctggtgttacacactttcccaaaggctcagcaggatcagagcattcttgaactacagccatactatctacttcaagaacttgctcgctgccagagttacactcatttcgagctaagtctgtgagttcagtacactcagtgttcaaattatcagcttctatttcctcgcttggtggccttctaaggttgcaaacaggaggagtccaaccagttgtgatagcactattttcaggagaaactatatctagactctgtggactaagagatgcacgcttctcaggtttctctggcctcacatccatcatttcactatcgttctttcgcttggcatgcctctccaccacagagccggaatgagaaacactgccatcttcaccagattttccacccggtagattttggtgcctggactgccgaggccttcgatatccattagggaaaacaaaaggtggaagctgtcgtctacgaacatgagaaacgaaaacatccatcccaggtttccaaaacatatacatgtttacttcttgtctgaactcatcgacagtaccacgtatatcaaactgttgacattcttgacccccaactccctctgccctctgcaagcccatgaaaaaggcacaatgcagaaactgcctagccgtgtctacatactcatttggttggggatggcacattaacatcccattagtgtctctttctatctgcattattgaatgaaaagaaacaaaatcgagaaacatttaataattttatattttctaccacaacaaatatgattaaacactgatatacagcaggtttattactgtaaatcaaatgaaaagagcaggctatcaaccgttaaggtcagctgtctgaacagagactccaccccacccttccaagccaataaatcttcagcatctgctgccagtatatcaacctgaaggtagactttgtacccctcgaaaaacatatattgttcaaataaaaaactccagtgctgtttatttaatccaatctcctg

SEQ ID NO: 5684 - DNA, 2884 bp, Arabidopsis thaliana landsberg
ctatttttttctaaaatcatcacctatatttatagattttttacaaaattcaaaagataaaataccccctcgttaacaaaccaaccttaaaaaccaaacaaagcgtttgtttatatattttggttgttacttgttagcattcaatattaattattgtttacttttcgaaggtatgaggattagaagattagatgtttatctcttttcttagttttagacttgatctatatccttggatggtgttataaaaggtatcgaactctttcacgtatcattagcttttgactaaaatattgttgaagagttctattttttagttcaaaggcctatgaaaggaggatttttaattctaaagagttttggtatgaaaaaactcttaaatcatattatcgttatcgatcattgttgatcttgacaaaatataaatttgttgctgaaataatttggagaatttcttgttatgattgtttatagtttccgttcatcatcaactttaaacttttaattgtacgagaaactttcaaagtaatttttggattcacatcaccaaaaaaattaacagaacagagttaaccacgttaatatcactttagtttttttacaaataatgatttgagtataatttgatcgtaatttgtaaccccatttcatcatggaaacaacaataaagttcactcatacatttcgttttccctgtcgtaccttgacacagaaacatagtccacagattttactactaatactatttcgaaggcgtacgaggttttacggagggagatttgcgaaaattcacctttcttgtttagcttttttgaacatgagtttttgattaaacttaactatatggaaagtcttgtggagcagttgaaatccatcaagaaggataagttttcttgtaatgataagtggttaacccttaagcttcaaatcaacaaaaactttgaggtaacgcttgttgattacgagatcctgaacaagatattttgggatatataattgtgagcgattgatcgatagtaagatttcggacatatattgggactttatctgaaaacactaaacaataagtcgtaaattgggagtacgtaaaaacattaagggtctaaatgaaataaaacctataatataactaggtttagtgacgtggcatgcacacgtagattaagcaatgccttggcaacacgtatgcaaaaacccatatgtgtgcacctgtgaagtgttccaataacaattcaaaagctccctgagcaagtgagaagagaccacactgagaagaaaaatccttcaggttatcgaaaattcccggattttactctttgggcggtggccgatttcttacgcgctctttttgtggcgactgttgtatacgcgcgagccttcatggacacgaaggcggttggagtttctaaggatacggcggcgtcgatggaagcgtcgacggtgtttcctgggtttaaattctcgccgacggatgtggagttgatttcgtattacctgaagcggaagatggatggcttggagaggtccgttgaggttataccggaccttgagatttacaatttcgagccttgggatttacccggtttgtcttcgaattcgaaccaattgattcttttgtgtctttcttctacttggaatttgattttgttgttcttcaggcttcaggagagatctctattttgggtgcctaagatataaagtttctattttttggctcttggattggaattgacaattttttttgtgtgtttgttctttgcagataagtcgattgtgaaatctgatagcgagtggttcttcttctgtgcgcgtgggaaaaagtatccacatggttcacagaacaggagagcaacgaagatgggatactggaaagcaactgggaaagagcgtgatgtgaagtctggttctgaggtcattggaacaaagaggacgcttgtcttccatattggtcgtgcaccaaaaggcgaaagaactgactggattatgcacgagtactgcgtgaaaggagtatctctggtaaaactgttctcgagagtttgttttttcttatagattaattgttaaccattacataagaggtggtgactttggctactttttgagtctctaagaggaatacagtaaaattttaggagtttgtctttggcttgagttgattgattatgtttatgtaaattctaggatgatgctatggttgtttgccgggttaggaggaacaaagaatacaatagtggtacaagtcagaaggcaccaaagccaaattcatcagccgagaagcatgcgaaagtccaaaatggcgctacgagttcagggagcccgtctgattgggacaacttggttgatttttacctagcaggtgaatcaggggagaaactactcgctgagatggcagagtcatcagaaaatctacaggttttgtcacctggcttctaattgttgtatgatggttcttgattgttgtcgttcttcttaatgaatgttatgtgtgtgtggtttaggtggataatgacgaggatttctttgcggatatcctaagagacgaaatcatcaatctcgatgaagcggtgatgacagggaacacaccaaacgaagtgccaacactagaatcagcatcaatggagataagggtacttcctttaccaaacatgatagacaaacaaatgtcatcactgttagaggaaagaccatcacagaagaagaaaggaaaagacgccacggaatcattgtcgagctgcttcgtgggtttatactcgatcaaatcagtcaacaaggcacgatgggatgttattataggtgtagtggctctgatagcaatgttgttttataaagaataagaggcttatggaagtagcgaaacacagtgtcctagctatgtttgtatcat

SEQ ID NO: 5685 - DNA, 940 bp, Arabidopsis thaliana landsberg
cttttaggggtttagagggttagaagtaagggaaaaaagaagaaagagataagagcttctagatgtttagagggttcactttagaccattggaaatctccaatggtgagagtctcctcatgggctctctccaattgtttaataatttttttgtcaaattgttagaaaagatcttatgttttgtttttgttaattttgaaaagtccgatggtaatctctctagtggtagtctctctaaactttcatattaaaagaattgccttgattaactacatagatcaaaagtcagccaaattaagcatggtataaacaaatgtgtatgagtttcagaaatttaaaatactatgttcatgatcaaatcatgaatgagccactcacaaaagagaaattaacacgaggcaatctgcctaccaaaaaaaaaaaaaacaaggcaatcttggagtttggcatgtgcagaatcaaatcatgaatgagccactcacaaaacgttttacaatgcaaagcgaaacaaagacattgatactccactcacaatcgacattgaaagcaatatagagacaacatcaactagataaccttcgtaagaaagcattcctataaatgtagcaagcaaatgatttctattcccttcgtgaatcttgtatcaacacttctccctcattctccgttcccttcatgaatcttgtattggcactcggaaatgatttccatctccagtctcttggcacttacagaaatgtctctgcatcaatttgacaacaaaatataaaacaatatatgagaactaaaatctccatttcaaggatgatttcccaagcaaaattgattagggtttaatgatgtttatctgaagatatccaattcaacttctacaaaaataacaaggacattttctctcttaaaatctttggctaaaagaaacaaatgttgtgactgagagc

SEQ ID NO: 5686 - DNA, 2440 bp, Arabidopsis thaliana landsberg
ccataagttcgaaccaatggccattgctaacttggattctataacatataatttgttcttaatttttatttttttgttcttaatttttatttttttgttcttaattttcattttcatatgtttatatcaaacataaatcagacattttgacgtggctgcatacgtgtatacattcattgatgagattgaaagagagtatccatacatttgttacttattacatgcatttatatataactctctacttccctaagaaaacaatatcccacatctctactcatccacattactcaaagatctctattggtacttctcaaattaaatggatcacaaaatcctactaacacctcccaaatctttatacaccaaatgtatcataaccatcatttacgtagtatcaatctctcatctaaatgcccatttcataacttcatgcaaacaaaccccataccctagcgtctgcgaccaccacatgtctaattcacctctcaaacctttagacgaccaaacggatgggttcactttccacgaccttgtggtcagctccaccatggaccaggccgtacaactacaccgccttgtgtcttccgtgaaacagcatcattctctccacaaacacgcaacatcagctttgtttgactgcttggagctctacgaagacactatagaccaactcaaccactctcggagatcgtacggtcaatattcttcgccacatgatagacaaacctcgttaagcgcggccatagctaatcaagacacttgcagaaacggatttagagattttaagttaacctcttcgtattcaaagtatttcccggtacaatttcacaggaatctcactaagtctattagcaactctttggcagttactaaggctgctgctgaggctgaggcggttgccgagaaatatccatcgacggggttcactaaattcagcaaacaaagaagtagtgccggaggtggtagccaccggagattattgttgttttccgacgagaaatttccatcgtggttccctctttccgaccgtaaactactggaagattccaaaactacggcaaaagccgatcttgtggtggctaaggacggttcgggtcactacacaagcattcaacaagcggtaaacgcagctgccaaacttcctcggagaaaccagagacttgtgatatacgttaaagccggcgtttacagagaaaacgtggtaatcaagaaatcgatcaagaacgtgatggttatcggagatggcatcgattctaccatcgtcaccggtaataggaacgttcaagatggcacgacgacgtttaggtccgcaacttttggtaagtcgtccgtgctatatagatagagatttatcaaaattactttctaaaagtgatatttattagaactatatcaattttggcacatacattaaaataaatacttatagccatattatttaaaagtcatcgtctctacaattttctaaaaaaaaactattatattttgttttattactatactatttacgttttagggtaaagaaaaataattcactcgttttttggtgtgtcaacatatataacctttggactaatatttaaccaaacaaattttgttttatccgccaacagctgtttccggcaatggttttatcgcacaaggcataacattcgagaacacggcaggaccggagaaacatcaggcggtggctctccgatcaagttcagacttctccgtcttctacgcctgctctttcaaaggctatcaagacactctctaccttcattctagtcgtcagttcttgagaaactgcaacatctacggcaccgtcgatttcatcttcggagacgcaaccgccatcctccaaaactgtaacatctacgctcgtaagccgatgagcggccagaaaaacacgatcaccgctcaatcacgcaaagaacccgacgagactactggcttcgtcatccagagctctacggtggctactgcgtcggaaacttatttaggacgtccgtggagatcgcattcgaggacggttttcatgaaatgtaatcttggagcgttggtgagtccggcgggatggttgccttggagtggtagttttgctcttagcactctttattacggtgagtatggtaataccggcgccggagcaagtgtctccggtagagttaagtggccaggttatcatgttttaaagacggtgacagaggcggaaaaattcacggtggggaatttcttggacggaaactattggattacggctacgggagtaccggtcaacgatggactttgatttttttttttaaagaattaattttgttagtgtggtctttgttgattttatgttttatttgtttgttggcgtataattgttatatatagctttatttcccaaatcccatgtaatagatggattgtcttgaatctatatagtatctataatagcaaaccg

SEQ ID NO: 5687 - DNA, 1048 bp, Arabidopsis thaliana landsberg
catcattcacatcaaagaaggtatctacaaggagaaagttacggtcaccaagaaaatgcctcacgtaactttcatcggcgatgggccaaacaagactctaatcaccggtagtctcaatttcggtatcggcaaggtcaagaccttcctaacagccacaatcagtgagtttcaatctccaaactctaaaagtccacaaagagagagtctaaacattaccaaattattgtttcgcagcaatcgaaggcgaccacttcacagcgaagaacatcggaatcgagaacacagctggaccagaaggaggacaagcggtggcgttaagagtctcggctgattacgccgtattccacagctgtcaaatcgatgggcaccaagacacgttatacgttcactctcaccggcaattctaccgtgactgcacagtctcgggcaccgtcgatttcatcttcggagacgcgaaatgcatcctccagaactgtaaaatcgtcgtccgaaaacctaacaaaggtcaatcgtgtatggttacagctcagggacgaagtaacgtccgtgaatcgacaggattggtgctccatggctgccatataacgggagatccagcgtatattccgatgaaatctgtgaacaaagcttacttaggaagaccgtggaaggagttctcgaggacaatcattatgaaaacgacgatcgatgacgtcatcgatccggcgggatggcttccctggagtggagattttgcgctcaagacgctatactacgccgagcatatgaatactgggcctggatcgaatcaggcccaaagagttaaatggcccggaattaagaaactaacgccccaagatgctcttttatacactggcgacagattcttacgtggcgatacgtggatcccacaaacacaagttccgtatacagctaaagtgtaggagattccaaattttgtaaattgatttaatttgtaaatgttttaaaactaaaaactgtttgaagaatgattaattgattatgtcatagtgtggaagccgatccccacccagataatagagaacaa

SEQ ID NO: 5688 - DNA, 9265 bp, Arabidopsis thaliana landsberg
  unsure (1)..(9265): unsure at all n locations
ttaaattattgacacgtaacaataaatattaagatagcataaaacgtttatttgtacttcgaaaacttatacgtcaataatttattattcccgcccacaatgcaagataacaactagtaggtgttgtttacatgtttatccaaagttcacaacttcgtccaacaatcctccaaaattctcaaaggagcttcctttggtagagacagcttcttgtgctagttcttcaagctttttagcattaaccttcatcttcttgccatcatcttgaaccaaaacccgatccaaactctcctcaaatccatccttcgtgaagactccactactaatcgtcactccgatctcccacacagcttccacagatcttgcattgattgcatgatccccgaaaatcggtctacaaatcatcggtacacctgccgacacactctccaacactgagttccacccaccatgcgaaacaaacacacccattgcttcatggtttagcagctccacttgtggtgcccatggaaccaccatcccttgctctctggtccgatccaaaaacccttttggtaaatgagtcattttcatctcttgtagcgaccaaacaaacnnnnnnnnnnnnnnnnnnnnnccttgtgctatcgccagaagctcttcaggaggaggttccatgacggtgccgaagctaatgtacgctacagaagcagctgatctcttccccatccaagcaaagcagccatgaggatcacgcatctctttctccgatgtagaagataataacgtgagaggggcgatgttcaagaaacgtttaaatctcgatctgaggttattcgtcaatgtaggatccaaatcttcaaaagaattgatgaaaacagcagtggcacgaggcaaagcaagacccatttgatgaagcatctttgagaaaacagagtctaaattcccaaacacaactccttctggtgtatctttgactctgatcttctccattcctgagataacccctattgtctcctccatacgctcacctacttctgtaaattagaatggaatcataaacattaccacaaatacatataaatcttcaaatcaatagtatcttaacctctgtttcttcttttagctaaattttcctctagttgcatatttatttatgagataaaagacaaaatcacaagtcggaattgggaagcattcaaaaatttgtatatattacctttgacaccgatggtttctctgatgagatctgtgtagagatgagcagagagtgagtttgctccggcggtccaaaacgcaatccacgacgcatttatctccgtcgccatatcagccgcgaaccagaagaacgcatcagtcatcaaacatttcacttccgtaccaacctccgtctccgccttcgcgatttctctccggaaattctccggcgcagcttgaagaaacagctcgatcgcctcctgtggtctcccgctaaacacgtatccctccggaacaccgtcggcaatatcgtatactctgatgttcgccggacgatctgcttcgtcaccggaggaaaataacgaagagttggattgtgcggtgttgaagaaagagaagacggtggaaggagaggcggaggcgaggcggcgcgtgacggtgaggagaggagctgcatgagtgccgaaaggaaaagcgagaactgccacgtgggagtctctggttgggtcggagggtttggtcatggtgcgagtaatgaagaagaagacttgaaaagagaagagagagtttgttggagaataaatagagaggagagggctaaagagaagagagagtgtggtcgtaaatgaaccaccgagcaagtgtaaagctcgtgtttcgtggttggtaccgatctctttctctttctttatataacaagtaaacaacttttttaatcaaatttttttatgaacgacaaatttaataacaaaatccgttttttgatcttttcttttttttcagagaaaatgtttttgtttttttatgtaattttcttcttatagaaaggacatttttaggattgtatttgtatctgtactttgtacatgatatcttaataaagcaattattagattattttttcaaccaaaaaaataaaaattattgatttgtcataagatttgattggttgaatgatttattttaagactttagagggaaaaaataaaagaaaataatctattttacccgtcaacaaagtagtagattttttgttttttatgatcatccgttgaaaacatgggaaattataacactagcaaaaagggtgggagttagagtatccgtttggattcagatcgaatattttagatttttaggttttcaaatttagaggtataaaatttattcggataattctatattgtgggttgggtcagaatatttcgaatttggattatccgaagttcccaaaaatcaacttttttataaacgaatctatcatcctagaaagtatacaaaacatctaaaaattttgaacatttttatccaaatttattcaaaaatagattaaatacccaaaaatatctaaaatatcttaaaatcctaatattttgacactaagattattataaatataaatgctaataataatttattactatgtacttaaattgtatgtatgttaggatatacattcggataccggttcaaataccgatcggatgttcaaattcagatattatgcacaccttaaattcaaatccacaaattgtttatcaataaaagtatattttaaggtggattttgaaatcattagttcaataacactggattttttgagactttttaaaatccatgtttgaataacattagatttataaattttacacaaatctcttaaaatttcactttcaattcaccccctaagatattaaaattgttattacttctgatttttgactcaatactcactgaattcgtttcgtttggtaggtgatatatgtggctattgttaaaccgaacctgccaacccaaaataaaaagttagaaaccaatccgacccattatttgtaaattgggctacaaagcctagaaaaaaatattcactattttgcgatagtattagtaaatatatatttgagaaaatgagagaatggtggaagtaaaataatttgaaaggaatatgaatattccgttgaagaagacttgctcctgaaatcctttggaccgaaacgcgtaaaattatttcccttcaatttctctgaaatctattcaccgtctcctttgtctcctcctccaaatcgatcgttcctcgtcgtcgtctgattttctctacgattgctttttctgtctagctcgataagaaaaaacaaaactaatttttgaagagtttttttttttgggtttgggagcgatgggtcaagcttttcgtaagctattcgatactttcttcggcaatcaagaaatgagggtaatctcatcatctctcgtgctatttatctggatgagatctcgtgtaattttgtcatctttgatttgttttggttttagtcatagcttttatcgcccatgtctgatctttgatgttttggaattttggatttggcaaatactttaaacctcaagcttgtgttttctggattcctctctattacgaatcatagatttgttgttagctgtggcatgatgaatcagaattgaagaaatgatttttgaatctcttttttttttttggttttcgttttccaattttgctattaatgacaggtcgttatgctggggctggatgctgctggcaaaacaactattctctacaagcttcatattggggaagttttgtctactgttcccaccattggtaagcgttctggttttttttttcttttttgcccatttcttaaaaactttgcagaatccttgtgttattgtcatagctgtgattaatcttgttctcagaagctaagtagttggatatttcttgttttggaacgagatttagttagatctttggtgtaggctgttagattcattctaataagaccttacaaaaaaaaaatgattgctgagaggtgggatcataatctatcttctccttcagttgaatctcatgataggtttacatactgatattctgcatatatttgtgatgcctttacttctgaagtcataagttatgtctgtgaatttctcttgtgtcatgtatgattcttggtgtatcattggttcttgtgacattatacttttctgtgattattgttctgtcattttccctttggttccttggaatatgtctgctgacaatttaaactttgttactcaggattcaatgttgagaaagttcagtacaagaatgtgatgttcacagtttgggatgttggtggccaagagaaactgagacctctttggaggcattacttcaataatactgatggacttgtacgtatatagtttttttttcgatttttgctttcagtcagatacttaactttcaaggtttttccatctctaagttggcatatgttatcctatatttggttatgatgttgcagtatcatatgttgcttggccaatctttagatctttttccatctttatcgaccatggtataagactactctatgatgctcttgcagatatacgtggtggattccttagatcgagagaggatcgggaaagcaaagcaagaatttcaggtataatacctcagaacttgcaaaagacttttcgtaaactctctggattataccttaccctgctctcggattgccacaggagatcataaaagacccattcatgctaaacagtatcattctggtgtttgcaaacaaacaggacatggtaattcgatattttcttttggtttttgtttgtttctcgtctgtgcttataattcctcaattcacttctttactctgctggatattagagaggagccatgtcaccgagagaagtatgtgaagggttaggcttatttgatctcaagaacaggaaatggcacatacaaggtacttgtgctcttcgtggagacgggctttatgaaggcttggactggttatcatctactcttaaggatgttaaagccgctggattcacatcggttggccactcgttttaaatcttccaggtaatataaagacctgaaaacaccagcgagctataaccagtagttcagtacaattactctcagtctcgtgatcaggatcttgtaaaacgtcatttctccttgcaggtatactttgatatcaatggccagtgtcttcttcttggctttatcacgaaatcagaatctctgaagactttttttgttaaggaaagaatgatcttctcattgtggcaatattagactccattagactatttttgaattttgatcatgctgccatgaaagcttctttgtatattctgctgatgaagagttgtatcatctgaaaaaccttctctttggggtcatctttgtccgattaagactttggtagatgtatatacattccttcgaaatcatgatatatttttttataacaattataagttttcccttcttctttttctcaacatatttggcattttggccttttggtgattttataggttatgcagaatattcagttaagaatctacccaaaaatcccagttgaaaacagtatgttgcaaactctcttagaaattagaaaaagcttaagcttagagaaagattaacacgttgctgaagataagaatttttatctcacaaagattaacacataatgctgacatcgttatattaccattattaggttatctaggttgtttaatttttctcttttatctagggaatttacttcttctttctttgtgctggtcagcaggataaatgcgttttactgataaaccagaaattccacaaaaacaagaatattcttaagactaatatagtgcaagatcaagatcctagaacaagcattatattccagatcagttttcaaagctgataatgttcaaactttgactctctaggcacacgttgtaggcaaccgtgaatctccttcctctgccaccattgaatccgataatggttgtgcagcagctacagaaggaagttgataacgcacgatgaataaaccaaaacatgctcaagaaatgatggaactgtagaagaaagtaacaatcaaatcagaaactcaactgttttcgcttagagtctcactctcactcgtggtcgtcattgtctctgatggttcatcgattgtttccatgtcaacagtcattgcgtcatcaacatctgcttcttctacctctgtcattatctcatccttatcgcctcccattgagtcaattacatttggatcgcaacttgcagcagatgttattgtctctgaggttgctgtgtttggatcctcagtggtttgtgattgtggctctgtactgatggctaacatagaagtaaccaacagattctgcatatattccacaaaatcaatgaagaaatgtgtacatcaagtacaaagttacagaggtaagagtttcaaattcgtaccttttctaatgcaagagcgagttttgagagctttgggtagatgctccttgcagccaaaaggatctgtgaacacatattatccaaaaagctttgtggttatgatgtcaacacaattttaaaagcttatacctctaaacaatataagagagcagtttttataagacacttgaatggtatgctttgataattacaacttttccaagagttgcaaatgtagcatttatgtatcctggactttaaaacgtggaaaatcctgatatatcataaatttaaggaaataagtttgtttaggattccatgagaatgttgaacaacagagtgaaggtatggattgaactgactcttacactcttacactatactatacaagtgaaatttttatattaaataatgcaagctaataaaaaatgatatctctgacattggagtaaatcatgaccagaaaactcatctacttacctcacagagtctctgcaatgtaaatggaggtccatcatcgaatctaagaagggctgcaaaacaagacaggaacaaaagaaaccaattagaaaggtctctgagtaaaaaagagtactcagagttgtaaaagcataaataaaactggaaaaggtcagaaaaaaacataaagcagcttaaataactgaagtgcaaagcccctgtcacaattctcaacatatggttcccacactgtacaagaaaggcacttttatttcatttacaaaggtcatttcttaaaatttctcacagattcttttttgtagccattttgaggaaacgatgatgggtagagttatagctggtctattagaaaatagattgataatgattgacgagatactaaaccccttgattaagcccttataccaaaccctttctcacagtttcaaactcccatctacataaactttctggaatcaaagtaacaaaactaacaagtgagtagatatagaccttcatccaatcgactaaccagctctgaatatggttctccaagagcttccttttgttgctcatccgtcatttttgcctcagaatattccgatagaacctttacaacaaaccacatagatagttaaacattgaaataatcaggatggatgtggaatggtaatatatattcacactcctggtatacctgcacataccttcttcaaccagtacgatagcgttccctttagtatctcccagtcctgcctgtaatattacaaggtaaaaaaagtactcaactagatgtagcaatacagagatgagaccctaaaccctagaattactcagaaagaaacccattcattcagcacatcgaaactctatagaagaatacatatcgggaaggataagataggatcccagtttaagtgcataacaacaatgcctactcataggtatagaaaattaatattaccagaacttcccagtagatgctacagcttctaatgtgcgctttacttcttcctcagacatatctgctatctgctcagctccactgcaaaagaaagatcaatcttaaagcacagaaaccatctactatgaaatgagacacttaacacctcgtgacctcatctgcaaccaaccagtctatggaaaaccaaaaataaacctgagtgttcgttcttgcattatcctcctaaatcagatctaaaatcgttaagtaaaagttctgcaaacggaagaacacacctagatcctaaaaacaacatcagaagcgtaaggtggctcatcgattcgaaactcaaatatatattcaagaaaccaatcgttttgcacacaggcctcaagaataacaatatatgaactactagcattaacttaacagagattggtgaaataatttaagcgcaaaagcaagcaagagtgatgaaaatcaaagatatcagagtaacgagaagagaaggaagcaaacatacggatgctcaagaacttcgggaaggacggcgtgatcctggcgttgaacgccgtcattgggatgaacgccgtcattgggatgaacgacggaggaaatctcggaagtttccgatgatgacggattctccatttttggtttcagagcgattttcaattttgctcaaatagctgaatccgcaattcgccggataaaattcggtaaagaggattttttcaattttgctctgacccgacccgactcgactcgacccgtattggatccgattcgacccgagcatgtaatgcgcattttatatgcgagaaaacgtgaagaccaaaatatagtagatattttttggcctgcgttattgggttagggttagaacattaaaaaaagaattattgggttagggtttagaagattattcatttgtttggcctacattaaacttaaagtatggtagattttttttttctggtcttgtagttgtacgagaccattattgttagaaaataaaagttgaaaaaactaaagacgttttctttttaagttaaaaacaaaaagaaaataaaaataaagtttcagattattttcttttctacacacttgatagtatccttttcattttgtctcacaccatttgtccagtcgctgaccaaaaaacataaagacccatgcttccactgaccctaagatcagttttaccacctttcattgatcctttggaaagtctaagatttcatttattgatagtgacattttattgtctatagaaatgatacgcatttatgagccaagtgtactcaccattgccgcctcattttgcttcgtttgtcttttgttataggttcgtaagcctaccatttcctatcacatctctcattctctctcaactctctctaaatgtagaaatacctttcaaatctatctta

SEQ ID NO: 5689 - DNA, 4563 bp, Arabidopsis thaliana landsberg
tgtcacaaaacttacagctggcaactacctgatgtggagccttcaggtccatgcacttctagatggctatgatctcgccggtcatcttgatggctcactgcctacaccaccacccaccattgaaatcactggtgtcgttacaccaaattcagctttcaccaaatggaaacgccaggataagattatctactcgtggcctcattggtgcaatctctcttccggtccagtaaaccgtctccagagcactcaccgctaatgaaatctggaaaacacatgccaacatctatgccaagccgagctggggtcacatccaacaactgcgcatccaattaaagcagcataccaaagatacaaacacagtcgatgaatatatgcaaggtctcatcactaagtttgatcaactagcacttctcgccaaacctctaccacatgaagagcaagttgaacacattctcctaggattgcgtgaagactataaaagcgtcatagagcagattgaaggacgtgactcccctccctccattccagagattcatgagaagttgctcaacaaggaaaacaagctgctgtccacagctacgtccttctccccggtgattcccgtttctgctgacaccgccaacactcgtcctgcaaacagaataaccggtccggacaaccatggcaatcacaaaccaacaatcagcagtttcagaggtatcaccaataacaacaactctcgattcagcaaaggctatcaaggaaaatgtcatctgcgtggtgtacagggacatagtgcaaaacgttgtctacagacttcaacaacatcaacaaaacaattcacggaatgtgacttatccgtcttggcagcccagagctcaacctaacgcttgcatccccgcacccagcaaatgcttggcttattgatagtggcgcaacccatcacctcaccagtgatctcaacaacctcgcgatgcatcaaccttaccctggcgatgactcagtcctaattggtgatggctcgggtctacaaataacgcatactggttcactttccttaccttcatcctctcgtaaccttaccttacagaatgttttatgtgttccccacattgctaaaaacctaatctctgtttatcgcaatgtggaattctttctcacgctgggatgccaaagacgttttggagctatgcatttaccactgcaacatacttgatcaatcgccttccgtctccgacaatagccatggaaactccatatcagaagctctttggcagttcaccaaactacggaaagcttcgcacattcggatgtctttattttccatggttacggccatacaccgccaacaagctagaagagagatccactccgtgtgtcttcatcggttatgcaccaactcaaagcgcatatctatgtctccaaacatgcaggatttatgtttctcgacatgtgaaatttgatgagcaagtgttccccttcactcactcaactcctccatccgataaatcacttccaacaagctcaaattccccattcattcccgtctcccagattccagtcaccgtgccactcgcttcgatgcctctgggacccacgagcttcgatcttcaccaatcaccacgttcgccggcaacttctacagagactgcgttagcagatacatcctcctcagccgaaatccaaccttcatcctcaagcctaaatccggcccatactgaaaacccagaaactcaaaactcaaattcaacccaagcccaattactaccaccacaaataaccaacaatccaaaacccaacccacgacacaaaccaatacttcaacgtcctcctcgcagccaaacgttccacctcgctcagtcgacaacgctcaccctatgaaaactcgtcgcaaaaaccacattaccaaaccaaacactaaatacaacctttctgttgccctctccacccacattaaaccagaaccacgaactgtgaaccaggcgttaaatgatccgcattggcgtggagctttgtcagatgaaattgatgcttttgctaggaatcaaacctttgatttggtccctcggcaacctcagatgaatgttattggctgtaagtggatttttaaaaacaagtttcactttaatggctctcttaacaggtgcaaagcacgtcttgtagcaaaggggtacaatcaacaatttggtcgggattacacagatactttcagccctgtcatcaaagctacaacactccgcttagtccttgatgttgctgtcactcgatcttggtcacttcaacaattggacgtcaataacgctttcttacaagggacattgaatgaagaagtttacatggagcagccaccgggatttgtagatgctgacaatccatcaaacgtctgccgtctccgcaaagccatctatggactgaaacaagcccctcgagcttggtacatggagctgaaaaactatctcctcagtcttggattttggaactcactcgctgatacatccttgtttgttctccaatgtggtacgcaatttgtttatctcatagtctacgttaatgacattattatcatcggtatcagtgacaatggcatcaaacgagtcttacaattgttggcagatagattctctgtcaaagatcccgaagaactacattattttctaggccttgaagcacaccgcacaccacaagggcttcatctatcccaacaaaaatacattttggatcttcttcatcgccacgacatgatcaatgcaaaaccggtttccacacccatggcgtcctcaccaaaactgaccatcaactcaggtacaacactctccgatccgactacatatcgacagcttgttggaagcttacaatacctagcatttacaagactagatatctcctatgcggtgaatcgtttgcctcaatttatgcatagaccaacagaagatcacttccaagcagcaaaaagagtactccggtatctggtaggaaccacaacacacggtattttctttgctgctaagaatactctcactctccatacattctctgatgcggactgtgccggcgatacagaggactacgcctctgcgaatgcatatatagtatatctcggcagccacccaatctcatggtcggctaagaaacagagaggagtagctcgatcttctacagaagcggagtatagagctgttgccaatgcatcatcggaaatcagttggatatgcactcttctaagtgagctaggcattacgctatctgcacctccagtgatatattgcgataatgttggagcaacgtttctttgtgccaaccccgtctttcattctagaatgaaacacattgccattgattatcactttatccgtggacaaattcaaaccggtgctctccgagtccctcgcgtcaataaaaaggatcaactggcggatgctttaacaaaaccactacaacgagcaaatttcttgaattacgagacaagattggtgttgctaaagcacctccatcttgagggtgcgtgtcaaggatactaattgatcataaaaatattttgattgacacacttatagaaactgtgtaaatgacgatagtctagaaacttcttctgtaattcctttataaaggactagggcgaaacccgcgccaagccgcgttttttttttgtaatataattttgttaagttgtatgtaggtattgaatgttatttgtcatgattcatgatagatgtagaacaaaaagatttattaaaaagtgattggaaacacaatgcattttttgattattttttttagtaagatttatataacctttataagttttagaagctaattttttgctttacgaacatctatttagaagagtcattaaaaaacaaaaaatgaaaagagttaaaaaattataatatgctaattttggtgaggttaaagtcattttagattcttaagaatatgttatatggagttatcatctttgattttaatgttccacatgcatatttgattcatatgatgaagagacataaaaagctaaaagttacgtttgtttgcttttcaaaatttcaaaattgattttttgttattgggagtatagaacgtactcacatgattattagttattgattaaaatacacaatgacacttagtaaatctgataagatccttgaatattttgaggaagaaactcaaaaatctttaatgtctcttttttaagattcttcttccattgacctttttcctcgatgttatcttatgctaagattttattcagttagaaaataatctcttgaaccaaaaacatagataatagattcactttcaaaagaaaaatagggacatggatcgaattgatcattggagatttgagagtaatcatacctcagagataaatttaattagaccttaaagaacaaaaatgacatcttagttgtaataattttttgcttgtttacacattacatcaacaatgtcatcttttcagtgtaagcttctccccaaaacttaaatatatgatggtgattttaattcataaaatgtgatttattttctctatcaaaatcatagtatcaaaccacacagaagaatgtcaagatcctaactgag

SEQ ID NO: 5690 - DNA, 1271 bp, Arabidopsis thaliana landsberg
  unsure (1)..(1271): unsure at all n locations
cttcagtcttcatacaggcagttctacaaatacaaaaaccaaaccatgaacaatggaagtaatagcttgacagatatataccacatttgcagaccatataaactggtagtaaaacaatctaaggactaaggaatcagagaaaattaaactctcactacaacttatatacgacttaaaaatgttacataggaggaaatagcaaaacgttacccttttcttaggtaagctttggtcaatgaaggatccaactcaattgctttgttcgcatctgccacggcctctgctcattgagaatcaaatgagaccaaaatcttatccaactagtaaagttctatgatactacgctaaaaatgcagagaatactttcttaaagcaagaaatagttgaactaaagactaatcactcaagcaaaaattgaaactttcaatactccgttaatacttaacactatctgtaaacaaaattctccatattcacaatcaaagaatcaaaagactagcacagctaaaaccaacttaaaccaatgtttgaatgcataacttgtaaagggcactcgctactgataacaaataactaaatttcgtttctcatgaaagcaattccgatacattgttcctccacaaacagcaaaagagagacacattagtatcaaattgatacgaaagctttaaactttcgaaaagaattgtgacactatcaagcgacaggacacaaaacgaaaccctaaatacacataatccagcaaagtcaacaactttcagctatgatgaagtaagaaacccaaaacatacaaaaacccagaaccccagaaggcgtccacgacagtaaaagacgaagataacagaacaaagaagctaccagtgaagctttcgagtttgatataggcctgagcacgatcagcgaagaactcagcgcaattaggatccaagtcaatggctttggagtacaagtcaacagcaacatcgaagtcatcgtctacgaaagcctctttagccttatcagcaagctccttcgccatcgattgactaagaaaaacaaacagaggagagctaacaaagacgatgaaatcaaaacaaggagggaatgaagtagagggcaaggtttgttacttattgccacaatggaaggaaggaatataaagagagattggatgttatcgttcttcttctagattgttccttcgttntatgcgacttgtgttcagggagttgaagagttcgaacccaaaataaaatttataaaaacaataatttaaatatttttctattttt

SEQ ID NO: 5691 - DNA, 3141 bp, Arabidopsis thaliana landsberg
tgcggctatgtgactaggtaccaattgtatatgtttataaaagcttttgatcgtattggagggaaagatatattcatttgagttgtatttttgtatcttagcttacgggaaacaatgattcgtgaataaaatttcttcaattagtcatgttggtttgccatatttgcacatggtggtggatgcacgagttttttttttctcttattgcccttcccaaatatgacatcatttatcatgtactgtacagtcatgaattgcttatagttgtagcttatcaattcgaaaattgttgagaataatgggaaatggtttcagatggcatacataagggtttttttgtttttgttttaacaagatcgtttttaatgacaactacagatattttgtcttcatcgtatcaaactgtgctcaggcatcaaataaattccatgcatgggtgtgattcgctaccatcacttttcactttctctgccagactgacacaacaatctttttgtcatataaaacacaagcttgtcaaagccacagcgagaaccaaaaaactgttgagtaactgagtattgcgcggccatacaaacacccaaggaggaacttcttatgttatcctaattggttatttgtgctccaacaatggatagtttccttacttttggacttcggtgtttgtatggaccacctacaattgtgatttatttaacaaagagaattgtaaaaaaaaaattgttgccttattcttaattattctcccaacttattttttcttctccttttaaattaaatcatttttatttatttattgaaaagttaattacagataagagtaagtgtttgagagttgactcctttgtccttcctctttaggattctcctctgggctctggtaaggtattagaaagatcaaaactttttggattccctgaaattgggtgaaagatgggtaacgctcttacgtttctctacggaaaatgctgcaaacccacaacaaccgatgactctcttggtcctcacggcgtctccgccgccaccgtcggtgtttcagctctcgctcacgatctcttcaacttcgagatcacttcccaggtcttaattttctcactgaaacttctaaccgtcctttgatctacttattctgctgctttcatttgtgctccagtgatctttaagctaattcagctgttggaaggtctctttacttgatttggttcaaaagttgattttgatgatgagtttacctgtaggttcctgaagggcttgggaggtatgttcagtcatctagaaaagctcaagcaaactggtaaaataacacaagattgctttacatgtttcgtgtaggataaagatgtgaactttgttgtgtaatcaatctgtttgtcatgtattttaacatcgtgaaaggtatagaaaaatacttgaggcatggaagcaagcaaaacctccaccgcagacagctgaggaagcttctaggcttgtcactgatatcttaaaaaggaatcagaaagctgatgttgaggtatgattagcaagaacagatgttttaaaacatttatgagaattggaagagatttatgtgattgtgttgtttatgaaacaggggcttttgtctttctatggactccctttgtctcatactctagttgaagtcactgttgaagctcctgtgtctttgcctgaagggattcttttcgaatttcaaacacttccggttagaatgacttcagtacaaattaaaaagaacaacaactgggtttttgggatttgataatgttgctgactaagcttgtgtaatggaaaacaaggtggatccaaaagctgtggcagatggagacaccatcacagtgtatgtcagtacttcagagccggttgtgtcatcttctgttccaagggaagtcaatcttgcagctgttcaaagagcaaaagcacgtgagaagagaaattatccaaaagcagacgaacttcaccaaaagatcattgattctggttacagggtactaaatattgagaatgaggaagttcttgctcggaagttcagaattagactaaggtaaagatcactcttttcctttaagaaaagctcaactagttctaccatggattattttgtttagtgaagctgtttggtgatggaaaaggaaataggggaatagatgcaccagagagccaaatgccgtttgggaaagaggcacaagaagggctcttaaagattgttgggcggaaaagcttgaaggtgttagtttatggagaagatcaatatgggcgatgcgtaggtgatttatactgcaatgggatctttgtccaggtaatagaagtacttgcccttcccttgtaataaaaactttgtttaatcggttattggtttcttatctaggaggcaatgttaaagaaagggcttgcttggcattacttagcttatgacaagcgcccggttctcgcaaaggcaagactagtagagtttgttttgtatatactacaagtacgaagtctctttagtttgttgacatagtatcttttgtgtatttactgttcattttatgtgaaatcattcagtgggaaaaggaggcaaggcagaagcgtattggcttgtgggcttcttcaaatccagagaagccatgggactggagaaagaataataggcgggaatagtcaaccgactttgtttgggcaaaatcacaaaccaagtaatcagcgtttaaaacaattgagatttgtgattgttgagggtttttgtttaaatcctcagccctattctgtgtgtaaatggtttgtgcactcaccctatctttgatgagacatatcgagatattatagagttagcaaattgatcaaaatcagtaatgtggtgtagtgctattaaccaaatctttctctaagaagtcaccagtgagaagacagtcagagacgattggtacaatgatattcagacaaacctttacggtaacctctaaaactcaagccaatatcagagacatactctgaaaccaaaatcccacctaaatctgttgtgaaacaaaacctttattttgtttgggagcgatttaattttatttttcacggtttgttgtataatggaacacatgattattattgactgaagtcgtgttatctatatgagttttttttttatgactacttttttatgaaaaa

SEQ ID NO: 5692 - DNA, 2170 bp, Arabidopsis thaliana landsberg
aaaccatgaaatcgcggttgccgctttttaccattacctatgtcgaatgttttatttcctactacaactcaagtgtcttctccgtttttatccgaccatctttatcagattaataaacgaatgaatataataaatggataaaaacgaccgcttttagaaaaccatcattttatgatttctgatttctaccaagattaaaaagacgaatcattcattatagaaatttgaatcgtgctatattctacataagatgtgggaagtctctcaatgaccacattaacaaaacatgtcaatttttcaaacatcttagtaacccaaaacacagaactagttcctctttctctcttccctccatgtcttagagattttacttgctgtgtaccttaaatgcataagtgacgagctgaagatggcggattctcatggatactgcagagaatgtctcacgagccgaagctacattacgagggttaactaaactatctcctcacaggtggcacagcccctcttcctcctcctgttccacgcccagtaccctgagtatgacatcacaaaattcaattagttgctttgaattgtcaacattgtcttcttgagatgtaaatcagaaacattaaggacttaggcaaaggtgaacttactttggctcgcattgcagcacctctacctctgcctacacctagagaagcgctctttccctgtattagatcaaactaaacaagtatgtctcattacgcttcccatgttatataaatgcatactataggatatgatcattctccatcacgttcaagaagtttaccttgcccctaacatccttgaacattggagcattctttaacatgtctggtatgactaaaaacctgtcaagattttacaaaatgtcacataacagtcagctaagttgaaaaagaatactccaacaaaagtaaataagtaggaaacaagcagagatgtcaaaaggagtttatatctagcagcacctgactaagctgcctcgaatgaagacatgctcaagctgtgataccttaccatcctgttccataaagagcccaaacgaaagtttagtaacaatcatgaatagaagatactaaatttctaatcacaatctacaaatgtgtaagagcatatatctgtagtaacaattcaagatcaattatatagtcttgtaatttgtttaatcgcaaacatgtcatgattctacatagtaacaacataagcaagacctgtaataacatttcttctctactactagcatatacaggaactaaacccaatcactactaggaacacaatttaagggtcaagaatttcacaaggattctcaattctcctccaaaattgaactactctcaacatcacaagaaagagacaacctaagaagctaaactgttcacagctcctacataggcaatggccaagaaacgaaaccctagtaacttagtaagacattaccttggccgtataggtgatgttctcgagctgacagttccaattatcctcacactcgatcatgcttcctctgtaaagctcaccgctcttcatctctacactcacgatatgaccggacgattcgtgaagaagcttcaccggaatccccaaactccgactcatcttcgtcgattcactaaaccctaattgaaccttcccttttcctttttagcagccaaaaagctttgaacaatttagcttctctcgttaaagctccatactcttatggacttcttatttagattttggatcggcccattagtttattgggcccattagttgaatgttgtgtgccttttttgttactttgtttttactcttaagttttattagtataagataagataagatttgtttagttgacccaaaaaaataaaaagataagaactgtttgtaaattaaagctcctctacacttgtgacaactagccgagtggtgattagattcaaaaaaaaaagttgtgacaactcagattctctaaacagatgttgcaatgtacaaatcttcttcacagattctgatttaattgccaatttggcttcttgtagtccatattaatcaaagattccatattaattgtttggagcgttacacaaaatagtttgcctataaatactccacaatttttatatgattttagtagctcaatagagaataacaatagaaaagaaatggaagg

SEQ ID NO: 5693 - DNA, 1279 bp, Arabidopsis thaliana landsberg
tgaaccactaattccagagattcgtggctctgtaccaaggtattggttgcagggagcgttttggatttaatttgttgattcgtaatgcctgttaggttagctcttgtcaatggtgattgagtctgggactggtttaacttgagcgtctctgttacggtggcacttagatttggttactgaacttgttgtctagagataatttattgagcatgttaatcacctgtaaactgaggaaacgaaactactcaattaccccatcctcgggagttctttatctgattgaattctttgtttactctactgttgtttactgcatcttgttatccgtcgcttaatttctgcaattctttcttgttactcgacctcatactcgaccacccagttgtctggcaacagactgtgcagtctagtatccctgttttattttctgtctgttactcgacctgtcactcgacctcacctagtgctctgcaaagagctgtgttggtcgagtgttttactgtttctgcttgattttctgttttctgcatgttcacttagaactgcgagaacacaccaaaacctgttattgcttggcttgacttagtgacttctgatcacatctttattgttagcatcacacccatttggattgacaacctaaaatactacaacgacatgattggtgttttaggataattgactaaaaacctattatcaacagcatcgcatgactttattacatatactaattagttattatcatatgtgatgcatacgtgtaaatctaagatgtgcttttaccattttgatttcttcaacttcttcaatcgatggttccgggtaaacagatgaaactgcaccatagctcacgattttaaccttgtttttgcgcccaccaactagttcaggctccctaaccaccctccaccaagccagtgctaaaacaaattttggatggccatagcgccggtaacaggtatcaaattccaatgcctttctcccagtggcctcacagtctagaacctctttgctgtagaaggaaaacatttaacaattttaaacacacgaaattatcatattttattgaattttagccagaaaacttactatctgtccattaatttgaaaggaacgatcatcccctcaacgccgacgtcgggatcaccagaatgagacagaattccaacttcaacaacagcacccacgagatctgtacattcagggtaagtttagatcaatataaggcatatatcgtaactaccctcaaatatgttgtctctaagaattaattgataag

SEQ ID NO: 5694 - DNA, 3979 bp, Arabidopsis thaliana landsberg
  unsure (1)..(3979): unsure at all n locations
aaaaatataacacttttgaagaaattccctaaatatttttttttttcgttcaaattccctaaatatattgagacggtggggttagtgttttaagttcaataatttatttcaaaatcgaagtgtttttagaattagcactcctaaattatttcaccaataaaattcttctgcatgatagttgatatatatttcactgaaactagtcgattatggttttcgtttcaacaattgatttgaaaatatgtcaacaatgattcatacacttaattagtactaccagaaaaggtaactatcttgccgagtaatgaaattttaactcatataattttttaaaaaactatttactgaaacaagatttacatataaaacaaatttacagtgacgtgaatatgatatgaacaccacaataattcatacatttggatcatattttcccaactcataaaaatctattaggtatatcttaagaaaaagaaaaaaactgtttgcggcaaatgcatcaagtacggcgcaaaagagcattggtgcctttctgtacatatgcatgcatggggatttacaatatgaacttacttcctcacttcccttagttacttctctattccatactcacttagccacttgtatttaagcttaacctttggtgcaatctcaattacactcttaaactctatgttgatctcaacaatgaagcagaaacatctcctgcttctagggttcttattagcttattgcttcagctctgtttttgtgataaacgcagaggacccgtatcttttcttcacttggactgttacttatggaaccagatctcctttaggtgttcctcaacaggttatacattgttctgtctatttttcctatgcattttcttaatttttagtattttttttctttataaaccgtggcagttccgggtgttttttccaattttcaaaagcagactttaggtatttcgatttttaaaaataacattttgtaccaaagagagactagacccgatatataacggaaaccaacactcttataccacttctacattaccatctctttaatcttatttagttctgtttcaatcactattaattaatataatcaaaattttgatcttatattgtttttcaggttattcttattaatggccagttccctggtcctccaattgaaggtgtaacaaacaataatatcgttgttaatgtcattaacaagcttgacgaacctttcctcatcacctggtacgtaaaatgttttagcatatgcaactagatcactcgttcaaattttatcccacaaaaaaactagatcattcgaataagctaccgatatttttcatatttttattttaatatacatataaattagttagtatttagacaaaaaaaaactatggaatcacaaaaccatttaccaatcagagaactagaacttgacactttcgaaaatgcgtaggaacggaattaaacagaggaagatgtcgtggcaagacggtgttttgggaacaaactgtccgatccaaccaaaatcgagttggacttaccattttcaacttaaggaccaaatcggtacttatgcatactttgcttcaacgtcgatgcatagagcaagtggtgcttttggtgcacttaacgttaaccagaggtcagtcatcttcgttccttaccctaaaccagacgctgacttcactctcctcgtcagtgattggtacaagatgggacataaggtacaaagaatccttaatacacgagttaacttatttcccaagtaaccaaattactttagggttgaactaagcgatctgaatatttctgcctcttgttattgtttttgacaggaactgcaaaggaggctcgactcaagtcgtgctcttcctcctccggatggtcttctcatcaacggtgcttctaaaggtttagtctttaccggtcaacatggtatatcctcatcaccaagatccactttcctccttaattcaactctcagactctcagctatttgatatcttaactgatgatatgtttttggtgtttgtaaaggcaagatatataggtttcggatatcgaatgttgggatatcgacatcgattaactttaggatacaaggacacatgatgactctcgtcgaagtagaaggttctcacactctgcaagaggtctatgaatcgcttgacatacacgttggccagtctgtgaccgtgttggtcacattgaaggctccagtgaaggactacttcatcgtggcttcaactcggtttaccaaacctatactaaccaccacaggaatcctcagctaccaaggttccaaaatcagaccatcacatccccttcccattggtcctacttaccatatccattggtccatgaaacaagcaagaaccatcaggtaatttatcctatctgatcgcacaatattaaaccgaacaatttcgtgcaacacctcattgaaaggtgatatttaggctaaatttgacggcgaatgcagcaaggcaaatcacaaggatcctttcactacggtactataccgataaatcgaacttttgttttagccaacggaagatccatgatcaatgtgaaactgtgtntacacagtgaaccgtgtgtcctacgttaacccagcaactccattgaaattagccgactggttcaacattcccggggtgttcaatttcaaaaccattatgaacattcccacaccaggaccctccattctcggcacttcggtctttgatgtggctctccatgagtacgtcgaattcgtgttccagaacaacgagggatctatacaatcttggcaccttgacggcactagtgcatatgttgttgggtaataactaagcctaattcttttcccattatccctccatattgctctcgatcaatcaaatttgtttgttagagtaattgatgaagttttgacatataatcagatacgggtcgggcacatggaacatggctaagaggagaggttataatttggttgatgctgtttcaaggcacacttttcaggtaaatcctaaaaacaacactggtagttttttatttcacaagaaagaaaaatttgtctagttggtcaatttaaagcccaaaacgttcccacccaatataatacctgatttgattttgcgggccgatctgaaacctaaaatatagttatcatgcatatataactacatctatggttctaaatgttctctatatgtgtgtaaaaataggtttatccaatgtcgtggacgagcatattggtatcattagacaataagggaatgtggaatttgaggtcacaaatatggtcaaggagatacttaggacaagaactctatgttcgtgtatggaacaacgagaagtctctttacactgaatcgaagcctcctgttaatgttctcttttgcggcaaggccaaacaatccccgcttgatttagatatatttttatcaataaattcccttatcgtgatatggttattatatttataggttattacagtattaattaagtcacgagggtgtgacgttaacgttgaacaaaaagacacttctataagttttgagtgatgtgtttcaaatcacgagcataacgatttgtaaaccaattaatcaacaagaaacaataactagttttgtctatattttttccgagacaagattgatgacatatttcttaacaagaattagcactacctgggctccattatacaatgtatacgtcacgttttggataaaagtcacgttttggataaaagtcactaatttttcaacaccatggaatataaattacttgacgttttggaaatctccgctatttttatttatattaaatggcaaaactgtcaatatttcgttgacaccttagacacaaaactctatggatcgttttaggcttttagcaatcaagttatacgttaatactagactaaaacccggatgataagtatcttctaaattgaacacaaacatataatttgatgcgttggaatgttatttaaa

SEQ ID NO: 5695 - DNA, 575 bp, Arabidopsis thaliana landsberg
tatctttctttacattatcttatgaacagagtagtttacttgcttgggattttattctatgtgtataacagtgtgatatctgtttgtgtaggtggccttacccattcttggatttgtcatcatcctatgctcctttatggtactcaacacaaactcatcgcctattatatcggttatgaaaacttgtgccactagatctagagatgaaactcgatgctaaagatgaatggatttagactacacgtagattctagattctaaagatgaatggatttagactacacgtagtaatgtttagctgatgttgcaggtatgccgctgttgggttgatgcacataccatgctttggaatatttgctttgatcgtgaagttgaagcacttgtggctctcaagatgttactcagaaggaacataataacatatatcatatacatatactcaaatggttaacagagtctctcatgagtcttaaacagagctcaaagaagacggtacatgtaggttccctcctgtataatcacttagctagctagtcaccattctgttggagggggcttacaaaaaaactggtctt

SEQ ID NO: 5696 - DNA, 606 bp, Arabidopsis thaliana landsberg
tgcgaaatcgcttgacgcaggctctgctcttcctcttcctgatgctcttctcatcaatggagtctctaaaggtttaatctttaccggtcaacaaggtaatgtcatcataacaaatctttaatattacatcgtgcatggtcttgttctagtctttgatatgtctttaatttcattgtctatcttcaggtaaaacatacaagttccgggtatccaatgtcggtatagctacatcgataaattttaggattcaaaatcacacaatgagcctcattgaagtagaaggcgctcacactcttcaggagagttatgagtcgcttgacgtccacgttggtcagtccatgaccgtcctggtcactttaaaagcttctgtgagggactatttcatcgtggcctcaacccggtttacaaaaccggtactaaccacaaccgcgagtctccgttaccaaggctccaaaaacgctgcatatgggcctctccccattggtcctacttaccatatccattggtccatgaaacatgcaagaaccattaggtattaataccaaaccgaacataaccgaactaaatcgaaccgtacaagtctagattggttctgcttaatttgac

SEQ ID NO: 5697 - DNA, 1002 bp, Arabidopsis thaliana landsberg
tgatctctttaagaccttaatgaccccaatcgattgattcgtactccaaccatatgggcttaactgtcactatccaaaagcagccgaataattcaacagtcaagattgacttgtgtcagtgtatgacaggttgcttgacttgtgtcatcaagccactaacccagagaagaaccttccgggaagacttaaaataaagtcttttgtcaatttcgtgtatttcgggatggaaaattagactttaatttgtaataggaatttaattcggtttagcgttgaaattgtaaaccgcttcggaaacaaggcttttgagttttgagagagaaattagaatttaattcggttcgggcaaggaatttaattcggtttagtgttaaaaattgaaaaccgcttcggaaccacgcgtttttttgtttttgaattttaagagaaaaattgaaaactcgtgtttaacaagaattaggagtcaaaaaagtcaacacgaacttttgatggaaaaaaaatgaaaactttatagtatcctaaaaataaggaaactgaagtcggtgtcttaatctaatccctataaattctctaataatataacgccaaccaaataaaattcatttgttatctcactttctctttcagaaaaacaaacagtttcttagtttcgttcgagatgagcggtgaagtttggagatggaacaagcaagcagagatgaattcgataagagattgtttgaaacattgtaattccatcgctatcgacacagagtttcccggatgcttaaaggagactcccatggacgcaagtgatgaaattcgttatagagacatgaaattcaatgtggacaacacccatctcatccagttagggttaacgctattcggcaaaggaatcactaaaacctgggagatcaacttgtcagatttcaacgaatctaagagcttgaaaaatgatgaatctatagcgtttttaaaaaacaatggtttggatctggataagatcagagaagaaggtat

SEQ ID NO: 5698 - DNA, 948 bp, Arabidopsis thaliana landsberg
atcacacaacatacagctttcatcatcccccccaatatttacttcttttatttatttctagaaactgataatttcgaacgaaacagatttttatttttaaaaaggaaaagaaaatgttgttataagtcggaaaagaaatccacagaagcatgacaagtttatcttctaaatccaactaacctaaattctctccctctctttacttttttttctttctcttgtcggtgattttggatttttctcctctttccatcaccataataccacctgcaagttccctccttctctttcctgctccgacatatttattctctgcctctctctctctctcaaaacccatctcgaaagtctttctctttcgagggtttagatcctccatggaaggcggcggagttgctgacgtggctgtccccggtacgaggaagagagacagaccttacaaaggaattaggatgaggaagtggggaaagtgggtggcggagattcgtgagcctaacaagcgctctaggttatggcttggctcttactctactcccgaggcggcggcgcgagcttacgacacggcggttttctatcttagaggacctacggcgaggcttaacttccctgagcttctacctggggagaaattctccgacgaggatatgtcggctgcgaccatcaggaagaaagccacggaggtcggtgctcaggttgatgctttgggcacggcggtgcaaaataaccgccaccgtgtttttggtcagaatcgagatagtgatgaggataataagaattttcatcggaattatcaaaacggtgaacgagaagaagaagaagaagatgaggatgacaagagattgaggagtggcggccggttattggatcgggttcacttgaacaaattacccgacccggaaagctacaatgaaaaatgggaaagcaaacattaaaaatatatagtttgga

SEQ ID NO: 5699 - DNA, 4148 bp, Arabidopsis thaliana landsberg
cattgtgttaatattgtggatcggttgcataatatacatctacttacttagagcagatagttctcgttttatgtttagacttctggctagtgtatataccatcactccacatgtaaatattgagctgttttccatacggattttatttggctccttgacagttctcatgatctatgaaagaataaaggaaatggaatccgtttctagtcatgatcaaaggttctccaacaaagcctcacatgctctagacctaaagcaaactctaatgtatgggaaaaagtagaatcctttttgagagcaggcaacgttttccatggtgaaactgtagagaggtttcaactcaaagatcaggcatgccctttccagttttagcatcatatgtctgctcccagacaaactccattggtgtgtccttagggccagctgcaaagagaaaagtatgaatccttctataagaaaaccgctactatcaagtttgttgattatgttgatagcaaacgaattatgttgattctatgtttatcttatagccgatctatgattatgtttttttctcagatagctaacagatttccactatatatttccaaaatccaacgtttaaagagatattgagcttctatgtaccagttgtgggtcgcggcgttgcccttatctttagaatctctggtcggggaattatggaaccagatgtgccagtgcctctggctactcttacttttgttccatcttctaggtattttacaccaaccttacaaggcctcctgtggtagaaaagataatagattaataagtgatctctcgcttgagcaaaagagtaattggagacagtagtgcagagtgaaatcatacccagtgacaggatcaacaacttggacatttgaggcgtgaagaggagcctctacagtgaaaattccaccttcgtgatcagggcctccctttatatgtttcttgatctgagaacacaggaaaaaaaaagcatcagcggaaaacatatacaagcttcagtgagtagacaaagactatccgagcagcaaggtagaacatccaaaacgataacagtttcaagataaacaattcaaaagaattgtgtagcgaaatccatggaactagagtcgctttgtgatttagtaaccgtctacttgatgcttggattaaaaaaatgagaatcaaatgaaaattgataactctatggttggtgttgagctagtgatatgatattgattcagtactagttcatactctacaaaccaaatcaagaacaaaaaaatcaaaaaatgaaattgtacattcattctctaaatgcatgagacagagcaaacaaaagatatccagaacaagactatctcaccagattcttcccttcaacgatgacacgattttgggatcgaatgacacgctttatggttccagtctcacccttatctttcccacgaattatcattacctgcacataaaatcataccccagaaacaacagatcaaaaatgaaaccaaactaatgaacaccacaagaagaacatgagtggtgtactcacattgtctcctcgaagtatcttccagtgtctgatgagtttctcagcagctttccaacccatagctgctactctctttgagaataatcctaaaaattacatcacaacaaattcacgtctttcttctaacaaaaaaaacaacgagaaacggaaagcatgaagaatccaaatcaaagaaattgaaaatggcagggccaatttcgagggttttcaactgcggaaagccacctaaattagggttttttcacatcaaagatacgcaaccaaaaattttatacataattccgatctaattcgaaaagggagaaaattgatgattagaaatgatatcgccgaaattgacaattaggatgcgaaaacaagtttggtctaatagaagaagcttgcctctgagaattaatcgagagatcgaggaagaggaaaccaatggagttgaagcttttttgttttccgccgacggtgcaggcagcgttaaccacggtggcgaagaagtcgtcagttttttgattatgagtgtaaaaaagataaaccctaaaacctctcatgtcttcaaacattaaaacgacaccgcattcgcaatttggccaaaaaaattataagtcactaactaattaggtattaacgattttaattaattgggatgagacgatatatgctctgttttcttttctttactagagatgcactgttgatgtattattagagaccaaattttttgtattccgatgtgttagaagttcacatttttatatggtttgaacttggaaggtaactacgggattaaatatgcctggattatatcgtgtatctaaatcatgatggtgtaaattcgttcttgttttgcttttgctttgaatggatgttgtggttagtgtggactaatccgtagcggttcagtccataccatttttgggttggacaacaaaccgatgcggacttagtttaaagactatccgcagttagtccgatgcggttttttttttttttttttaagtatgcactattacggattataatttatgaatggtaaataaaaagcggtccggtctataaacgattttatctgtttggaccgctgtaatcattcaaagtttgtttttacaaatttacccatgaccactgttgaatctaacatagagaagaattgaatgagattgaaaattagttgatgcaggtttctgacattagaaattacttgcctcctgcaacatgtacattgattgaatctacttgctcttatgtgactccattgcgttggccatgtgacatgacttcatcgacattcaacactgtagtagaagaaaactagtgacttaaaccttaagccaaatccaaaatatttgagatttttttctatttttacgtttacgtgtttccttgaaacgattattttcattagttgttctaactataaacgtcaataaaaacatagaaaattacagctggcaaaatatttcttagcctatatagacgaagtaataacagcttacaaattcactgtactcttccaccaaatccattaatcatcatcttttcttcacagagaggaaaaaaaaaaaatggcgacagattctcaaccaaaccaaaagctaacgcttccgttaaaaacaagaatcgctctcaccgttatctccaccatgaccgataacgctcaacgtcctgacggaactatcaaccgccgtttcctccgcctcttcgatttccgtgctcctcccaatcctaaacccgtcaacatcgtctccacctccgatttcgtcgtggatcaatcccgtgatctctggttccgattgtacactccacatgtctccggcgataaaatccccgtcgttgttttcttccacggcggtggtttcgctttcctcagtcctaatgcgtatccttacgataatgtatgccggagattcgctaggaaattacctgcttatgtcatctccgttaactaccgtctcgctccggagcatcgttatcctgctcaatacgacgacggtttcgatgctttgaagtacatcgaggagaatcacggttcgattcttccggcgaacgctgatctctcgagatgcttcttcgccggagacagtgcaggtggaaacattgctcacaacgtcgcgattcgaatttgtcgcgagccgcggtcatctttcaccgccgtgaaactcatcggacttatctcgattcaacctttcttcggcggagaagagagaacagaggcggagaaacaactcgtaggtgctcctttggtttcaccggaccgaacagattggtgttggaaagcgatgggattaaaccgggatcatgaagcggttaacgtcggcggaccaaacgcggttgatatatcgggtctggattatccggagacgatggtggtagtagctgggtttgatccgttaaaagattggcagagaagttactacgagtggttaaagttatgcggtaaaaaagcaacgttaatcgaatatccaaacatgtttcatgcgttttacattttccctgaattgcctgaggcgggtcagttaattatgcggattaaggatttagttgataagcgcgtggcttcactctccgcttaatcaccttcgcgaatgatggattttcaattagctcagtgaaatgaaat

SEQ ID NO: 5700 - DNA, 505 bp, Arabidopsis thaliana landsberg
gaattcctggatctgctagaaaatgtaaatggcttcccatccttgcaaacagagatatactgagcctttggaagactgtataaatgagcaagaactctacacacttcgtcaatactagatttatctgcatcaaatgctttccaccacggcggattctcagggagtggtacttgaaacctacgggcagcagcatacactaccccacaagccacaacctcacttctgaaccttacacagagggttgtacgcagactgcattatagacatatcatgagattaagataaaatcataaaggaattatcagatattgagaaagtataacaaacatactcaaaatcaaactagaacaggagaaatgccaagcttcaggataaacatcaactctaaaacctatcaacactatgatgtgtagctaactattaggaaatcatatgaaataatatccatattaggattttgagaatagagattacctatcattggctaatttccaagcttcttggg

SEQ ID NO: 5701 - DNA, 643 bp, Arabidopsis thaliana landsberg
gttctaaggtttgaaattctatatatgtatttagttatttgtcaatattttctataatttcatatttcagatttggtatataaccaagaagctccaataggtaacacaaattactaacattttggtattataggtgcttctctctatatgctctcttctaacagatccaaaccctgacgaccctctggtgccagagatagctcacatatacaaaactgacaagaccaaatatgaagccatggctcgaagctggacccagaagtatgccttgttttaaagctcacaattcctctttttttcctttttattttggtttggtcttatttgtaataaaaaaagaagaagaagaaattgttataattttaatacaaacatatataatatataaagtagagttttcaaagttgttaactcatatgattgatgagatatcgacatgtattaaatctaattttgttaatatataaaaaatcttctaaccctatcgggaaaattaaatatatacataaatcacaaaaattatttatataatcaaaaaatttaattatattttatataataaaataattcatattattagcgaatttgttttttaaaggaccgttcaatatgttttttgggtattttgcgaaattttgtattt

SEQ ID NO: 5702 - DNA, 603 bp, Arabidopsis thaliana landsberg
tttggaaacgaaaaggatatttgcaaaagagtgatgtcttgttttatctgactggtcaccttaattctcgcgaacagaggagatatactaagcctttgtaagagtgtattgatgagctagaactctacacacttggtcaatactagatttatctgcatcaaatgctttccaccagggtggattctctgggagaggtacttgaaacctacgtgcagcagcatacacgaccccacaagccacaacctcacttgtgaaccttacacaaagggtttgtacggagactatcattagccaaattccaagcttcttgcctcaattctggaggtgtttttagtgtggcgaggtagtttgatgtaaacttatgaggatgttcaacatgacaaacaaaacccatctctttcagtacatgtctctcagttctgcttaattcaactttcaacgcagagaacttcttggcatacatatccagatgatctaatgatctaatggtaattcaactttcagtatatgtctcgcagcaaactatctttacatcaaattttttacaactcaatgcacaaaatactgttcctcaacctaaaaataaggcaattagtcaaaaac

SEQ ID NO: 5703 - DNA, 587 bp, Arabidopsis thaliana landsberg
ttaacaaagcctcttctacctccacttttctagtatcagctactccagatgctttaagatcctgccttttgtgctcctcgattacgttttcttgggatttcaactttgtaatcaagtctttagcttctgtgtctttctggtttaacttttcgattgcggtttccttctcagaatccagatatccttcaagttcttgaatcttgatcttgagctggttgtttgtatctgctagtaactcattctccgcagacgactgatcaagttcttcttgcaaagacagtgattgaccacatgcttcagccaatttcccttcatatactcttattttctcctcgagatctttcgatttctcagtcaaagacttggcctctgtatctctgctactaaaatcctccattgtcttttgaactttaagctctgagtgtttatgcaaagcttcaagctctatgcttcttgtggtagcttcgtctatttctcttgcttgcttctcaagtctctcttcagaggatttcagcttctccatcacagcattaagattttctgacaagtccctctctttctccatttgcacgcttaaagtagcttca

SEQ ID NO: 5704 - DNA, 3213 bp, Arabidopsis thaliana landsberg
agttgtgagagagagagagatcacatcaatggaggttcgctagggtttgtttcccaacttgaaattgacccgattcggagaacaattacggagattagaatcgaaattggatgcaaagagtcaaaattgattaagcccagtttcgatttctacaaaaatcagagtaatttacagagaagaatcaaatgatgacgacgaagaagaaagagagaggattgtggagaaagtgtcattggctacgagagagatatgagaaaatgatcctctgaaacgcggttaccgtaacacgaatgttctctcttgcttttgtgatttgtaaaattctagaaacgtacaaatgctgaaagttttttttttctttctttcttttctctttgcgtattatttatatatctttgctattcactgattttataaattggaacttattgagtaagattccaaaactattaatcatagagattattgacacttcattatgtttttaatcatagacgtgtgggcaaaatgacagcaccttaaattatttattttgttacaaaatccataattaatcaactcatcttggttatttaattaagagcacattcattataatttttcttttgccagcactataaattttctttgggccaaaaacatttattaaattttgtaagatgttagatttttggttaccaaaagcttaaattatgttaaatttgggaatttaagagggaaatctagaataattgtttgaccatcctaccttgaattataatgtttaataattctattcaatgttcaaatgaagatataagaaagtttctccatacaacgataaaatgaaaataaaaaccttgaaaaattcaaaactttggtcgctcatggtgaacttgaccttaaaattaaaaaccaaagactttacaaagaaatgtagaagacactgctcgaatttgtagaatattaattaaattgtcactaatggccgtatgttttcaaaaaaggttatcgacactaatttgcaatatttgaatcggtcgataaggcccataagatagtatagatgggcccaagtttctttcgaggtgacacttgtgacttgtgatccgatgaatagcttgttttttttctttctaagataacctaatttgcattttgtttgttgatatctaatcgaaagctgctggataatcagctcccattttccctagtgaggaagtatgtgtcatagctaccaagggcactgatccaggttagatcaacctttgaacttggactacttaattatctctaggtctatgcataagtttgattggcacagtgattgtttaatttgatgtcaatgtcgacttaacagtagatgtgtcatgtgtcatgtgtgcgagtctcagactcgcaagaacagtctcaactggagtatactagggtgatccaatactaggaaaccatataaaaaaatgaaaatcttaaaacacacaaatcaatataaccattgaacaccatatttttgcaactaattcaagcaacaactttgcttggaccgttcattgcaaacaacatattcccaccacttggcaaatagacgacattgggagaattagagagcgtaatcgcaacctctctagccgcctcgacccttctgagcttgatcaaccccatcccagcctctgcagtcgctttcgatataacccgagccgcctcgctctctccttctgctctaatcacagccgctcgtctctcctgatcagcctttgccactacgaacttggaccgctcagcttcttgctgtgccacctgcttccgctccaccgcaagtgagaactctttaccgtatgagagaccagtgatcgacacgtcatcgagaacaatgttgaactccttagctcgcttgatcaacgtttcgcgtataagagctgagacctgtggacgttctgttaagagctcgtcagcgttgaactgagccaccaccgctttaaccacctcgtcccgatcgctggtaggaccttttcaccatagtcgagacctaagttttggtatatatacgagaggcgcgaaacctaacacgaacccacggaaaacagttatatattattttacatatatatcacaaaatcttattagtgaaattttttggatattcgcgggaacttacatcagggcgaaacataacacgaagtgtgaggttgaccatctgaagatccttagttccagagtcggtattgattttgtagggtttggtccgaatgtcgaagatatacggcttttgcacccacggaatcttacgatgtgtcccttctcctactggttcttctagaatcccttcgaatcggtggaacataacagctctctggccaccatcaacggtgaacattgttgatctcacagccgctatggcagctcctagacctagagctacctttgtgaactttgaccaaggcatgattggctttgaatgtctcctgtatggattttaggtttctttttatgttgtttagggtttcttttcttgtcagataggtgagaagtagttagagaacgcaggagatgaggttttataggaagtttttttttttgcgtgaggcagaagttaaggagaaagcttattatattgggcgggttcttatttagcgggtcggttttctcacgttctgttactcactcggtcaaccatacctgccacgtgttacttgtatgcattactattggtgggcttttagacgggtcttttaattttccggtccgttactttttaataagttttaccagttcccgcgatgcactcgctacctatctctatcttgcgagttaaaccctcacccaaaaatcttcgacaaaactcgaatcttgatctaaatccgagaacgaacattataggattgtgtagatttatttagttttattttgtgaatttgcaggtataaggttgttgatatgaaccttattcgaatgtttggggattccatttctagatccaaagatgtaatgcgatttgtgtgccaaagaacatttgctacagctgctggtaaagcgaagaaggttgggaggggagatggaggtaatgatgcaccaaaagcatcgaacttgagcaaagagatcaaatcgagtatggttgttagtgctaatactctgaaagatggattggaccctaagatcttgcctaattcagatcaccctgattatttatggcatctgcttgataagagaccggcgcttagcgaacttagaaggaag

SEQ ID NO: 5705 - DNA, 2175 bp, Arabidopsis thaliana landsberg
ctccttcttcctcattggttgtctatgtttttatatataatctaggttttgttagtccaactctatctttctctctcttgatttcaacaacttggtttcaagttcataaacaagagagagaaagaattgttagtctccatgagtaggttatgttatcccataaccccaattggctatctatttatcacctccatccatttatactcctagaaacaacaaatctaaaggcaacacaacacaaatagtaccttctaaatgcttctatacttgctcatcacttgtctctctttcttcttcttttccaaatctttatcctttcctcaatgggcatctaaaaccaaaaatttgctctccttctacttctccaagtatttgtttacaaacagtctacaccagatcacacccgatctagcctctccggtgctcggaaaaatgtcaattcttgacctccctgaccttccactcgactgcattcttgaacttcttccaccctctgaactatgtaccatggctagggtctgtagctcgttaagagagagatgtgtaagtgatcatttatgggagaaacacttgaagactaaatggggaaaaatccttggaccttctgctcacaaagaatggcaatgctatctatcttctccatatcatctcgattctcctcatcacaaaactagtcatcttggtttggccaaaatcatatctcttatgcgatcgctttcatccatttttcgagatgatgatcataggaggagatatccatcttcaatccctcttgactctaccatgaacttctacctatccctcgaaacaggtcgcttttggtttccagctcaagtttacaaccgtgaggtaatcatagatttcataaacatatatagctactccattttattctttatgggtttgactaaagtagtgagggcttttttggtgtaagagcagaatggacatgtagggttcatgttgtcatgctatgatgctgagctcagctatgacactgacactaatacttttcaagctaggtataaaatatttcatgtccatattcaacacaatattttgcttattcttcatagaaagctataaactatactgtattgaggattttaggtatccaccacatggtaaaagagcaattgcggttgaaaaagacgtgacatgggagaggataagagcagctcccgttgatgcatcaccccataatctctatgtgtcagattctctaaatgagttaaaacccggagaccacatagagatccagtggagaaggaacaaagagtttccttatggtaagtataatctataatgcttgtggtttggacataatatgactctaaagcacatttgtgtaatgttgttgtgtaggatggtggtatagtgttgttggacacttggaatcttgtgatggcaatcttaaccattgtcaatgccataatagcggtgagtcctcaactttatatttctgtttctgcttacaaaggctattaaattccatacacttagttgaataggagaaaaatgtaagacacaatgattctttatcgctcctaaaatctgtttctttcctttttttgccttggaatcaccacaaaacgtagtaatcaattaaaaaagacaaggttctggaatgtcttatacccacttgcattagaattcaacataaccccctaatcatatggcattagcctttctctattaatgttgtgtcaaaagtatttatgcattcacatgttgtactaaatggtaagtgttgatatggtgaaaatagagatgatggtgttggaatttaaccagtacacagtcggatcaaggtggagaaaaacgatgattaacaggagagatcatagagagaaaggtaacgaggaagacgggttctatggaggaattcgaaaaataaattgtaaagaagatattgaaatgtggaagcgtctttggccatcctccatcttggagtaggatgagtaggatgttaatcttagaagtgtttgctcttgtaccaatgtacaattgatctttcattatttattgataaaatagtaaaaatatgcatgaaacttttgtgtcacttgaaaatgaggttgtttgatttgagaagaaatatgggggtggtgttgtatagatatattcaatacaattgatttaaatatatatgtcatcaaagtagaatttgttttt

SEQ ID NO: 5706 - DNA, 579 bp, Arabidopsis thaliana landsberg
acatagttgaaaagggtgaacattgaagagagccaattcaagcaatgccttttcttgttaagattggtcccaaaacgacaaatgatgatgataatgtgatgatatgtcttgattttccttgacattttgataaatgtgtgtcttcagttgatgttgaaacctccacttatgtcctcatcgttggaatctgcattactaatgggtgtggggctcaacaatgattctgtctctttatcactccaaaaaaatctcttatttttttcattttgctggcacattgcatgaccacataaaagtagaaatcacatcgaaatagataatttttgggatttctctctgcccacttgcatcttgatttaacctttgtctactgataatgtgttaaacgagtttttgcattcacatgttgtactaaattgttaagtgttgatgaatggtaaaaacagagacggtagtgttggaattcaaccagtacacagtcggatcaaggtggagaagaacgatgatcatgagagatcataaagaggaaggtaacgaataagacgggttctatggaggaatccgaaagctaaattgtaa

SEQ ID NO: 5707 - DNA, 800 bp, Arabidopsis thaliana landsberg
ggaagatggcaacagagcttgttgtccaactaatttagtatttagtaatgacacttgattctgacggtaatagggccatcgaatatttgagcatgaagtagatcaacagttgaacctgccgaccagaaccgcacaacacagctttcagccagataaaactttaaaggaaatattccgagaactttttatcacgaattcatcaatgtcttaacagatgggtaagaaaagtgatgaatgataccttaacagatggagtaaggagtcggtatgcttctatgaaagaatttgcaggtttgtgagaatcttctggggattcttcactttcatcgcattcctcttcatcttctggcttgattcctgaattgatcagcaacggcaatcgaagaccttcctcgactctgctactttctactctatctgtcgctgcatcaaccaagaatccgttcaatactctttaataattgttacagacagaaaagaaaaacagcttttactattaataatgacctgatgttgtttcatttcgattggttttttctccatcctctgtgtcacgcaacggctctctgaatgaaatgcatagccataccaaatagaacagccaagccacagccataacccatcccggcaaagtagattggttaaatgtaaacttgtaaaacttgaatttgatttggagtaaaccggcaagcgcagggccacaagccattccaagagcacttgcactcacaaaacccgccgatgcctgcattcggattctcaaaggcacacaatcgctgaggggatcctctagagtcgac

SEQ ID NO: 5708 - DNA, 1943 bp, Arabidopsis thaliana landsberg
tctcaatcttgcatatcttttctcttactttctttcatattattcctctttctttcccccaattcataaatgtttccaatgtgattagttctataccaattatagaaaccttgagttactgttacatctaaatgagttctctataaatactgaaatgtgaaagtgattactttcaaaagcactaaccacctacgggttacaaaaagtagattaaagtcatactatcaattttgagaagttatgacattagatattatttcaagagataaacatatgatgttgtagaaattgtattcacaatagttttcaatggttgttggttgatgacaaagataatagaaggaaaagttagaggaaaattaaaagagagcattaaaaacaaaggttgttcatacatacataaatggagatcgagatagaagaagtggtccataagaatgtcagctatgtacattaatacacacgatggttatatatgtattagtcgtaatcttctctttgctactatatatagaccatgcatttctccaagtaacttttgattagaatggtaatttcctacgacaacaacaaaaaataggttatggaattctccaagtaacttaggattctatgcaaagtatttgcagaaccagcttgtattcatgtgttaaatctaactagtgttactacaagaaaaccatcaaacgtttacgatgaaaatattaaattgtgaattcatatggtacaacaatattagtcactttcaattttaatttttttcagtaattagattagaatgataacacttttttgtacaactaatcctctttagttatgttttcatgttataaagtgtttcaatcacatagtagatagtactatagaaacatttccatatgataaaatgattgatggtcatattcaataaccaatccaatcaccacgttaaaactcttacccccacatatacaatgccataataattatataatggccacatcttgattggattgttgttacaaggggttaaaacacttgagatcaatatcttttttcttttaaatacacaaagtaataatcatgtgatctttttatggcttacattattgatgatggtcgtggtaatacaaatgccacgtcgccttcataagttcatatgttaaaagctaatataaaattgtcggttcaaatcagacaggatatactcatccgacggctgaaggaaaacgttataataaatctaacggccaggatcaactcaaggttacttctcttgtttttgtttgggctcagaaggggcccaaaataaaaacaaagaaaacagggcccaaaataaaaagaataaaacatattcgagccctctaacttataaggtttcagagaccagaagggtaaattggtaattaccgatgttctaaagttcttctcgctcgtaggaaccagagagattctgtctgattaatgtggggtttatggttatgctagcgagatcaaagctagctctagatgtgagcagaagatcacagtctttgcaaagaatctgctactacgcaagtctctcctctagattttcctgcggcggcggagatgatggcggcggcagctcaccggaaatcggtggtaccgattcagcaaacgaatgggagaagctccttaaaccattcgatctggattctctaaggaattcatttcacaagataactccctttcagctctgtaagctacttgagttacctctcaatgtatccacttcaatggagttgttctcatggaccggttctcaaaacggttatcgtcactccttcgatgtgtatcaagttcttataggtaagcttggtgcgaatggtgagtttaaaaccattgatagattgttaattcagatgaaagatgaaggaatcgtttttaaagaatctcttttcatttcgattatgagagattcgacaaagctggtttcctggaca

SEQ ID NO: 5709 - DNA, 1617 bp, Arabidopsis thaliana landsberg
ttgttactaacagatctccataacgaatcaggagacttactcaaatcttgcttctgcagcgttttcgccaaacaccgtctccgcggcaacggctcacaagcacgaagaatcaacttctggccaagactccaatcatcaggacatctatcaaacagcttatatgacatatactgagaaagcagatccgtagatttctcacaagaatgtccaacggaagacaccatttcagtgattccggtacgcgaatctttccctaaaggaagctgatgacgctggaggaacaatttgagctcaggaacaatgttaggtcgagagatatcaatagattcgtaaccaagcatctgtttctccatctgagcaagcttgcgttgagacgaatcgatttctcggagaatcaaagagagatgttgagaaacgagtgagatattgttggagctgtggagaagtggcgagtttgcttgggaatgagaggagaacgcgtataaggcgaagagatttgtggtgacgacggagaagagcatgaggaggttcacggcggatgaacaaattgatgttcgtcggaatctggctgttccatcgccgatctttaaagatacagatcccatcttcaatgcagtgaaagagagaagaagcagagctcaagctaaggtttgaggtctcactatataacttggatcttcttcattggatctgcaagaaatttcagattccagcttgatttaacaaaaaaaaactaagagtacttcgatttgaagaatcattcagatctagcagaaagattcaacaatagaaattgcgaagaacagaaacaaaatcaaggttcatgagaattgcattaccgtgatttcagcagaagagacttggtgaagtttactggagagtgaaagaaatcgccgacatgactcgagagtcaacacgtgagtgactatatgattctatttttcatgggcttttttatttttaattgggcttagtttttaatcaagcccatataattacaaacaaaccttttgtctcgttaagaaggttcaaattaggggaaattaccaaaaaaaataataataatacaaaattggaaaccaccggcgtgatttctggttggggaaaaaccaccggcgcacatattttttcggtaatgagagattcttcagcgacgtgaaatcaaatcatcactgtttctcgttgcggtctatatgaatgagatgtctctttcaatagctctgcataaacacaaatggcgaataaacctgatcatcatcatcatcatcaccaatcttcaaggagattgatgcttgtgttgtacttcaccagtgttcttgggattggattcatcgcagcttttctttgtctctcttcttcaattccctcagtatccgctgttttttcaatctgggttcccgttaaccggccggagatacagattccgatcatcgattccaaaattgttcaaaaggtccctttgcctaatcttttcaattgatcatattcttagtttgtagggtttatcagctattcttactttttgctttatcttcctttctacgtttcaattgattgtgcttttagggttttagctatttgtgaatttcattctaagtttcaccattaaagtttgct

SEQ ID NO: 5710 - DNA, 1473 bp, Arabidopsis thaliana landsberg
  unsure (1)..(1473): unsure at all n locations
gactgtaatcactaacactttgaataatggtgctccgtttagtgagtttatagctgcgagagggctctttccgttgttcttgagcttagaccatagatttccttttcttgacaatgtgtttgatcttattcatgcttctagcggattagatgttgagggtaaagcggagaagctagagttcttgatgttcgatcttgatcgggttttgaaaccccgtggattgttctggttggataacttctattgtgctaatgatgagaagaagaaagaacttacacgtatgattgagaggtttgggtataagaagcttaaatgggttattggagagaaggctgatgcacaagtttatctctcagctgttctgcaaaagccagtgagagcttgatcgggaatgcaaaaggaagttcgtaatggtaagaccgaccataagagtaaaactctctatttatagttacatttgatcataggttataaatttggaggtcattaggtgatatttattccagagaagaagaataagcaattatatatttaccagggcaattggagaaaatcatttgtaaaagtttttcagtataatgtgttgaaattttgtcgattattattactacttttctgttataatatccatatataccatacaaataaaaatgagtaccattaattgtgtttttgttatacctgaaataaattctcctcatgcaaccaaagccagatgcaagaaatgccgaaaatagacaacaaaatcagagtacaaagttattttttattgagacaagaggaaaaacataacaaatgatataatctcaaaatcatgtgtgattattatgaggcgaaaaaaacaagttttcgtgattatcctcataaaactctctagtaataatcgaaggaaaaagaagaacgatgaggtcttttcaccttcaggtgagaactggtctcatcaaagatttttatgacacataaaaatgatgatacgttattacccagagaaaggctcttctctatttaacatcctttgttgaaaatacgactgtgtgtggccaggccaatgcaaaagcttttcagcggcgctttagttaaccacgtcaagaaccagcttgcgggacttgagaaccgaccatttcagtcgcctgtagtaagcagcttggagaagagcgagagagagtaggaatatccatttgaaacccatctgcaaatagtgaaaccaacattaaccgccatgtaaaatgtaacctcaaaaaaaagtcaattctttgtatcggtctggaaggtgaggtttgtgtctgcaaaacgagtcaaactgtgttcacagcatatctaaatgttattatcttagtagcagaccaagaactagtagcacttcacacttggtacaacaattggttctctaagtcaactngatcgatcataaactaaatctagtattaattgcttcgtctaaggagaaaaatacatgttcaccagcgaacagag

SEQ ID NO: 5711 - DNA, 3260 bp, Arabidopsis thaliana landsberg
tttttttttttttttggcagtcagattctttctctatttgtcgagcacatcattttccctaatttcaaaccgtcattgaggaaacatataactttgttaaaccattttttccatttacaaagaaagacaaaaattgtagttacaaaacccattaggaaaaaatgatttagcgtgtgctttatttaatgttacccccactttacttaccccagtcattaccttcctttcgtttttacattttcacttttgtcatcgattagtgttagttttccaaaagattggtcaattctttattatagcaaactatctttgcagaactttaaacgaaattacatagctgccaaaagacattatacccatgcatggtcatcaaacattcataatttattcaaacatttactattcttaaggaatcatattcattgtcacatacaattcctctattagccaaattcatttgatcaaataactagttgtgatgacaaatcaagaattcttcctacattctcttaaagtatctctctagttccacatgaactctcctacatttaccacatagtatgattcaaccagaaaaaggactaattaatcatcgctttctttccttgtgtctggttggttgatttggagcggcactaagcttggaacataagaagagcacacaagtgggcgacaatatatgtgtggagcatatttctcaggtcttccgagattcggagcctccccaatattcacagatttgaagtattcatcttgtccgataatgtaagctgtttggttgcgacatgtctcactccctttatattcgtcaagatcgaaaaccacagccacttgattctcctcgttaatgaagaaactcccagcttggatactaattcgacaacaagagatggatctcaaaaacttggtccacgagacaacaccgggatcaatcttattcgtaatccaaatctccagttcgccagaaaccatccagctttgatgtaataccacgagctgctcttctctgacacaagataaagagaacaaatcttgtggataataaaagccaaacggaagctgcaaccgcggtccaaatctctcagttgtaaaatcaaacgagagtaaaatagcctcaatcttccatctactatccactcttattttcccttgagccaagatgtatgtatttcccttgaaagacacgccacgtttattagaccctatataccagtcggaagtgagatcaaaactctttcatgaattagaacgaaaattgtatgtgtggagcataagaagagcacacaagtgggcgacaatatatgtgtggagcatatttctcaggtcttccgagattcggagcctccccaatattcacagatttgaagtattcatcttgtccgataatgtaagctgtttggttgcgacatgtctcactccctttatattcgtcaagatcaaaaaccacggcgactttgttctcctggtcaatgaagaaactcccagccatatcgttaaactgaaaaccagtgagtggtctcatatccactttcaaaaaaatgctccacgacactgcattgggctggatattagtggaaacccaaatctccaagatctcagatggttccgagggctggcgctggcacaagacggagagctggtcttctttaacacaagagagagtcacagtctctgcgtaataagagtgaaaaggcagaggaagacgcggtccaaatctctcagccgtaaaatcaaaacagagtaaaaagtcttcagtctctgttacatctatttcttccggtccctttccttcaaatatatatctctctttagcgaaaaagtaagtgtttcccctgagagacacgccacgttgaaaacactatatgtcccagtcgggagtgacatcaagaaccctccatgaatcaaggctaaagtcgtagatttcgtacccgaaaaccacgttttctacagggaggaaatcatccacaaacctcaagattttgtgcttacggtttttgtcatgtccgatagcataacagtctaatatgtggaaattgtgtctgggttggatccacctcgtttgctccaaatacggattccagaccaagagcctcgtcgtgtcgtttttgattatgcataacaataaaccgtcgctgtgaaagattttagatacctctatttgatcaagtatacttacctgctttatagatggtggctcgaccaccaagtccttgcggagatcaaatctcaaggaacaaaccctagaatccatcatcatgaatccaagaaactgcttcgctttaccaaaaaaaaaccattttttggataaagcgttccactttttgcaaatagatcgcactgttctcatagacgtcacagtaaccctagagagaatctcctcaaccaaatcatttggaagatttgacatcatcatcatgatgattgttgtttcaagtttcaaagaagaaacaacatcgcaccgataagttaggtcaagtttcaaaaaccttcttgagaggctacagatagatagttacataaaccctgatttaattaggatatatatggagttacaaattaaaattaaaattcaatacttgataaagttaatttgtaagtatagttgaataaaatatataatttaagaatgctatttggaatataagaaatacttgataaagttaatttgtaactataatgaaagactgttgaatttcaaatagaaattttacaagaaaaagataattctagtaggaaaaggagataaacgaaattctaaagtttgctaaattcaccaaattaaacctcaagtttgcctcgtcccgaaaaaccagtcaaaattgtcttcattgagccattttagatcagaaataaatagccaccatatacagtttcggttataaacgttagttatgtgttcttttctttgtctccttcatctattttgaatagaaaaaatctcaaaattttagccgattttggagacataatctcttgggcgtgaagatgatttgattttgttttgtttagtactggaggaattgcttataaccatgttgaggattggactgaatccaggatactggtataacttgctcgacccttgtcaactctcttttttgtaaaatgtaaagtaaatgaattctctaccataagaagaagtattaagaaacaaattaatatcatatgataaatcttgttcaaagaagatgaaatcaaaatgaaaatgttaactatataaatctgttacttgataatcatagagcatatgagcacgcaag

SEQ ID NO: 5712 - DNA, 429 bp, Arabidopsis thaliana landsberg
ctggtgaccaccatcttctgtctcgaggaagccaatgttcctgtcacaattggattttattttataaagcgtatatgaaaattattttagtttttaagtatatgaaaattggtgtatgaaattggtttatgaaaactttttaagaaagtctataatgcttttcctctgttaatttgcttcatctaattaaggtcatattgcaatgcagacaagtactcatgttgctttattataagttccttcttactgagtctatatgtttttcctctgttttcttcatcttgttttttttataacaaatcctcggttttcttaaagaagagaaaactaaagtaatgacaataataaaagtgttttctatgtgttttaacttcttataaacttttcatcgaacgaggaaaaagaattagattatcctttggtacagat

SEQ ID NO: 5713 - DNA, 7768 bp, Arabidopsis thaliana landsberg
ctgcagggaaaccacctaaaaatgatagaattaatcttctcatattagttagtcttgattcgtggatagaagaaatctttgcttgtacctttttagggcaccaataagattgtgttcttccttgtagttgaaggcatcatcgaatccaaacttgttcttgaggagatcaacctaaagaagctcaacaaatcaagatccaattacgaaagctagagtttcaagtaaaacctaccttttctttactcccagcgcttccaacaacataacaacccatcaacttagcaaattgtcctacaagctgaccaaccgcgccagatgcagccgacacaaacacagtatctcctttctttggagtacatatctcgtaaaacccaacatacgcggtcataccaggcatacctttcaagaacagaggagagtgaaaataattacaatgttgttaacaacaacggatcataaggcctagaggaagggggattaacaataccaagaagtcctgtgtagtaagataaaggaacatctgtatgatggatcttgaaatgcatgtgagccattggtgtaataacactatactcttccaatcctactgctccccaaattaagtcaccttcttcgtaatctgagtgtccagaatctatcactttagacactccaaaccctgagataggctacacacaacacaacacagcataagtctctcacaatttttttatagatgcgtttaagcgatgaacaataagtagatgtttttaccttgccgggagtgaaggactgagcagtagcagggctcagaggatcaggtttcctcatacgatttcgcatgtaaggatcacaagacaagtagagattcttcaccaacgccgtcatagatccctttggcaccctaagatcgatggtggtggaggtgattacaaggtcggattccttggcgaaaccggttacgtaatcaagtaacacgacttgcttgttgatcgttgtcgccattttttagaaaatgtttgtttttggttcctcaacgtctttatttgtctctacttatacaagctcttctacggttagtgcggttattaaagccacaagttgaggagataatctttttatttgctaaactactattctaacaatgcaaaactaatgaagccaaacttagttgtgttaagcataatttcttgcgcttttatgtgtgatgcaaacaatgtggggggattaaacaatgttgcatactttaagttgatgtttttttaaagagaaaatccaaacgcaaagaagaacctaaaccgaattttgtatctatttgattcgaaaccataacaaacattatctttatccataaaacaaaaaccacccacacaaactctaattggataaagtacaagtatcaaacatagtttcactcacgagcaacaacaacaacttgtttcccaacattcttaccatggaagagtcccacaagagcttcgggagctttctcaagcccatcagctacatcttccacgtacgttatcttcccttctttaatgcgcggaagcaccaactccaagaactttgggtatttgtcgtagaaatcagccactacaaagccttgaatgcgtattcgtttgtagatgatattggataggttgtgtacaccttcttgattttcaagattgtactgtgagatcattccacagacagcgatacgcccgtgtgggttcatgtttaagagcactgcatctagcattttgcctcctacgttctcaaagtacatgtcgatgcccttgggaaaacacctgggaaaaagaagagaatctctcttagattagtaagagcacaattgattagatatcaatcaatgaagataaactcgttttttcttcgaaaagagttctaattgcggagtttcattggggttttctccagttcttaagtggtttccacttagattcatgcttccatttagttgtgaattgccgctttattctgcaaatcgatcctaacagttgtagacaccaaacactttgaaaaaacccgtaaccgaaccttttgagggcagcactaaggtcagattcttccttgtagttaaatgcatcatcaaacccaaacttggtcttcaggagatcaacctaacagatcccccaaaaagaagtaaaagggctaattaatctttctcttgaaggagaaccaagaaacataaggaatcaaaatatggaaatgatggtcaaattctcaccttttctttacttccagcgcttccaacaacataacagcccatcatcttagcaaattgtcccacaagctgaccaaccgcaccagatgcagctgacacataaactgtctctcctttctttggagaacaaacttcataaaacccagcataggcagtcataccaggcatacctgtcaagaacagagaaaaccaatcaggagagaatatattgaacatatcaacaaaccaaacgttcgaaactctagtcttctacattgaagtttaaaactcgacataactaattccatttcccacacaccggtttcatcattcaaaactattatacatggttatgacattcaacttcatgatctctgtctaaaattaccaagtgattccacattttccacttacaaaacaaggagcaaggcatagattaacataccgagaagtccagtgtagtaggataagggaacatcggtgtgttggatcttgtaatgtgaaaaatctggagtgataagactgtactccccccatccaactaatccccaaagtaagtctccctttttgtaatctggatgcccagaatctatcacttttgacactgaaaacccataaattggctgcaaacaacacatcaaaacctttagcaccagagactgtaagtaagaaaaaatcacttctaatcataaaggtacattttcttagatcacacagtattcaaacgaagcattgcaatgtttctatatttgaaaacaacgtttccaaatccatctctgttttaatagtgaaaatgtttccaaaaacctgggtaacaaacaagctcgaaacgtaacaatccagaacatgcctaaaacgatgaacgtcgtttttgtacctcgcggggaatgtaatgtggagcgagcgcagcagtgccgggatcgggcttccccatgcgaatgcgcatgtaaggatcgcaagacaagtagagattcttcaccagaaccgtcttggatccctccggaatctttaaatcgatggtggaatcggtgaagatgaggtctgattccttggggaaaccggtgacgtaatctcgcagtatgacctgcttattggccaccgtcgcgttgcttgaggttgccatttttctctccggtttaggttcctttgccacaaaagatgatttttgtgttcctcctacgttgaggacgtgattgtatttataggcttttgtgaatcgtacgatgatagccacaaacggctaacaatataaacaatgatttccttatgaccttatttatgtttcttgttatgacgtcataatatgtttcgtgtaataataatcaccgacgacgttacaatattgtttcataaaattttgaatctcacattattttcatacaatcacaaaattttgaatgcgtgttttaagatacaaattaagcaaactttcgaattttaaaacttttccaacgcaccaaattttgccgctagatacaaccattctttaaaagatatccaaacagtgaaaattccgcggtaaatggctgactagtgactacacatgcggctggtgcgtttgcgatttagatcctcaagcaatgaagcagcagagaaagtggagctaagatgagtaaccttttagagacatttggcttcaatttcttcaagagtgagaccctttgtctctggcacaatgtagtatatgaagaagagagacacgacacatatcactccaaatgcacagaacagtattccagctcctaacagctcctgcaaacaataccaagtgagttaagacctcaaaagttcaataatctctcccggaaaaccagaagataagaaggaactagcaagatgtatgcgagctaagtggggaatctctcgttaaacattgttctttcaaagttatagtttagttctatgtaaggaatatatttaaagagaagaagtttctttacctttagcggtgagaaagcgaatgtcacaagtgcgtttgcgccaaaattcacaagcactgctagactgattcctctacctcttaattttaagggaaatatctctgatatcatcagccaaccaatagggccaaaggacagctgcaagattgatggaaagcctcttaagatcatatcaaaaattttactgaaaatacaaacccgcagatgacattgtacggaatggaactttgatcagaaaaatctgtaagaaaatttaacctggtaacagcctacatacagtagcaatgcagctacagcaacagctggtacagttttataaaacatgtagtaggatcgcaggaggaacaatgagatcacctgttacacacgagtacatttttggatcttttagcttccgattcatgtaatcgaaacttattggaacaaacaatcaataagagaagacataagaataccattccgctaacaccacaaagaagtaaaggtctccttccaactctgtcaataactatcacagaaactcctgtcataaccaactgcaacagtaaaaggatcacatcaagtcttcgaaaggaaaatatcatttatacttccagttgtactacaacgcgtatcaatcctttcataattttttgctaaaaggatctgacatgtcaaaccagatggaagaataggaataccttcaatacgccgagcagaattgagatccgagttgcatcagctgcagcagaaaagccggcagtctaacatgtaattttaatggtaaaaagaagttaagattttctatcacgagtttcctcctagtgccaaaaattcaacttaagtagagatgaaaagaaaaacctgtagtattgatggtgcataatatagtacacttggttgcccagttatctgtcattcgaaaataaaaatatagttagttattgttcattttcttaaggaatgtttgatgaattgactgcaccaacctgttgaaacaagactaatcctccagctatagtgagagctttcaagcatttgcctcgaaataattcaccaaatgtagcttctttgtcttcacccacaagggaaagttcagccaagatttcgtttacttgttcagctgctgagtcagctatgacagaccccctaaggcgacgaagagatctaatcgcagcctgttgaagattctccccatttccttgtccctggagagcgcgcagtaaaagccatctcggagatgctggtagccaacacattccaattcccataataactggtaaagggagaattgttgcgtacatgtaacgccaaccagaaataaccgtaatccaaaggctaccaattccataaccccccttcacaaaattatatgtgtcagtttaacttggtagacagaaaggtttcaaaatggagggaatcaaaactgtaacttcaaacggggcaataaatttccaaaatcctcagagcttcgagaacttacaaccatcccaaggacagtggagaattcctttagtgatatcatccgtccacgtatttgacttggagcagtctctgcaatgtacattggagccgcgtgcatggtctaaatgcaaggaaacatattaactttccagtttaaaagaatgcttaaaattgtactccctagctgcatggattcactcacagtagaacaaacatcttgatttgaacagtaaacaatatttataaacaatggctctcaacttcgtaaaacagagtgagacaggagaataagaataggatgaattatatatctcagactgtctcgatataggggtaaattctgtcccgaattccaccaatcaataaatcgaagaagtaagccaatatatgtatacagatgaatgcaaacactgccaggttggtctatgagtgatagactggtagtatatggatgcattggattacacatgttcagtaatagcgtgaagcatatttctacctagtagctattcgtggaaaggttgactatgattaactacttagtcaaatgcatgatgcacattttagcaggcaaacaataaagatgtgtgatttatcttaccagtccaatccccatgccatacgtaactcgtccaattatcagtatggaaaagacaggtgctactacagtcacaatggctccaacaagatacaagaatgcagccaaaatcagctcctttctccttccttgaaaatttagtccaacaattcaatttctttcagatgaaggagactgctgctacatactcagatgaagacagttgagaaaaaccaacctataatgtcggcaacactaaatgcaacaatggagccaattaaggcaccatacagtgagccactggtctgcacaaaaatatgaaaattgtcgtaagcaaatttctttgtccttccacaagaaagatcacagcttcccaatttagggagaaaataagaacaaaaaatagtgcaataaccaacatgtagaagatccaagaaaggtagactcacaattataccgacatccactgaagacaagtcgtaccatgaaattccacttagagtaggcgactgcacaggaggcaaaagcagattagtcattcagaatttaaaaggcttagacaatcgaacaaatgtacatgcataataactatgcaggagaaatccaaggaaacgcaatggcagtgcaaatgcaggcatgaactatgaagtagcgtcatttaactgctaaagacatgagaaagctaaaaaaatcaaacttgagtatagaagcacagttttagacaaggttaaaccattaccttaagagacatgatagcacaagatgttgcaccaatttcataaccaaaaagcaacgctccaagagctggaaagagaaacctgcaataaatgacttgttacgttcttacgttcttagcatgcttttagaaaaatcagtatcatgtgcatatccaaaagattcccacttgctttcagcagaaatagtagtaacaaacaataaatagcaaataaacaaaacgatctgggaccacaaattgatgattaataaacaagggaaaacgtcagagactcacggaggaatggctgcaagaacagagtagttctctgggctgtggttttcctttaacaaaggttccttttcagcagtaatcccacctgaagaagaatcaccaacaacctacataatatatcgtttcaggaattttgcatcagaaagtgatttgataccaaattagagagatttaggatagaatcgttattccaaaacccagaagctaaggtcttaaaattgaaatcccaattttcacaagctccacacattacagagacatcaaaatccacaatcacttcataaaaaggatatctaaaatcaagccaaaccctaagatatacattgcaatccaaagtcttcaaagccgaccgggagaagaaccaacaaaaatcagtacaatttgcgatcggaaacctaaaccgaaagaagaatggggaaaagaagacgataatgagaaaagcgaaacctgtccaacggaagagatcgattggttctcgggatcaaaccccatggctacggaagcttggtatggatcccgtgacagccagtctggtatgttcaaggaaacccagaaaataataaatcgttctggggttgtacgaaatagctacttctctgatcggaggtcatcgg

SEQ ID NO: 5714 - DNA, 231 bp, Arabidopsis thaliana landsberg
ttctccttaatgcaacatcccaaaaggcggaccaagtttctgtctggagtttccagatgagtattatgtcattgaggaactcctctagaccctgtccagaggtgctcgaaaggcgttttatggctatttctttcccatcttgcagatttgcctggatccacagttggagatagtcatatggtgaacatgacagaggttaacctatcaacatgagtagattatgcatgatct

SEQ ID NO: 5715 - DNA, 3593 bp, Arabidopsis thaliana landsberg
  unsure (1)..(3593): unsure at all n locations
gtagtacaacacagaaatgcctggatgagttggtgcttaagtttccaagcttggaagaggtacgtagctgtgttgttctcgctttgaacgaggaatatacaaccgattccgccattgttcaacatagagatgagttagccatcatacctccgataagcggcggctaatgcatcgacacttcttaaatccctttaactcgggattgtatctcannnnnnnnnnnnnnnnnnntaacttttgtcataataacacagaaatatctgtcttttataatggaaagaaaatgttacatcagttctactaaacttctagtttttgctgtggttctctttccatgatcttgatattgataaccattgtaacaaacagaagagcaagtgttgtcactggttcagtagcgacgtggtcttgaatggttgatactatctagtgccgaaccaagaactcttctactatactccaaacttgctccattcgatactcctggtggaggtgggttttacaaaaatgcacaaaaacaaaaatacagattaaagttcagtaactctcatactcagaaagacaatttagagtgaagtaaaggtttttgatatggtaatccgtatcgaattcggcatagaagcagctaaattctcataactccagcagccaaactaatgatagccattagattaagcaaacagaccaagtacattaagtcttatacttagaatgacaactagattgagcagaaggttcttgatttagtaatctgtgctatattctcataactccagtagccaaactaatactagccattagattaagcaaacaaaccaaagtcttatacttagaaaggcaaatagattgagcagaaggttcttgactccgtaatctgtgttaattttggcaaaactaatcatacattgcgacagccatcaagattttggtttacttatatcaatgctataaacaaaagcttctcgatcttttcgcttattcgatatatcaagagagataagtaaaagagaaaccttgtgtgtaatccagaggcagtggtgaaggtggagaaatcaattgcgacgaaaatctctccgagtgatgatacgcagctctatccgaatgctcgaaagccaaagactgaggtctcgctcgatgaccggaatttgcagaatttgattgtaacttatcctgtccagatatctaaaatccacaagaaccacaacaaaatcaagaacaacaataaacatcactatcaattcaaagatcaaaagacacagaaacaagactcacagcgaatttcaaagttcgattgtagagagaaacaagtccagagaaaagcttaacggcgtaatcggcgatttcttcagtctcatactcagcgaaagcaaagcctttaggtttatcagtttctttatcacgaggaatgtgtagatcgattactctaccagcttgaatcatgatatcatacaaaaccctatcgcttactctttcgtcaacgttccctgatttttcaaaatcaattggttttcgagaagtttttaacagtcaagatcaatggaaatgttgaaagagaaacttacctatgtatacggtgcaattggaagtcccagacatagtgatcggaacaatcgaaaccctaaagctgagaagaagatgaatcgagaaatcaaaagcttaagttttaaaaattgaagagaagaagaagaagaagatgaagaaacttcgagagggccgaattgtaatttacaagattttgagaaaaattgttgtttgtccataaaacacaaaagaaagaaaaattgtttgttaaatgagaaaatgactaaataaacctctatattttaaaagtattcgaaaaatctttaactagattttttacccgcgctacaccgaacgatttataaaatttagtatacaaaaaaatttgaaaattgtatctatttataaagaaaaaatatatctgatagtttacaattgttattaagtaacatcccgccaaaaatctcattagttttattaatgttagttttatttatgatatgattatgaattattatttaaacccacatttctcatcaattgagtaatatatgttcgtttttaaaattttgaatcacaatatatgtgaaaaaaatttaaagatctttcttaccttaataaattatatgatgtaacatccgttaacggctattaagtcgcatgttcgaatctaccaataatttaaagatgagcttatattgaaaataggcattttagatttagtaatttcaaaagaggtatgttgcacagttgaatgcaacagtggccgcttattttcaattttggacgattttaaccttctgcagtaagcggctgtagcacaaagctttgatggtggttcacgggtttgatggtggagggtcgccaacggcatcaatggtggatggtggcaaacagcttcagtggtggtgcagcgcttcttggtgtctcaaagcaacaacagagaaggtccttcgcaacataattttttgtttttcacaaaacactatactctagaattggacttgtaaacccaaaccgtttagtcgacagtctgcgatgcatacatagacacaacgacacaacactacaacactaattaaactttctcgatttgagaagatgactcaaatgaaatgaggttagagatgatttttcacatgagagaaatacttgttttcgtaaagacatatcagaaatgttttaaaataaataaattcttaagacaaatgtctattttgtaattaactttttaaagataatttatttttaggccaaaaaaaattaaatgaggtatttttatttctaaccaaaaagtattggatagtaaacatacaaatgaaaaataaatggagctgttttttgaagattttccagtaacatttgccatatacaaaactatcttataacttcaaacttagccattggtgcaaggaaaaccatgttttaaataacatgtgcaccgatgcttgtccacattgttgcgtcgatcatcccagcacttgcagtgggtaatagttttaaccacatctttattaaattttcgttccatttcactaaaacataacttaggtccgtcatgcccacattttccgtttgccgacagtccaagcgggcatggtggttttttttttccctgccctattttcaatcaataaaaaagtataaaatatatagaatttagttgataacacaaaaaatgtaagctctatttttaatacatacattatagatagaatcaatgttttcgatcttgtgtataaggtattagttaaatctaaacgagacatatatattacctttaacattgttcataaggaggaacatgagaaaacaataaactataggtgaagtagcatttctcatgattcagatttcttataacgttttgtatcttatttggaactttgttttttcttaataaatatacttaacacatactaaaaatagatttttattttattcaaaaactaaaaatagaaagcaaatataccagggaaagtcaaccaaatagaaaagattagtgtgttgtaagattgatgatatttaagataatgaagttgatgtgtcaatataaaaaataacaaaaaatt

SEQ ID NO: 5716 - DNA, 1637 bp, Arabidopsis thaliana landsberg
agccaattagctagtgaagggattagagttgttttgacctctagagacgaaaacagaggacttgaagctgttgagacactgaagaaagagcttgagatttctgatcaaagccttctttttcatcagcttgatgtcgctgatcctgctagtatcacatctcttgctgagtttgtgaaaacccaatttgggaaactcgatatcttggtaggcattattagtaaactctctttgatcagtttactctgaaacaggtcttagactttacagtttcaaacgtggttttgactagaatgattgctttacaggtcaataatgcagggattggtggtataatcactgatgctgaagctttaagagctggggcagggaaagtatgagataatctttgtgattattttgcaagcaattactttcatgatattattagtattgatgatcttctgtgaagtatttaaatgttttcttgttatattcgacatggcaggaaggtttcaagtgggatgaaatcatcacggagacttatgagttaactgaagaatgcatcaagataaactactatggaccaaagagaatgtgtgaggcgtttattcctcttttgaagttatctgattcaccaagaatcgtcaatgtatcatcctccatgggtcaactaaaggtaagtaagaaaagattagatatcaaggaagcttgagagatgtattgttggctaagaaacactatttatgttacaattgattattgtttaccagaatgtactaaacgaatgggcaaaaggaatcctgagcgacgcagagaatctcactgaggaaagaatcgaccaagtgatcaaccaacttctcaatgatttcaaagaaggtacagttaaggaaaaaaactgggctaaatttatgtcggcttatgtggtttcaaaggcaagtttgaatggttacacgagggtcctggcgaagaaacatcccgagtttcgcgtaaacgctgtgtgtcctggatttgttaagacagatatgaacttcaagactggagtcttgtctgtggaagaaggagcttcaagtcctgtgaggttgactttacttccgcatcaagaaactccttctggttgtttctttagtcgcaagcaagtttcagaattctgaatcttcttttgtgtgagaataataagccaaaaatgtagtaatttaatgagaggattatcgtttgaatgtcgaacatatactcttagataaacaaaaacttttatgagatgttttggtaatatactcataaacttgaatataattactttacaaacagaataatatatagttccataagaagaaactaaacaaaatttgagtctacttcattgcattagttaagaaattatgctctttaacaatttatgattatatatatttcacaaaaggaactcccggatatttcttaggattcatgttcttcagctgctgcatcagaagtttcttcttctgtagggtttgcttcatcttctttgggttcggttttgtcttcctcagccgtcgagcgacggtggttagccgcggcttggaggacatgattgtcattacccttctcaaggaaaagctggctgaagtggaccttacagtaaaggacgccatcgagagcagcatatgaagaatgtgttg

SEQ ID NO: 5717 - DNA, 541 bp, Arabidopsis thaliana landsberg
  unsure (1)..(541): unsure at all n locations
actccttttatcatattatattctcatattatttgatgttgttattttttttatattatcttctatgctgaggaggacgtccaattaatgactttccttggagtgaacagttataggttttcaatttcttggtgtagaatcttacctagtaagtccttctttacttaaatcagcagtattattaatactacattgcgttccatgataaataaaaaattcgattgtatctcatagactaaccagagttgataaattaaaatatggaaactcaatcgacgaagagttatttagatttagcttattatttgtgagacaggaggaagatttggagagattaattatttggggataaagtattacaacatattgatcgatgctctcattagtagaggtacttttttatctttccggtttataataattaaagttnttttttaatattgacatattgtattctcataaaggtaatgaaaatacataattgtatcaactaatcactatccagggattaagccatttgtgacgttgaaccatgtcgact

SEQ ID NO: 5718 - DNA, 8930 bp, Arabidopsis thaliana landsberg
  unsure (1)..(8930): unsure at all n locations
acgggctcttgtatattaagggagattaaacgtttctaaaaccctaattacacaaagtttaagaatatattttccttttcttttataatttatagaagaaaaaaaagttatattttctttgttggggtagaaacatttctgaacaaccctcaaacggatcggcgccgtccccaaaagctgctatcgtccccaagtttgagaaacgtccccgatctaaaacgtttccgatacgggatacgtcaccttttagccgtcctcgtgcttcttagattcacatatatacctcattatgttgactatttcatgcacaagtgtatgaagatgtccatttgttatacaatgaagaagccaaatctgttgaagttattctttattggaatcaaaagttgcagattatttttgttgctacatggtgatggtagtcttgttagtcttaaggcaaaaacatgtagatgattctggtcattgaagcacatttgtctttagatcactaacaagaccgccagaggacattgtgatttcagttgattttatggtttaaacctttcccaattttcatggagttttcaaatccaagatgaaagaatcttgagggggagtattagagtgtatataattggtttcccttggtaaaatcacttaaatagttcagttagcatagtggtttaggttcacttgtatttggggagatatgtgtagatgatattgaaaagtacattcccaattttgtttatgtttcttcttcaagagtaaataaaacaatctagtgagttttcttatgatttgtttaagttattgattttgtgtctatgagataatggcttgagagtagtaccgtcaacaaacatagtgatctagataaaaccggatagaaaaccacagataaccatccaaaacatgtgaattgagtgacccaaacggaccggtttatcccggttcaataaagacattagggcttatacagtagaaactctataaattaatactcgatcaattaataaacacgataaattaataaattatgccggtcccaagtcggctcaatgtaaaaattaaccaaaaatatcgataaggtaataagataatatttttttttgaaatctctatgtaacaatatggtcccaataatatcataaattaataaccacaaattttaagcataccttaagataatttaatataatatgaatctagcgttgtttgtcttttcttaaaatttgaatcttgttgaagtccatctctaattttctttgttgcatcaaaaacttctggtgttgtcttctcgatatgtatcaaaaagttgtgaagagttctagacgcgataattgcttccttacgtgtcactatttccaaaagtttcacattatcgtcttcaatttattcaccaacattatagacagaaatcacaatttcttctcaaaactttttgagtatgcttcattttcacccggataatcgagtatgctattgacttttattatattctgaaagaatatagtattgtaaactcaatcttgttttggatcctttgagaaaggaatgagattaactagtgtcccttctttacttccttagatgtattcattttttgttcatctgatacatttctgatttataaaagctaaacaatttgtgtatcccttttaatatgaaactctaacctctttgaatgtaatctttgaactagaggtggaacactatatttataaagtagaaggtgttttcagtgagattcttatcaagcgcaggcgaaaaatccgaagattaggaggaaaattgagttgccgagatagatcttaagaacaaaaagtcaaaggtggctagatattttgggtaggtaacgtttttggttcaagagcgtatcaaaaggaaacgctctgcttcttacagcagaaatcgtggctgtaaatgtagctgttgcaattgtagaaatggccatgtttttccactaatgttttttttttatttgattatgattgatgttagaacatgaaatatcttttggacttaacagtattaatattcattattagaagtatgaatcttgatgtgtcaccgaccaaacaagctcacagatctcttgtgttaagaacttcgagctcctttatattcacttgattgcaacatatctagcactcgtgtgatagacagttccaaaggccgttacttcctttaaatctttagtgttaatgttaccgactttatataaatttgacagaatcgtaatagaaacacaatttttttaagaacttctttgatttattaatggttacaaagagagaatacaacttgtattaaatagggagctttttcagctaacttgaagagtaaggtaagcaatcaggttttgacacctgtaaaatttcaatcatcttctaaaagacacaatgcatcaaatttgttagttgtacgccgatcttgttgcgggcgagaaacagacgtcacttgctgattttttctagatgatatcagtgtcgtcctaacatgatcatcatatttagatgatattgatatgcttgtggccttacgcttctgtactggtaggtttatagatgtcttcatattatcaaactgatgaagatccttcacatgttctacaaagacgcagactctctgataattgctaaaccattcagagtcttctacaacaccttgaatttcaacacttaagagagtgttattttcgggattatagttgaaaacataaaatggtttacatgcatacatcttcgcctaaacaattttatctctagtagtaaccccaacaaaggaaagattattattaaccttaacaacattattatcaggccttaaagtgtaggcatactttgaccattcctcttttttgagatcctctaaaacccacattgattactcatgaggaaaatcacctaatttgtccttatagtttatcaattcaaaaaaacattttaccatatcatgatttacatggaaaaacttgaatttctcaaacctaacatcaaaacaacctatcacatcattcgagctgtcctgtgtatcgtaagctatgtaatacaaaactccattaatgcatatcgggctttgcccacaaggacgataccttaaggaactttggatactcctccacttatcattttctgttcctaatgtcagaatataatgattgtctagaatgttaagaaccaaaaccttgaattgcttgccaatcgggtcaaaccctaaatcgccaaagattcctgacggttgaggtggtaagatcgcatatactgtcctgtgctaggtttacatatcacacacacttcatagttaccctcttttgacatccacacagtacgtaaatatatcaaaccaaaagcatagctagtcccgtgatgttgatgttgttttatttcagaaagcttcatatgaaaatcagcggctacttcaagagatgacttctcatatggattcttaggctgaggcgacgagtagaagctccactcaccgcctcgaacgatcccgagtaagagacgtggattagatgaggacctgttaacgaacaacctggtgaaatcttgactggcaagcatggacgaccatagcttcgaaacgcagtgaaatctcgcgatggactttgtaggcagtctcgagagtatatcaagaatcagatcagttgggatggaatctaaggtttctcctctattcatgatcgttgtattagtctgcttgcggaagaaagagagagagatatgaatacaaatctgttaaaatttgacctaattagattatgttaaattgttaatcaatctcatttatggtcggcactgaccaaggcccaagaagccatgagtgttaagttttaaccatcctttttttggcagcgggccttaattaaccatttaacttcatcagaacttttaacagtgtgattagcacttgcgcggagattcggagagcttttttacaagaaagcacagtagaaaaatcaaacaatgtataaaaccaatttcaacttttatccccaaaccagtaatcacagcaattgaagtgacgcataaagctgacacaaatgaatcataaatgttttgcagtagcatttatatataatccacgtcgctcatattttcagcaagtgtctcttccgttccaatagcgtcagctcgtacatgttcctcgtacgattcatcctcgggtgacttttgaatctgttgcggttcaagatcatctaaggctggtgactctacctcagttgaagcaagtttgatatcagttccaatgttttcagattccaaattcttgctttcaactgattgttcgtttatttcaacaggatggtcaccagatgaggttttgtcattctggcttgtaagcgcgtcttctatgagacatggctttactgtttcctcttcaacctctttgcttttgtcaaccgagtcttctcttgtggtgaaacatggctctactgtctcctcttcaacaacctctttgcttttatcattcgagtcttctcttgtgatgtctgtggcatggtcagatgcaagatgttgatcatcagtttcttctgcatttgattcatcatcctgtatagaagacctcccaggaagatccggctcctcttcagcaacactttctgtcttagactctgacccttcaagatttgtggaagcagggaaagactggaaagtgtcccaatcatcatcatcatcatcttcttcttcttcttcttcttcgtcagttccactttctactgtgctaacctgattgaaagatgttggcatagtagacaacgcttcttctttaaccatattagcagtagaggtaactttttcaggcgttgctaccacaggtgctggtagtttgatatccatggctggaaccaaggattttggcttcgcaagggcactatctttagagacagaagcacgaataatatcctaacatcagaagaacaaggacaccaattagatagttatttcaaatttttgcatgcataatgcttagccatgacacatttaaggaaaatatagagaaagatcagatgattaaaaggataggggatttgggatccattagaactttcgaacacactgtttccaggcaagtaaatcaaatcgaatgcatataacaacctgaagctgctgccggtgtgttactggaagcgacagcaaaacatccttaaagtgaacagccgaggaaggcaactgagctagatgagaaacaagccgcacagctacatttcttaactcgaggacttcctggtattatccataaaacaataaaaagaagacatttaagccttaagagggagcaacaaaatttctaatacagaatttacatgtcgggctaggaatggaacctgagaaacgccatctgaagtcttagagaagacgacaagaaccacttcaagaaaaaggctcatgaatcccttctgaagttcatctgtaattgagtgtgtctgaagtagcattatgaaccgcaagcattcaccagctatgaccaccgattccgtattcacaggtttctatccaaaagaataagaatgaagtcagttatcatagtttttacatctaaaaagacgtcaaaattactcttttcttctaaaaatgtaaattcagtgattttggaaggaagaaatgagaaaacaaccagaagcgccctctgcatcagactgacaatatctccaataagttcgccgacaaataagatcacaaaacttttctcctctgggttgttgtatcgctgtaccaagctttttagcacttgtaagacagtagcttgaacctacagatatttgaacttatactatgaagagctcgataatcaacagttgaactagcatatgacaaggaggcaagtctcagatacctgaacattggaatctttaacaactgctgctatactaatttggcaactcttcaacatgacaatacagatagaattggtattagtttcatctactggacaatcaaactcgtaggcaagcttagccagtgaaaagagttgttccagacagaatacaagcttcaactgaagtagcttgcgtaaccctgatctcttgctgnnnnnnnnnnnnnnnnnnnnnatacaatctctagtcagatccccaaccatatgcagacaagcaccaaaaattgctcttagatggaagccactatcggcagcaaaattagtgccatctgcaataaaatcattttgatcaaacagtttcaacaaactttacaatgtcccaataaaggatgcaaaatatttcagttgcacaaatcgacttcacaattctgcatttgcaacttcggggctcacataaaacagacataaagcatacatgatctatactgaatgtaccatcaaaacgaatctaacattctaccctctcacagaactttgacaccatctgataaccacccttagcctagtagacaaaaaattaacctagcaccaactctatataaacttactatctgttcattctatacaaactcttatcattttagcttcctaaataacatcggccattgcttatcatattttcataccagtataaggcttttgcgatgaggctctggtaagctcaagcaataaatcgttggtggacttcacaatctcaagagctttgggtaggtatgcgtcagtggggacttgccggatgcacttgtagccacttaataaaaatgccaaaggcgccgaatttaaacgatgctgcattttacaaacaatcatcagttagatgtaaagagtacaacaaatataacagaattcgagaaatgcaacaaataaagcaaaaatccctcaaagtttatatgttaccttcaactcaaaacgtttcactagcgtctttatggagataaataaaggggaaagcatattgtcccaaatgccatcatctggcgaaatttcattatgtctgaaacagaaaggaatttttggtaaggtcgtttccaaatataatgcagtatatttctctctacataattttaaacagaagtgaacacagcttccaaaaatctctttaatgcacacctgtggagaattttgaacaggtacccaagacagagttcaatagtcgaataggcaaattcctcactttcaagaaaatcttttggacagttttgtgagatctgttggaaaaaaataaacttcatcagaactcgcatcttttctaacgcgtaaggcatatatagtcctggaaaattaatcaggaatcagtgttacgaagaaattcatcaaacagtggtattatgaccatgaagtacataatatctggtgatatgcctatggcagggtaacagaaacaagggtaactgattatttctcctacagtggaatagtatatcttggttccaactaactaaagataaaagagaacagagaaggaatacatatatacaaacgttcttgaacctcatttccaatcttaagaaaagtcagtaaatgcaagccaaaaatgatgctttagggttcaataacatcaacgagttgtgtacctgttgtactactgatactgcaagaatatcccatgaactgtccatatgaaaggaatacgacaaaacctggatgagttacaaaaggaaaatgaatccaattagagtagtgtataactaatcaaagctcacagcctatggcgcttggacattgctaaagcagaagccagttaggaaaaataagaaaaacatggggtgtagtggatctgcacaaagcacaaggtattatgtgttccaaagaagaagcatgtggctgcttaaaccaatatcaaatacgctttagtagctgatgataataagaactaagatagaatggcatgagaagaatttaaaaggaaacaaaatatttgaagtggctctacctgcaatagctcttggcagaggtctatactaagaaagccactggaaaaaaatcttccagcagaaagagattggaaaactggtaatgcaatttcatataactttaggccctggaacgaagattcgttgatgctggagtctccactagatttgattttagctgagctaaaaggtattacttgcatactagaggctggatgcatcccttgaaacaagacaagtacagcgaagccccatagaaactgaaaatcttcagcctctagtgtaaccatgcgatgtgtagatatcaaggacctatcagaaaattcttcaacactatgattcaccggaattgcatccaggactaaagcttgcaggatgacaggccatgcctcttccagacaaggctgtagccttcttgacacagtatgtggcgggatttcatctaagaatgagcactgctgcggcaagtttaagatctttatagaagataggggagcacaaggatagaagtgttcagctaaagagagaaaacagaactattaggagttgactcacacttttcttgaggttttgacataagcaaatataactgtagccctttaggacctgaatccagtacctcccgagaaggtctgaactcttggaaaacattggcaacagtgcttcaaattctactggcacctcaccatggtgttttctcaagaacgtaaatatataacacttaagcgaggcatgtgcagcaagaagcctgatcttgatctacgttgcaagaataagtatactcagtgatagccaaataaaattagaaaataaacccttttgttgcttatgcaccttgcttgtgacccattcagcaaacgaaggataatataattcgttaaagtcattgagtggacgtgaaagtagagaaaatatgcgtttgactgcaacttgatcacttcttattattccactggtcattatctggaattaaacacattaatttagtaacataatggccaaaaatctgaaggaagaactacgacagatgtcatgctcacctttgtggccaattgtaacccagcttccagaagaacaggcgccagaatttgcatccaaggcagtacgatcagcagacagaagttgagcctaagtgtgaaaatagtcggt

SEQ ID NO: 5719 - DNA, 449 bp, Arabidopsis thaliana landsberg
atgaagacatactttcatcttacacagatataaagtcttcctgatcatgaaatttccttagggggacagggaccaactgtttagtcaaaattgcctctcactgagtaaccagtgagtgtactagcctgcggacttaccttcactgattgaccagtgaatagtatcacatacaggatattatatgaatcatagccgtagctgtaaaggttttatgagtgttaattgtgtgcattattgccttgagtagctctactagctatagtaatactggggtaaagagatccatcaaattttgattcaccctctactgctgtgtaatgaaacttacatttatacattcgtattaggagaaccctgaaacgatggagaaacggtcagctggttgaatcttgggatgcacaccaggccgctatgcaggcagtgataaggctgccatttggagagctcgt

SEQ ID NO: 5720 - DNA, 611 bp, Arabidopsis thaliana landsberg
ccccgccaacatcttgcaagcattcttacctttacttgacccatgaaggatgatacattaacgattcttggagaattagataactgcagaagatgaataaaagcctcacacattctctttggtccataatagttaatctttatgcattcttcagctaactcataagtctcagtgatagtttcctcccacttgaaaccttcctaccatgtataaaataacaagaaagcattaaacttgacaaagatttatcgaaaattatatcacaagatacttactttccctgtcccagctctaagagcatcaacatcagtgattacaccaccaacccctgcattattgatctgtaaaaacaatcaaaagatcactcagcattacacaaaagactcttgcttttaagaccggtaacagaggtaactaatagtaccaagatatcgagttttccgaaatgggttttcacaaacttagcaagagaagtgacactagaaggatcagagacatcaagctgatgaaagacaatgctttgatcagaaatctcgagctctttcttcaatgtctcaacagcttcaagcccttgtttctcatctctagatgtcaaaataaccctaatccct

SEQ ID NO: 5721 - DNA, 608 bp, Arabidopsis thaliana landsberg
accctactgcacaccagttggaaaacattttttacttttttctcatctggaagttcagcttaaagaccctgcatgtttagaggtatgacctatacatctagttaaattcattttcgttagaaaagatatctttttcaacatgtgtcgaaccgaacacttttacctgcgagatttaccactgagtcaacaatttgttggttactgaaaaacttttttacgaaaattatttgagagttatacatattaaacacacctaaacttaatgaggatatatcatatatgaaggaaatatatatatatagcttgagtttgttatttgtttttgtgagtaatttgtgatgacttatcatgagtgtaattgaataatttttaataaggggtgagaaagtagaaattctacagaattagcctccattgtagctggagaagaaaaataaaaacatgaagttcattttacaacaaatttggatagtccaaacaataaagatgatgtacgtattaccaaattcattgtcgaatctagattctgactcttaacacgtaatgacggtaatagaactacgaatatagtttcgaactctaatttatattactctagagcaaaaaca

SEQ ID NO: 5722 - DNA, 2760 bp, Arabidopsis thaliana landsberg
aaagaatacatgagatccacctggtacaattgtgcagatttcttccaatgatttccctagagcgtcctttcaaagcaaaggagaagcattgcgttttacaacagacgaaaatattgaatcacaatacaaataacaaatttacaggcaaaaggagcttgaacaagtacctggaatgcatatgcctcagctgttctataacttgcgtttagaggatagttaccaggaacagtggagattgcgccagcccacacctggaacaatattgttaaatcatacattcagttcttgaaagtgttgctaagtggagagcctttagtcggaacctgcatattaggatcaatcacatgtggagcctctaaacaagtaccaaactgcatcccaagttcagatgagaaagaattcatcggtgacaaagtcctaaccaagaaggagatggctcaagaaacatttagcaaatcactctttgcagaagcaatagtaagcaacaagatactactgcttacccagatgttaaaatgatggataaagacagatcagctaagtctttgaaaacaacagacggattcatgcaccataaactgaaagtattcgtccacccattatctccggcattccattaaagtaacaatgaacacattttcggataactatctataaagcattcacttgtacggttgtacctctcttagcagaacgttgtaaacccatttcataatctaggacgtgacttccatttcttgaaaagaagtatgtaagtgtagcaaacaactctacatgaaaattttgcaataagctctcctcttcaaaattacataacaaaggatcaatgcttaaaaaagttagtgagacgcaaaaaaaaaccttctagtgtggagacagatatcccactcaaataaggcttatccgggtcaatttctgctgcttctgattttgtgatcgccttgaccagtaagcaaagcgttacattcaagcatagtaaaaaggtatgcaggcctagccagataacacagaagaaatgacttacttggttaaaacatgcctttaagtttgggaagttttctcgagtgatattgaattcctttagctctttcaaagctctatctccagtccagctgtcacattgataaacagcagagaaaaaaaaaaaactatgaagtatattgcatatacatagagttggttgaaagtttcaacttacttagagaaatagtggttaacatcacgttttgctagtgaatccttctttcttccaatccagcttatcaatccctaaatacatagaacaatacttcaatattaaaaagtagacagcaaaagctacctcttaatattttatcttgcagataaatgactcacctctactacttcatacaaggaatcatatatctctggctcaacctcactcatctgttctagttcattcttcaattctgcataacacataagtcacattagtaaagtatatttcagtgaacaaaacttgtgtttgagtattacatactgaaaataatgtcttcttccaagttaatgcttcctgcttcacgagcaatgtcttccatattactgtggacagtgataagattttagtagacggccttaaccatcaacatcatcaaagcatactaagaaagttctgaagcttactgagcttcatcaaagattataatcgctccttgtttatttactcctcctcggatgacaggatcaattatataggaataagggcaaaaaaccaattgtgcaacctccaacattttccaggaagcaaaatatggacagcctaaaaagaaaataatttgagataaagaaactgaaataatacaatcacttaaaagtgagataaaccaaatcctaacctgtaacagtttttccaatttttacaaggtcttcaatatcatgaaccccattgtgaccggtttgctgaagtgatgggtaagctacgatccggccgacgccactggaagttaaagaaaacaattaaatggttcgcaggaggtaacaaaaaaatgaggaaacataaagaacttagactattagggaaaagttacttgaactcggcacattttatgtttttcttatcttttaggagcaaccgactagaaaaataaatagatgttagtatagataggttatgctatagttgaaaatgatagtgagatggtatgaatatggatgcaaatttaccatttttcgtctacattctctttcccctgtacatgactattggtgcagtaacgtttccttgaaccctaacacaatgaaagatgtaccaaaaagaaacaatgttaatgagtagctgcaactaatacataaataaaacaagatcctccgatcaagttttgacataccaatacagtcatgggaactctgtaaccggtttttcgatactcacgaatgacttgagtgatctgagcatgagttcgtctataaaacaaaaacaaacaatcaatcaataacattaagaaaaacataaacattatttgcaacattttttcaaaactaatgtaatgcttacgaagcatagtatatggtgggaatctgaggttcatgtggctccacattactagatccagcaatatctgttcagaaatataaccaatatttaacaactactagaactaattaatctccccaaccaatcatagacgcaatttcattagtgtcattgcgttttcgaatgagacaaatttccattaggaaacagaaataagtagctcttttgccaagcgagaacggagcagagcaaaggcagagatttgc

SEQ ID NO: 5723 - DNA, 1695 bp, Arabidopsis thaliana landsberg
aatctaatatcactcgtgaatgcttcccgatcttattggaatgctttacaaaggtcagtcattccttcaatgttctctggctaggccccaaggccttatatgatgcttgaatgtgcaattgtgattactgttctaggctatcagaacatcaaaggaggcagaaatggaatcagatatgctttatttgagcgggatatctgtcttgacactagaaggttttttgcgtctccctaacttttttaagcattgttccctgtaaaatcatttcgaggatgagagcttattgcacaataattcatgcagagttgttctcttcactaacgtacttcttttcaagaaatggaagtcacatcttagattaccaactgggtttgcaacgttctactaaaagaggtagaactgatttttgataaacctttttagccgaatgtgtgaaaatttaacccgtctgtaaaaacaaaaggtgttcattgttgctctacttggctgcaggagatccttctggtacctggacgcatactttcagcttgtggtgcatgaatcctgctgttgttttcaaagacttagctgatatatcattatccgtcattttaacatctgggtaagctgtagtatcctgttgcttacgattgcttctgcaaagagttatgtcatcctgtacaaagtcacctacacctttttccatctgatatttgcaagtaataacggcctgttatataagtcttgtttaaaaccacaacgtcttcagtgtaaaatgatcatacacatctcttttttgttaagtttgaccacacatttggtttttgtgcttcgcattctatatgtgcatagcattttactcccctccttaacccattggtaatggttagcttaatttttattgtttcttgagccatctctttgagtaataattaagttttgagtttcttggttgtgaaatataggactttgtcaccaatgaattctttctcatctgaacttgggatgcagtttggcacttctttagaggctccacatgttattgatcctaatatgcaggttctgactaaagctctccacttagcaacagtttcgagaattgaatgtatgatttaacaatatctttgttccaggtgtgggcgggtgcaatctccaatggtcctagtaattatcctctaaatgcaagttataaaacagctgatgcatattcattccaggtaccggtcatttttagtcactgggtcaagctctttttgcttctaaatgtgttcatcttgtactgtgatgcattatttttgtgtatcgtgaatgcaatgctctacttttctttgaaggatgctctggggaaatcattggaagaaatctgcactattgtaccaggtggctctcttgtattctttccaagctataagttgatggaaaaactctgcatgcgttggcgtgaaactgggcagtggtctcggctctgcttgaaaaaggacctttttgttggtgagtaactgttgcaacaaattctattgagatgctttttcttttttcttgtcaaaaatctcaaataagtgtccatggttgcagaaccaagaggaggcgcccaggacgaatttgattctgttctgaagggatattatgattctatacgcgggaagaataaaataattggaagaaatagaagagctaagaaagcagggcctattaaaactgagactcaagatgatt

SEQ ID NO: 5724 - DNA, 1500 bp, Arabidopsis thaliana landsberg
taatggtaaaagacctgagcataagtcggacgacgtcgtggtctatccatctcgtgctcccatagctcctaatcttgttgaccagggtcttgagcctgttgtacgtctgtgttggctcctctcccctgatcatggtgaaccttcccagctcgccttccaccaactccattttggtgatcatggtggcgtcgtttccctcatgtgatattttgagggtgtcccagatttgcttggcgttgtccaagccactcaccttgttgtactcatccctgcacaaagatgctagcaaaaacagtgatagcttgtgcatttttatgaatttgctcgttaataaacacggggttatccgtactatcaaattgcattccatgttcaactatctcccaaatactaggatggagagagatgtcggtgttttgggtccgaccgcacacccggggttgcccctcaaggtgtttttaggagtaggacggtgtcgacgactgtagcaaaatggttcgtgccggatgcacgagggacagtggacaatgtttacaggttcgggccgcttagagatgcgtaacaccctacgtcttggcgaagatgctctgtgttatgggttacagtgtggttctctagagcgagaacgtggggagttgaggtgggtggctaagtagtgagatcgatcattctgaaggggtgccccctaggccttatatattcggccgtggggcaatacatgtggatatgataacaacgtacgcctaaaagatagtgaactgtttgagtctatctccctatgattcagccgacttatcctcgcctggttctactgcatgatgttccagcacggggaagtcggatcttctgttgtgatttctcgctcaacgctatggggcctatctggacttgcgtcgatccggctttatatcgatttgccttgctgattgtcctctcctccgggcccatgaagaaatgaccttacgatttatcgggcccttggacctttcgtgaggtcttttacccttccagtggacccgggggatatctgtcccccacaagcccccgatctttgggttgattttgaggtaatcagcccaaagatcccaggtccagcttgtaggtaatttgggaaaaacaatttcttactgtctccttctgctttgatcactcgtaaactggagctttgtttcatgcttgtgccttagaggtcggcatttcatattgaaggaccctgaccttcattgggtcaccagaggtgcacccaatgggtgtagcccccgagcttcgagtagattttggaaaataatctactcgaaggtcttcatcagaaattatttttattttactcttgtattttggttaagggccagtcttgtctttaatcttgtcttatgccttagaagtcggcactatcttggcttgaaatggtaattcatgggtcgaccgaaggtgcacccaatgggtgtagcccccgagctttgggtggatttttgaaaataatgctctcgaaggtcttca

SEQ ID NO: 5725 - DNA, 1477 bp, Arabidopsis thaliana landsberg
ttcctcttaagtagtacttggtcaaacttctagtgatggacacaatggtaacattaaagcaaaattgacgtactggcttagctgcttggatttccaatcctaaactttgacttcactgttacatctttttggttgacattttgaagtttaggtgactaacttctacctactgtagtcttccttaccgccataagaaaagggtcaaagatttataataccatctaataaagcttataagaaagttggctactttgaattctattttcgaccaactgtttagttgtatatacttttgtttttaaaaagtgatgcaatttgaattttgtcaaatacgttatgtttacaccgaccacgaaagatggcatatagctcacacgcacattaaaactagtaaattacttcactggtagcttgtggtatctttatattagtttgaactttgaactattgatgtagttcatattgttaagttaaaaacattaccaattgtgaattaaactaaaatcttagtacatgggtttaagttataatatgttagtcctttataaaattgtgaacctaacatcatgtaaaatgttagatgtacgattctttctttagacaatatatgatagctaagaaagaaagaaaaaaaaaagataaaacaacatactatcatcaatatctcaaaattcaaaaagacaattttgctttcacaataaaatttctgtttcggaaaaatttacactatggcgttcacgccctcttattcttgcttccaagcaacaacgaaaaataaaacaagatcctaaagaagaatccccaagctaacgttacccacaagcaaccccatttatccagctgctcaattccatgctgcttaagcaaatcagagcccgtcgtcaaacacgttgattccgttaactccatccccaagtaaccgctcattgtctccagaagcttagcctttgtcgtttcagacactccttccattattgtattatcaaacacttggtttcctctcacgaaacaacgggagggatcatcgaattcgttgtgcagaacagcttcgtagggatactttagcagagaaatgtaatgaatccatatccaataaagatggattcgatcacggttgacgtagaatccgctgaagaggaggcagtatgagagatagccaaaggtgaccatgtaactcatcatcacgtttggaatcacaccggagacaaatgtaacaaacgagcatcctgaccagaaggacgcgaagatgatcataagatagtagataaaacctgccagaccaccgtttagaccaacgaaccagaacgtggtcgctgcaaagcctatggaaagtgcgaagagatgaggcagagttactaaagagtgagatataacgtaggaagatcttcggtaagcgttatgcgcggtttctcttaagaaaatgtatctttcttggataaaagcgggtaaaccatccgcgcaactgtaaaacattgtg

SEQ ID NO: 5726 - DNA, 431 bp, Arabidopsis thaliana landsberg
gacctgacttacttatgcagcaaggtataactcaattgagcaagtgggattgcttatggataacgttagcttggggtctcttctttaggatcttgttttacttgtccttgctgttcgggagtaagaataagaggacgtgaaggtagtctacaagcacaaaaacatacaacaaacgcatataatatacgttgttgtagttttctaatcaagttgtaacatttataattttgtgtcatcatgggaatattgtaaaaggattttttcttaaaatccttagtatcataataattactcgagtacacgattagatttcaacatatgattcagttgaagttacttaatatatatatattatccttccccccataaaagtagaaaattactatgaactaaaaaaataaaaatctgaggtgttgtttgaaaatgtagta

SEQ ID NO: 5727 - DNA, 1915 bp, Arabidopsis thaliana landsberg
gcatttcaaacacaataatgtgctctatgttttcgttagcagttacatataaaaatcctagaatctgcacccgaaaatatttctatattacttgcgggtctgggatatctcattagcatatcgtatgttgatgacactgaagtattcaaggtatgtgaattacagttgttaatacatttttctgttgatacttgatgcagttttaggtttcagtatatttatattaattatcagaatggtcccatgttatctgttgacgctttggaaactgacagcttttgcttgcttacgagtgaacaggtttgtttggactattggaattcattagtgttggagttgtttgggacgcgacatcatgcgtgtcaccctgcactaactccaagtctgtttggattgcaagtatgatttctttatgttcttttataaaatggaaatcaggattatatatagtagtagttgaactttgccttgatgcttaccctgtgttttgatttacctattgccagatggctttccttcctagtacagttgatggtgttaaatctgaagtcactgagcggcaaaaactttattcagatccaatgtcaaaattaaggggactcatgattagtcgcatggctaagcctgaagaagtgttaattgttgaggacgaaaatgggaacattgttcgtgaaactatgaaggataatgatgttcttgtccagtataaggtaccaactgaacatatggcctatcattagttattctgttatagaacatatacgatgtcctccacacagcatggatttgtacaaattagcttctttttgacactctttttttcttgacccatgattttggagagaaaatttgacacactttttcctctcgttgctactccttttgatgaggaagttcgattatatgatcttacgtttttgtttcaaacataaggtattcgcatttcatagtttacaccattgcagataatgcgggagacattaatctacctctcacaccttgatcatgaagataccgaaaaacaggtacttattttgagggatgccagattttccttatcctctggactctagaatgattttgttcaaaatttacgtttaaagttctttacaatagttaatgcgtggtaatggttgtatatgctgtgaaatatgtggagtattatgataaagtatagtgcctacgaaaggtatctccttgtttagaggagaagaccagtagagtgtccctaaatttctacaatatttattacgtaaaagtattaatagttgtgaagtgttaattgttaagagtcttggatgaccctgttgtattgatatcaactttttctttttcttttacttctaagatgttgagtaagctaagcaaacagttgagcggggaggaatgggcatggaacaatctaaacactttatgctgggctattgggtctatttctgggtccatggtagtagaacaggtaagatctccactctcagtgtccgtctaattgtgttttcaacaaacaacagttaaatgcagtagcactttttggttcttggtatctggtagcatctttctaatgttagtaggctcttaagtggtctcggtctcccattgatttatggtcgactggtttcaccaccagtgttttgcaaagtttgtgtcctttactaatcatctcaactctgtctttcttttccaggaaaacagatttctcgtgatggttatccgtgatttgttaagtttatgtgaagtcgtcaagggaaaagacaataaagctgttattgcgagcaacatcatgtgagtttgtttctacatcatggatcctacacattttattgttgattttggcttggaatgttggtacttatgtaatgtgggattttcactagaagtaccccttgttccctgctagcatttgtgtcatgcatga

SEQ ID NO: 5728 - DNA, 550 bp, Arabidopsis thaliana landsberg
acttttaaaagtatcaccattttgtctaacaagttatgtttataatggcttaaaaacaataatgaagatagggaaagcaatacgatgtgcctttaaagattaaattagtaccaacaaaagctaattaattaaaataaatagaaacaaaagtattttataatataaaactaatgacaattgttaatcaatttattttttatatttatgttatagttttttcaatggtgtatttgaaataatttttttgcttaaaaatatttacgctataatgcataatatttctaatattaaaccaaatttgtcctaaagaatttctttctttatgagaacaaatatttaaacaacagaaataactcaaaatatatatacaaaagaaaatttatgttaaaaacatcaaaaataaaagagtataatacttttgattacactatatgtcagtatatagctactaaaatgattactaaatccaaaattattttaaaacaatcgatataaataaacccttgggtagcatgggttaatgagctagttaaatgaaaaacttgaagac

SEQ ID NO: 5729 - DNA, 2606 bp, Arabidopsis thaliana landsberg
acccatgatttttctctagaagccctaaatatgtccgccccccaaattcccccccctttccttcacgtgtaattccaagaattgttttgatttcttgccgaacagggggtgggacctcattaccaaacataatggatgatttagataaattaacttcttgtccagatgccctaccataagagcggataatgtaataacttctttactcttttggacattggcctgacagaaaaaaaaactatcatcagcaaatagaagatgagagacatgtgggcttgcacatgaaattcgaagaccctgaattttttcttacccctcagcctttctaatgtgagctataagcgctttcctacacataataaataggtacagagaaattggatccccttgacgaatgcctcgatatggtttaatgcggccttttcgatcgccattaataaggatgcggtatgtaactgaggtaatgcattacattatccaatttacccatcgatggttgaaacccatctttttcatcaaagctcggaggaacccccattctattatgtcttaagccttgctcatatccgtttttagtgccataaacttcttccgatttgccgggttggatcgaagtgcatggaagttctcctgagctatcaaaatattatatgtaattaatcttcctgcaacgaaggcagattgtgtctcggagattaagtccggaagaaacctcttgaggcgcaagctcaagatttttgaaataaccttataacttacattgcataagctaataggacgaaagccagacatttctctcggtctttcgcctttagggataagataaatattggtttcattcagcttcccatcaaaaataccgaagctaaaaaaattcttcaccatgttggtaagatcgccatttattacttcccaaaaccgttgaaagaaaagagcagtcatcccatctggtcccgacctttgtcggatttagagagaataaagcgcgcttaacttccgcttcggtgacttttcttactaaactctcattcatggctaaagtaaccgatggagagatatttctaagggcaaaggcgggatcttccgagttcgaggatgaaaacaaatttttgaaataatctaccgtaattctttcgatgccttcttcattatcaacccaagtcccgtgattatctaggatgcctagaatcttgttttttgctcttctttgtttcgttaaggcatgaaaatattttgtatttttatctccaagtgctagccaattttggctacttttttggtacaaaaatatctcttcttctgtataggcgtcttccaatatttttttaaggtcctgaagatcttccaaggaagcattatcgtcagcataatttttctcaatcttatcatggagtttcttaataagtatctccgaatttgttcgggttgatttcttccatatagagattactcgtttacagttttggattttttcataatgggtcgatttacctgaccaccaattccgttccatccttctacaactgcttctttgagcccgggtttgccaatccatcttttgttaaacataaattttctcgagatctttctcggagttgattgtatagatgcaagtagtggcctatgatccgatccccacatttttaagtactccacattagtgtgggaaaaaatattataccattcttcatttcccatggctatgtccaaacgacatctaatcttagcattttcccgttttccaatccatgagaatcgatttccatgaaagggaaaatcaataagtccacacgaatggatcatagcacggaatggtagaaaggaagcttcggaacgtttttttcctcctcttttctcatggtttcctgttatctcattaaaatctccaataataaaccatgcctcagatctagaaactccgatacgcatcaacctttcacatacatattcacggtttgagacaacgtgatctccatagataaatgtcataaagacccgatttccattaataatagtttcgatatcaattagccggtcatctaacaacaaaaacttaaccggaaattcattcgaatacaataaagctaaaccaccactagaaccctctggttccccagtttggaggttatcaaaacctaactcaacttgcacatcttgtagatacattttttgattcttagtttccgataaaaataaaaaacctggtgagtacatccggttcatctcaaccagtcaacgatgagtttttttgctcccgccccttgacaattccatgctaaagtcctcatgtaggtggctcgggggagatccgggactcctccacaccatccttaagcttcaaggtctttgagtctttcttattgttcttgttgttctttgttgtaaccacctcattctgagggatgttggtatcagtgtttgatggaaccgctccatgagtcctagaaaccgtcggagtcgatctctttttaggcgagatttttccaccaaacaattttaattttgtggaggctgccacgaacgtttttgggctttggggaataatagcctttttgaactcatttttgtttgatgcagctacccctttttgccctaatgggcatgtc

SEQ ID NO: 5730 - DNA, 600 bp, Arabidopsis thaliana landsberg
attttcaagatattaatgatatcttgattattattgaaggtccatacacaagtcgagtagaacattgacgttcatgaattaagaaaatttttctttggtcttttgtggagtatgaaatttgtgatacctacatcgtgtgaagttgattacatgtcttattcaatagcacatgttagcatgaaaatatatatatgtttttacacaatcatgaaagattgttgtttaacaaatactaatataaaatatagacatatgattttggtttcttccaatatggttttgccgagcttaagattaattacatttgttgtcagtattatactaaccaatgtatcgtgtctaaattcataagcgaactttaaatttgataatcaaattagttaccgatctaaatttgctaggttatccctataaatctcaagtattgataatagttattaatattaaaccggaattactgatatttttgatctaggttagaaatagttggtattagctccatcaatagctgatattcttgaccataaattagaattttcctaggttctaatataatctacattacttttattaagttttcagacttattcttttgctcgg

SEQ ID NO: 5731 - DNA, 1468 bp, Arabidopsis thaliana landsberg
gaactgtccctcatggtcggtaaaatccaatccattgttctccttattaaatccgcgataactggaggtggagcgagggtgtcaacctcgctagaccgcacatcatcttcgccgagctccgcttctggctcctcaagctcgcctctcaaacgaatctcgccaactcgtcgagcatcctctaagccgagctccacacttaacagaattgtcgcaaaggatagctcacggtgatcaaagtaatccgcaaaacaaacttcttctatgacgagcttgcttctccctgtgtcgatctctccactatcctcggtgtgttcacctcatttagatctcacgctgaactcatcgcctagcatgaagacaacccacccagtccctaaacccaacttaccaacgtccctaatcctctttggcagatcaacatggctaagcgtgacaagccttgtgttggtttcctgaacccgaatttccgcgacgacggatacgctcagctctaagcgcgcacatcaaaattaaaaaaaaaaaaaaaaaaaaacgctcgcttccgagctcattttctatatagacaacaattggtttaatcccttctacgtgatacatatgcaacttcttctaaacgttattttttttaacgcgcacacaagttactattccaagtctaacttttacgagtaacacttgtcatccccacatcgtctccctggccaggagttcgattctaaaacgcgttcccacatggatgcagtggtgctcgtcggacaggtctaaaaacctatttccgaagaaataattcacatctttacttaagtaagctaaaacttacacttaaagatttaaagccgacccagattcgcaccaaataagctgatagtaaggcagaacaatataagccgagtccgctcgcacgttctcgctgacctagaggcatccgcagggtaagccggacaccagcgccgcacctacaaagtacgacgagtcagtctcgcatacttcatacgtaagccttgtgattcgagttcaacgtatacaggataagtcaagggacgccttgccccataatacgtttcgaaactaagcttaaacgccaaggaaaacctcgcagaatataagccgaggataaccttgcacaaaaaactcaagaacaagcttcaagtcatcactaaattctccgtctagctcatcattgtcacttcgtctctaagacaaactcctaattgcgtatttagataggataagccgagctgcagatcagcacgaatctaaatttcacagcataagccaagcccagccttgcattcataatctgaagtcaaacttagtcacactcccaaataacaaacaatatcaagctgaatcaaactaccagttacggttaaagcgaagctcgatctcgcacatacaaagatcatttcctaaaacgcttgacaaagacacgatccacgacataacttaaaggtcgtgcgatctccca

SEQ ID NO: 5732 - DNA, 2645 bp, Arabidopsis thaliana landsberg
ccttttaggcttcagctttcttaaaagtttgctatggggagaaaccaggaaggtccattagcccaaaacttataatatcaattagagaaagagatgcaaatcacccaaaggaaaaaaataggagaaacaatggccttataaaaaaatgtaggtggtggaacattgtaagaagattctagagaccctgttcgaggaggtaatcacccaacctctcgacgaccatgttgcactgtcctggtgtcactggctcttcatagatcccaaacacacatgactgtcctgttttctttatcgttatgcctcctgctccctaattgaaagaagcatatattgaattagaaccctcttcaacatggtatttgcatatctgatcatgaagctactgattaggttaccttcttgccacggattacagccccgggctcaccttggatcaccatgtactttgctcctgccatgaataatcccgtgggtgccaagtgacccggttcgtcgaaatctttcataatatcactgaactcctgtcccttgaactatatgaaagaccaaatcacgattagtcgattaccatgagacaacatgcatcatttgttttcaaatctatgcaaaacatataaaaagaaacacacacacacaaaatacactatatatatatcccatgacaaacattgatagaatctaatcaaaacatgatgcatgatctaaatcacattgtaaaaacacatatcatatcggatagcaacactatcaggatctaaatcacattgagatcagacgcaatgaaatcaaatacctgagggaagttggcgctctgagcccaaacgctaccgtcatgaccaacgatagcggcagcagtaaggtggtgtccttgaccatcgccaacatcacacatcaaatgctcatcaacgtaagtttgccacgacatcttcttcttcttttcttattttttttcttcttctttgtttatgatctatacgttaagtgccccggttatgtgcagcgtggggacttcgtccttcagataaataggagaggaaggaacaaggatcattttaaaaccgttggatcacatagacgaattctcagccctacatcttactttttcttcaaaaaaacaaggagtgattttcaattagtgccgctcaagtttcgcctttgttatagctcaatcattgtttcgctatttgccacgtctactttcttcccttttcctatttcccctatttataaacgatcaccaacggcattttagaggaaggaccgaaggaatgattatttactcgttagtcgtaatcttgttagccaataataatattatgtcctaaaaaattcaaacttgttacgaccaaactctttggtcacgaatttaataacttatctagatagatattcaaactcgttacgtccaaattcttatgtcacaaatttcatttgattatattcatagtggctatagtttatcgaattcaatttagtaaggagatgattgctagacaaaaacaaaaacatagaaacatgaaccacattttgaaaagaacattgtattaaaacctcaaagattcttcctacagagtcatatattcaaaaactgtactgttcgaaaacacaaagctacctgggattagttagtggcattgtttgaaaaagatttgatatgatgaaaacaaagaaactcgagaagatttctatttcagtcggtgagacgatatgatcgacctctgaatgctgtgtttgaactctcgggtggggcacgagcgcttgaataagctcctcctcctcctactcctcctccagctccgggtcctgctgctcctacaccacctgcttgtcgaacacttgcaactggagctccaattcgccatcttgctacgattttattactgttgagaatgtcaaggtacaacagcaaaacaaaaactgagaagcgagagaaacaatcatctggaaataatcgagaatttgaataaaggatacacccattttggggttttcaggtagttttttccggtagcaagaggatgaaggactgttaggaagtagtatagatgtccagctatgatgccaagaagatctggcatgatcggagaaccgaagataacatcaagtgctagcattgcccatgggaggtagaaagcctgtggagtaattccaactttcaccattaacattatatataccaaggagtggatttgattacaaaagaaacactttcaataccttaagagtgacaagaccgtataggctgatgttggcatttggaaattctcggctccagagataaagaagcatgaacacaagtgaaacaccaagaaacggtgtccagaaaaatggtatgactgataatacctgaaatttgaacaaggtaactgttttaacacacggatttactagtatgaataccttccaaaattttgtctcgctttaataaaatgcaaccctgattcaattctttgagagcttctgatcttctcagctttgggatattatgtaccagcgattatctactttgtggcataccacatactagtactggggttctcaaagaaccaataacaatgatcagtaagaatagaatacaggggaggctttacataccaatagagtgaaggatccaaagatcatcatccacaaaaagtgtgctgtcc

SEQ ID NO: 5733 - DNA, 5011 bp, Arabidopsis thaliana landsberg
  unsure (1)..(5011): unsure at all n locations
catatagtataccttctatagtatctatgtttcccaaaaaataaatcgtcttcgcggtatgccacagctagatgagtagtataaggaacttctctctagggggggatgcatgtcctcttagtcgtagcgcccctgtccaacttcattgacagatcatgcgctgccaaaacaaaaagcagagaagagattggatctccctgcctcagacccttcttaccagggaagaagcctataagttccccattaaaagcgacactgaaggaagtagtcgtgaagcactctttaacccaaccaataaacacctcaggaagattaatggcctgcagaacattcaaaaggaatccccaatccaaattatcataagctttggcaagatcaacctgaagacaacctcttgaagtaataccatgagaatggaaatttgtgactagctcagaagccaacagaacgttctcacacaaaagacgccccttcacaaagcccacttggttaccttgaactgcatcagagataaaaagcttgagtttttgcttaatcagtcttgcaataatcttgtatatagtagtacagcaagagatcggacgaaactgagacacactatcagccccttgcaccttagggatcagagtaatcgcagtagtattgaagttctttggtaaccttccagaagaaaagaaaccctgaaccgcttctattaaatcctgaccaaccacatcccacgcttcccaatagaactcagcaggaaacccatcgggacccggagctttgttcttaggcatagaagcgacagtatcccgaatctcctcccttgttgggacctttattagctgagaaccaaaccggttgaacacctaaaggacaccagatcttgaatttcatcaatagacaaaggagagactcctacaatttgagtgcccaacagattttggtaatacgaaatcagcatatcctttaactgcgccacatcctgaatcctttccccatcctcattcctcagcatcttgatacaatttctgcccaaatttgcaatcacatacttaaaaaagaaagtggtatttgcatcaccttcctttatccatcttattcttgatttttgcctataaaaggactcttgagcttttgcgaagaacatccactcctttcttgcaacaaattcttccctgaaaagtctatcagacggagtaatcatcattgctgcttgaatcaattctagcttttcaagtgagtctttggttctttgctgtatattaccaaagccctctctattcaattttttacacgctgcttttactattttcatcctctgagccaaagtaaacagcttagaaccgacaccaacttccacctgccaagcttcactgataacatccaaaaaccttctgtgcgtagagagaaaagagaagtacttaaaggccttattacttctttccaccaaagctgaggagtagatcaaacaaggagaatggtctgaatctcctggagggtcaaaactgataaggactcaggaaacgcagcagtccaatgatcgttcaccaaaaccctatccaactttctcaccaccggatcatcaatacgctcattataccaggtgaaaaaagcacctctagccggcaagtctcttagctcattgtccactatacagtcatgaaattctgccattcctgcaagaggcaaagtatgtggtaacactgaataatgttcagatgcatacagaatctggttaaaatcccccactaacatcaaaggcgaatatctagctggagaagcctcaaaaatattttgaatatcctgccacaattccctcctttgaactgctgtgttataagcatatacaaatgcaactaagaaattttctttagtggcaggcacataaactccacacagcattatctgagccgacttatacagacaaataactgaaacagcaaggtcccacacgacccaaatcctaccattctccgcaaactcgtagttcatctcgcctctccaccccggaaaagctcctccaaaaacccgctgagcattctccactgaggcatgagtctccaacaccccgccaataacctnnnnnnnnnnnnnnnnnnnaagcctctaatattccatccaaaaactatcattaagaacccaaaagttgttagagctatgctctatcagagagaaacaagcttaaccgagggagtaccccgatcaacctgagacgaagaagcaataccagaaacctgctcacctcccttcctaacaactgaaggcaaaacaggacccttgagaggcttcttgacaaaaaccatcttagcttctaacttagcaagctttctagcacttttcattccgggaaacagtcttaacggctcagcagcacccggcttaccatagacttttcccacaaaagaatctttcacctccaagactttcttaatactctttccttttccattggctcctacctctatccattgatctttatctgcaatagaaggttgagactcaacaattttagtaacctgcaacttcttgtctgcactttctttgatccacgccttaactaactcctgagtttggatagacatattctcgtcacgcttatgactaacagatatatcaaccggaggagaacttctgctcctctcttttgatcttctccgagtttccgcccgagcccgagtccttttacttgggttagtcggtctcttctggctttggtctgtctgagagcttatactctcctttccaagcggtgttaaagtttctgcaattgcagtccctcctggctccatacccttagctgcagctccatgcttcttcctcaacaaaggctttggacatctatccaacaaatgcccaaaccgatcacagttacaacactttggaggtaaacgagggtatgacacacgcactttaacttgattcatcatagcatccctaacaatgatagttgtcggaggcggtttggccaaggagatttccaccttcacctttgtgttgccaaagtagaaaggatctaacttcgacttctccgtatgcagtggcttcccaattgcacttgcaatgacactaatgccatcaagtgagtacatctgagccgggacattttctagaattgcccatgtaggagccgtctccaaatccaacatctgcaatgaagcatcaggtgaccacgggtacaccgagaaagcacaattacctgcctgccagtaccccacttgcaatacccactccctggtcgaagtacagggtatgaagataagacacgaggtatccgagactgcgcgaatgactatgtttccaaacttgccccaagctggattcaaatcagagaagattttctttggatgcggaatgaggccatggaattgcgccactatatgtcccttccactgctctgccgttttcaaaaggactgaagctggtgcctgaaccaccggtgtgccatcttcagtacagaccggtgaagagatttttcttaaattccttaaagaagccttgaaccgctgagagtatgaaggtgctgcggtagaaggaatgctagcaggaattgaggactggattggggatacaggactttcagaaactgcagcgacagaagacgtagctacagtatctccagaagacgcgaggggaggaacagagacgggaactccaacagaagaaacaatcggcggaactgacacacaagataaaggatccagtgacggaggttcagcggctgaggcgactgtagaaacgattagggttgtaggagaggcggctgcagagtcagaaagggaagaagaagaaaccagatctgggggatctggggggagcagcagaacaggaccaatgattttcattagccagcaagaaagaaaaaggggggagaaaggagagtattctcagggaccggcgtgatgccgatctccggcggagattcgcgaaggagccacaaatcgcctcaaaaacgcacgggcacagttaccactcggagctccacttgagagtattttttctcagtaaaacaaatgacatttccagactttagatttttgacactaccattcttttattacatttcgttgtagtgaggctttttctgttcagtcttaaaatacaaattaaactgtccagtgtccactacactaatcacttcatgctacggcccgctaattaatgtttaaatatgtattgatcggatcagaaagaatatttgtatgataaaaaaaaaatctgttctcttcctcacagcttttctctcagatctgtttgttcgggtttatttttgctctcttgcttagttctgtttttcactcaactacaattttttcttaagtttctatggttagatgaacttagactgttattgtttttggaaaaatacgtagatctatccgtctcaatactttgataaactaaaatctgtttctttttcctataaaattgcagattttgtatcacacatgggatctaaacctagctcgctggctgatgaagtagccattattgttgagcaagtagacaaggttatggggatggttttttgtagccccctctactgggaatctatagaactccttgcaaaagatgagctttcacgagccatattttatgaactatcagaaggaagtaagattgattatcttaaatacaagacaaaagcttccatggtcccagaaatgacacggttttatagttaaaagcttaaaacatctatgtttttatgtttttggattttcgtgttgtgcttgagtttgatattgtcgaatatgtttcatgttcattgtttatatacttgtgcttgtctacttgaattcgatgtgttgtatggattataaacttgggatttgattttatggtaacatgaaactttggtttggctttatatgtattgtgattttcatttaagtttttaatcatgattttgttatgttgccatatctataaatactaaaaataataacctttactagctaattctttgaagtttgaagtttcatattacagagaactagagtattgttgttcaatctccaacttataa

SEQ ID NO: 5734 - DNA, 559 bp, Arabidopsis thaliana landsberg
  unsure (1)..(559): unsure at all n locations
agtcatcctactccagaaagcgacaatatcgactcagcaatctttgaacgtttcagtattatgcctttgaactgaccagacctcaatcatgtcttaactatagaaacaaggagtgagacaattcatcaaccagatgaaaccaatctcaaaagagagcatcacaagatcaaaccgggaagagtaccataaagaccaccactaaaaccatggaacacgtgcaaacaagtccaaaaaatagagatcaagctagtcactacaactgttttgggtaaccaaccaaatcaataagaggaggccacaaaacacttgaacacaaaaaaggaagtgggagagaaaagagagggaccgaggcaccaaaaacaaaannnnnnnnnnnnnnnnnnnnnnnnnnnnnnnnnnnagtctttggtgcttcaaacaaaataagacacctgactagagacaagacgaagatccacatcatgaggcataagcgagaacatcgactatatttttaccatctactttaagggttgttgatttcagttttttagaaccaagcttttttacaaccaatcta

SEQ ID NO: 5735 - DNA, 3634 bp, Arabidopsis thaliana landsberg
cattcttaacttgcagtacgtggtggtgcggataaatattataactaaatctgccattgaccaagtacggaccggttgtacgcataaatgaacttggtccgtaggggtctgttttccgccccaaagatagggtggtataggctaatggtttagtccgctccgtaagataaacatgaccacttaagtctgattgtgtcgtctcatctgtcatcaagattgtgtccaattcgagatattgaagcaaccaaaaaactatggcagttacaccaaaaaatgtgtacaagttcgagaaaaaacacacatcaaaaatgaaaagaggaaaaataattgatcgaaactctgaacatctcttatcatctacttcttgttcttcttcttctttgtcttcgtcttatctttcgaattcgaatggcgtaagatcgatcctaacccaaatgtagatggaccattgaggactggaatgacggagaagcttcctcctccttcacctttctttcctgtgtgcttttgaggtctgaactgatacgcattgcagcaagaggaccgagaagagggcctatggttgttaacatctctcagcattgctctcttagaattagtaaccgaacctgtagagttgcttcttgtcagccgaggaaacgaacagatgagactcttctttatgtcgcagttgaggctggagcttctcttgaaactccaaaacgactttgatgacttctctgcttctgagtcagagtttgctccacttgctctcccgttggtttccttttcgctgtgttttgtgggtaacggttgtggcgagagaggagatggagaaagggaggatgtaatgggagggagttcgtacttgtagagacgttttggcacggtcgaagctgcagttacatggaaaggaaggatcataccgtctgcaaagatctcatccgctggtgaggagtctcctggatcaaagctgtttgagatatggaactcgaagtccgagtttgatgaatcaagaagagtttcgtctcttcggataaggcctgatggctctatcacaggtggtggtgctttatccgattgaccaagatcactcgagaacgaaatccgctgaagagcctctgtgcatatcatagtttggaaagaagataaaaaaagtcaagtgagtgaaaaatgatcttcaagactttgcttttagaagaagaatggaaagttgaagtatcgaataaatgtcataagttggtggggagaagttgaagttattcgaataaaataatggaagacataatctgtctaaagattgtggtgagccactcactactaccggaagcaatatcataatacttaaagaggtatttgtacatggcttaagtaagtatgtgttaccttatagtttcattaaatctttgtaggcatatctgaacctggaatagagaaaaaaaaaaaggttagtaaaatcgacttagtagaaaggaagaaaactgcgtgaagcttattggtgatttgtgaatatcttacaaagattcttgtctaaaacctgtcaagtcatcacacaacacatatggatgcatcaggaaaccacacaaaacgcaaggtcctaaacttcagtgataatcaagtaatctggatattcaacaaagaaaccatctctaacctcagagatgtgagatgttgtgtacaagaaagcttgttctttccttccactgacatagctcaatgtaccattggtaaaacaaacaacggaagcgagccatgaaacatactcgagaagaagtatctgtgttaaagatctgtagcaatcaacataccaacaatggcaacaataataagagtagagagactatatggacaagattcaagaaacctttttaaagtaaagcaactgcatcattaaagaaacaaacagctacaattagactggtgaagaatttcttaactaaactaaacatagctaaacttgagaaggtctcaaagtagaacaagaagagagaaacaatattgaagcaactgcattactaaaagaacaaacagctggagattacaattagtgaatgaatgataagattcccagtaatctgctttacaacaataacaacaaaggatcagaaaccagaaaaattgctaaacttgagaatgtctcaaagagtagaacaagaacagagagatacatattatcctacagagtaaaaacctttcatgttgtttcctaagctccattatacgaatcaatcgtcacttcttcttcattcaaccacaatcctggaaaaatcgtctgcaaaaacaaacacaagaacacaatttagcaatcatccaaaaaaaaaatcaagcaaccaaaaattaaacaaaagaagattgttaacttacattcaatttcttctgaacaagccttggtctcttcttaggtctcttgggaggttttttcccaaaaacaaaggagaaatcttgttcaatttcatctctcgacaacgcaatagagaatttcgatttctcattcttcttatctcctcctccatcttcattatcgatgatacttcttctcttattaacgccaatttcaatttcttctccaggttcactacacgcagctcttctcatcctcaaattccatggcttagccgccgcaactacctccccgttcttcgctcctcctcctcctcctcttgtaagagaaactccagctatggagacggatctattggtggctgcgtgatcgggagaggaagaagaaggaggaggagatggtagattgacgcatctgaggaatctttgttgaccccaacggagttgaggcaaagagaagttgtggagacgtttcgatctttcaaaaggaggctccattgttacgtcttcttcttcttcgattcgattttttttgttgagagcttcgagagagagagagcagttcaaagtttttttttcccgtatttattctcagagttattttattcgttttccttctttttttttccattgtcgaaattatttgtaacgttgtgcgatttatatatagaacacaaaaaccaacttgtaaaaggaaaataacaaaaaaaaaatagaagtgataagcactaaaaattgatatattcttaatatttcaattaatcctaatttacgagtttttttatatataaaatatgaaatgtatttacatgttggacacttggggctgatgtttttttttttttttgaaatgtttgaattatttagcaaaaccattgtaatataatataacatctcccttcatctagagaagtgacacaatctaaataagtcgatatgtttcgaagatgtaaatttagcgccaaaaatagagtttaatagttttttaaattaaaaaaaaatgaaattaccacaactttaatgcaaaaatctattttaacgtaaaataaaaatacatctataaaaactatgacctgattaataatatagttgaaatatctttgaatttctataatagttttgtatccaaattccaaactatcattacacaaaatgcaacatcaaatttttgcattgaaattcacatgattaattttagatttgacaaacgcatatatataatttcttcattttccaaatgttggaaaatatgtcattaaattcattaaggcccactagtttctactataaaaacgcccacaaactcaataagcca

SEQ ID NO: 5736 - DNA, 9137 bp, Arabidopsis thaliana landsberg
  unsure (1)..(9137): unsure at all n locations
ttatacaagtttctaccaagtataaaatacctaagatcaagtactaggtgacgttacggacatatatgcattaagattaaactcaattagaaagaatagtgtaaacgatcaaacaaaaccatagaaaccgccaacctaaatcggatctaaagtccccatgaattcccctttcaaaccccctcaaacccaactagagatctactctctcatggcaaaggagctactcaaaatttgggttgagtaagccataataaaaagacaaataaaacttaaaaagggtttaaagattacttctttgaatgtagaacacaagaggcaaagctccaccttaaagaatcttatacaaaacgaaagagagaaagagangagatggtgatcttcaagctcaagaggtgcagcggcgagttggcagctctcggcaatggctagggttcactggtgatgaaggcacacctagggttagggctaagtataagtatttatacttgaggcctaagaattaggtttaggggtaagaacgtcaatctgtgggataattaagtgatccggccgagtagtgggcttcagggaaggagcctaatggcggcggcgcaaaaagggaaagacttgggcgtgacctaatagtcggtggtgagctactcggagctgcccgagttcaagtctcagcggccggatgtgttttggacttattatttccaaacagtcggttcttgacatgtcttcacccttcggaccatatctttcagacggcttcatggattgctttgattctactttgacgtgaatcttgactcttctagctttcaatccataccgaaatatcttcataccgagttcaagaagaccttggccggatgctaaacttccaaagcactagaatgattgtcttttgatacttttagctgcaagactcttaaaaccttcttggcacttagaatatgtgtttctcctctcattggctctagaatggcatcaaatgctctctgaaacataagaaaacaatagctaaaacgggctaaaaagccgtgttatcaacatgtcgtcggaaatccgacgaactataattggaaaaccgtcaaacatttccgaccatttatttaccgtcggaaagtctgtcaaaaaaggctttgttctcttgtattttattagattcaaatacaatctgaaagcttttgttgtttagaaatgaacacgaaatcagattcttacgaatcacaaagacatggaacacgttcatgagtgtgaatttcttcccatatgtgagttttaaaaccatttttcctttccttttaatcgtcgtggtgctcatgtttcccatgataagtttttctcattagaaccttgtttgttcgttgagaacatactcccgtaagagcacacatgcttcgtgtcaacccaccaatcattagagtttgtcatcatttttgcctctgaatcgaccgcaacaaactgattttgacaaggtttgtgttacatgcatctccaacaatgtactttccgtcttatggcggtagtccttggctgtatgttcaggctttccatacatccaacaacatcttatggcttcttcttgctgttaaaaccctttggtgaaatgaacggtttcttaccgttattgttcttcttgaagaccttgaatatggacttgtttccttcaattacattggctttgattccatagaacaaaactcagaattctcattcttacgattttcctcttcgattcgaagattgagaactaattgcttgagacatgtcttcttgtagatgctttagatagatcttgaaatccttccaagttgaaggcaatttttcaatgctccaagcaacaaaaaacatttcatttagccccataccttcatcctacaattcataagtaacaatctggatttcttccacgtgttacacatttacccctacattggtgtacatagttttatgtggtcgtctattttctaggttataattatcgatctttgctttgacaccctacaaagaccctaggaaacttaactttgagattctcaaaaatcgatttggataagaagaagattagaatcaatcccaatcattacaagaaattttgacattattagcgcaaaatatctgttatcatacatataacttagcgaattcacaaatgctatgacataggcagccatcctagggataacccatactatagcatttttttaattgctacacaattgacgaatacgatagcaaatataaaacgctattaagtattttcatatagcaccacgtgttttgttatcgtatatcatagtacaacagctattctattttgcgtcaatatatatttgtgtagcatcagttttgtgctaaaaaatatgcttatactatagctcttgtgtaaagcggtaaattatttaattctgacatttacatgtgctataatacaatatttgaaaacaaatattttagtgttatgatagaattatagatcatttatttatttgctattgtgtatgttttcatatagctataatatgggttttctaagaataattagttatacatttagaattacatactagctataatgtaatgcccctgaccttgactatgcggccggacgtaaagtttgtcgagtagaatgcgagatcaagccaagaaaaggcaagattagttcggccatttagtgtggcaagtcatgggtaaggaacattgagtaggatcaagtctacgggtaaaggaatgactctccatcatacggtccaagcttagctacgatgcgactatcggttaaccccaaaaccattaggctagccctaagaactaggtagcttaacgaaaccttagttttggtctaggaaacctttgaaagactaggaaaccttagagggttgagggaaatccatttgcgcagttggatatgtgaatgggtcgagggattgatcggagaatgtggataagtgacgattgctggcttactcagttaattctggcatgcaacgtgttatagtcctaaagaagccttgatttgtatcatggaccctcatgagacattggggacggagtgtgccgtatcaatgttcttgcggtccggtgatagatagtaggttttaccggaatgaggaaacggacggccatgatcgaaccgtggctcatgtatatgcgataagggtcaagcttatctacaagccattcatccttatccatttagggtcgtgcttatccttttttggatgatatttatccgaaaaaacggaaggaaccaatcggaggccgattagtgtcctggatcgcccgtggggacgacatttgttgcgttctgactggtccgggccacctagtgcttacgcatacgcgacctaacacccatataaatactccctccgctcatttgattccttagacccaaaatcgcttagaacagcttagttcgcgggagaaaacattcagaagccaaaccgctcgggaaatccaagtgagtcttgagttacgtgaagtagcacgtgaataggatagtttattcatttatttccttaatatagcttaggaggttaattatgattacttagcttaattatttgcttaatccttgattaggatagttaattaggtttagtaattgttaattaggattagtgttcattaattagggttagtatttcttaagcatgattagggttagttaaaccatgattagggggactaaccgtgattagtaataattaagtgcgattagttgtttgattagtagagttttgcatatatgatgaatgcatgatagtatgtgagtctgttgtcatgttagttagtctttaattagatggctagcattagccgaatcatgagaatcccgtctgcatgttgtgcatcacgtgtaactccgttccgttatggcatacgaaggcctcagggctggatcgctaccgactgggcgctacatgacgatgtagtctaaaggaatgttatgtctcttatagactttgtgtctacgagtatggaggcatgtccttgggagatcatggattcgtagaaggccttacctaggttgatagaagcatgcttgcattagttgtccgcttcatattaggaaattcgagtctgcatgcattctgcatggtgcattatattttgcttttgttgtatgttgcgtgttttctttgtttatgtcttgcttgttaggtagtattattgttacgtgttgttgctgcttagggggtaaggaagggtattatgataacactatctagatctggggttcattaaggaatgctagattacttatgacgctacttatctttttcaggaaaacttagttgaccaaccttgtagagggtgctcgtgacttaggacgaaccaatgtaggttttacggctttttgtaaattcttactaaatatattttatatggttttcaaagaggatccgaaaactatctacgttttggtaaccatttctcgtatgatatatatatatataagactcggatttctaaaatttatatggttatactgactgatattagtcttttccggactatcacaactcgcgtccgcggtatgggttgaaaagccttaggccacgggcgggaggctggactcttgcggttggccgactcgggcgaacgaattcgtttcggaaccctgtgttggccgactacgggcgttcaacgtgacactcctatttcgtttatatttttatagcgggataggggtgttacaaggtggtatcagagcatggtttgtgatgctacgagaaaccatggttttcaatgttttatcgagtaaatgtgtcgtaaatagttgttaggaaatttgttcagtcacttgctagagcttaggtagattgacctataggactaaccctttttgtttagattggcttacccttgttgttagtattataggtggcttaccgttttgcttgtattttcgtgtcttaacctctttgtttgtattatagaatgccgctaaagagatcacgtggtagggagtctgtggaggaggagggacggtccttgggtctgtcgtccaggcgatatgaccttcgtgagagagtcgggggtaggtgtgtgagaacggatgtggccgagtgttcccgagttatgtcggagactagatcgagcgatacggttgctgattttggtcttgcagggatagctgctatgtcagagcgggaggatgtgcatataggggatgggatgatgatcgattcggattgtgaggatgattgtgtgatcacgggagtgaggacggtggagcaggagctggctccgaagggacatgagatcgtgatggtccatgactatgtgagtgtttcctcgaaaagttctgcctcgccatcctttgcacttagcctatattcaccaatatcctatgagtcagatccgaaggaggatcaggatccaccgatttctccatacgtcccggaggctgttgatccaccgatttctccatacatcccggaggctgttgatccaccgatttctccatacgtcccggaggctgttgatcactctcccgatagcccttttgcactgttatgggagggcacgtcccccatactctgtttcaaggctgatatgagggctgacgctattccgacctttgatgggggcttcacatcgggtatcaagatactgttctgcttcatctgtggcgaggatggtcattacccgcaagactgtcagttctacacgcagtacatcccatggccattgcttgtctctactgtggagagtatgagcattatgcggctacctgtatgctgatgagagatgacggtcagattcctgcaccgacgtatacttccctatctcacgtagcaggaccatcatccccattgattcccgacaccgaggatgatctttttctaggttgtacctgttcgaggtgtagcttagggttaccgtgattcccctagaaatcataaaccttagtaaatatttggaaactaacccaagaaaaggcttatgatttatgatggcgtggcagaactgctagaggaaacactcacatagtcatggaccatcacgatctcatgtgcccccggagccagctaatgctccaccgtcctcaatcccgtgatcacacaatcatcctcacaatccgaatcgatcatcatcccataccctatctacacatcctcccggataatccgctctaacatagcaattatccgtgcaagaccagaataagcaactgtatcgctcgatccaatcttcgacataactcgggaatactcggccacatccctcctcacccacctacccatgactctctcacgaacgtcatatcgcctggacggcagacccaaggaccctccctcatcctccacagactccctaccacgagatctctttagcggcatactataatacaaacaaaaaggttaagacacgaaaatataagcaaaagggtaagccacctataatagtaacaataagggtaagccaacctaaaaaaaaagggtaaatcctataggccaatctacctaaactctagcaagtgactgaagcaatttcctaacagctttttgcgatacatttactcgattaaacattgaaaactatggtttcccgttgcatcataaaccatgctctgataccaccttgtaacacccctatccctctataaaaatataaacaaaataggagcttcatgtcagacgcccgcagtcggccaacccaggtttctgaaacaaattcgttcgcctgagttgtccaaccgcaagagtccagcctcccgctcgtggcctaaggcttttcaacgcgtaccgcggacgcgagttgtgtaagccggataagacttatatgagtcagtataaccatataaattttagaaatcggagtcttatacatatatatatatatatatatatatatatatatatcatacgagaaatggttaccaaaacgtatatagttttcagatcctttttgaaaaccatacataatatacttagtaagaatttacaaaaagccgtaaaacctacattggtttgtcctaactcacgagcaccctctacaaggtcggtcaactatggcatcctgaaaagaataagtagcatcataagtaatctagcattacttagtgaaccccggatctagacagtgttatcctaataccctttcttaccccctaagcagcaaacaacacgtaacaataatacaacctaacaagcaagacataaaaaaagataacacgtaacacacaacacaagcaaaatataatgcacaatgcaaaatgtatgcagactcaaatttcctaatatgcagcagacaactaatgcaagcatgcttctatcaacctaggtaaggccttctacaaatccatgatctcccaaggacatgcctccatactcttagacacaaagtctataagagacatagcattcttttatactacatcgtcatgtagcgcccggtcggtaacgatccaaccccgagccttcgtatgccataacggaacggagttacatgcgacgcacaacatacagacgggatcctcatggttcggctaatgctagtcatctaattaaagactaactaacatgacaacagactcacatactatcatgcattaatcttatatgcaaaactctactagtcaaacaactaagcatacttaattactactaatcgtaattattccccctaatcatggtttaactagccctaatcatgcttaggaaatactaatcctaattagtcatcactaatcctaagtaacaattactaaacctaattaactatcctaatcaaggattaagcgaataattaagctaagtaatcataattaacctcctaagctatattaaggaaataaatgaataaactatcctattcacgtgctacttcacgtgactcaaaactcacttggatttcccgagcggtttggcttataaaggtttcctcccgcgaactaagctcttctcagcgatttttgggtctgaggaatcaaatgagcagagagggtatttatatgggcgttaggtcggctatggggaagcacgaggtggctcggaccagtctgaacgcaacaaatatcgtcccacgggcattctgggacactaaacggcctctgattggttccttccgttttttggataaacatcatccaaaagtggataagcaagaacctaaatggataaggatgaacggcatagaagataagcttgagccttaacggataaacatgagccgcaattcaatcctggccgtccgtttcttcattccggcgaaacccacgatctgtcactggaccgcaagagcattgatagggctcactccatctccaatgtctcatgagggtccatgacataaatcaaggcttccttaggtctataacacgttccatgccagaattaaccaagtaagctcgttatcgtcacttatctgcattcttcgatcaataccttgaccattcacgacccatactcatatcccactgcccaaatggattcccctatggtctcctagtccttctaaggtttccaagtccttctaaggtttcctaaaactaaggttttcttaagctatcctaggtctaagggctagcctaatggtttcgaggtttaccgatagtcgcatcgtagctatgcttagtccgtctgatggagagtcattcctttacctgtggacttgatccattgcaatgctccttacccatgacttgccacatcaaatggccaaactgatcttgccttttcttagcttgatctcgcattttactcgatagactgcacgtccggccgcatagtcaaggtttggggtattacattcttccctccttaaaagaattcgtcctcgaattctaaggactaaggaagtaactagccttaaaaaaaaaccgattccttcgttggccttatgaagcttctcatgttaaggatctcgccttgggtaacggttcttttataggtttggtctccaccattatcttcttacaacctctttcccattcctaggaagttaatgcatgtctaacggactccgccactctcttgtatgtgatttttgtcatcaccacatacggcttagctaacaatttaacttttcggcttcctagagctttaaggcttagtttaataatcctaaggttccatcctaattcctatggcttttccctaactctcttgaataggcttcaggcttcataagggttc

SEQ ID NO: 5737 - DNA, 1854 bp, Arabidopsis thaliana landsberg
agataagcctttttacgtgtagcttaaacatgaacacgtaaacactaaaaccgaaaattcttctagattgaaagtgacaatatagatatacagatagagaagttaaacgaaccttttttattattcaaaactctgcacagattttcccaccaaactccatctttcttcttgctcaaaacacctttaaatacccattcgaatcaaagatcataatctcatcacaaacacaaagcaacaacaaacaccacaaaagcaaaagaagaaacaaacgcaagagttctcaagcaagctcaaacatggcactaatgaagaagagtctctctgctgctcttctctcatcaccacttctgatcatatgtcttatcgcattgctcgctgatccgttttcagtcggtgctcgccggttattggaggatcctaaaccggagataccaaaattgcctgagctacctaaattcgaagttcccaagttgccggagttccctaaaccagagttgcccaagttacccgaatttccaaagcctgagttgccaaagatcccggagattccaaagccagagttaccaaaggtaccggagattccaaagcctgaggaaactaaactgccagatattcccaagcttgaattgcccaagtttccggaaattccaaaacctgagctcccaaagatgccagagattccaaaacctgagttaccaaaggtaccggagattcagaagcccgagttaccaaaaatgccggagattccaaagcctgaattaccaaagtttccagagattccaaagcctgatttgccaaagtttccagagaattcaaagcctgaggtgcctaagctaatggagactgaaaagcctgaggctcctaaggtgccagagattccaaagcctgagttgccaaagttgccagaagttcccaagcttgaggctcctaaggtaccagagatccagaagccggagttgcccaaaatgccggagttacctaagatgccggagattcagaaacctgagttgccaaagttgccagaagttcccaagcttgaggctcctaaggtaccggagatccagaagccggagttgcccaaaatgccggagttacctaagatgccggagattcagaaacccgagttgcccaagatgccggagattcagaagcctgagttgccgaaggtgccagaggttccaaagcccgaattgccaacggttccagaggttccaaagtctgaggctcctaagtttccagagattccaaagcctgaactgccgaagattccagaagttccaaaacctgaactgcccaaggttccagaaattacaaaacctgcagttccagagattccaaagccagagctaccgacgatgcctcaacttcccaagttgccggaattcccaaaagttcccggaactccttaagcgaagagaaggcccagctactttgaagcccatcccacaatcttaaagtaccgttttaccgttataccatttgtctatttgcagagatgcacttatgtctgtctacatcattgtttccttagtaaaaaccatgtcgtatggttggtctcatagtcatagttcttgtttttttttgggtaaagactatacacttatacttgtataattgtatcctgttatattttgtattgtttgtttccatacagatttcgttgtatttgatatactttttaattgattatgttacttatttaagacatgtttctgttcaaaagctatacaatgaggtctaatccctcaattatatcagtttagctgttctgatactttcgacggctatcttcttcttgtttgtaatgctactacgctagcatcaaatgtttggcatcttttggacggattataa

SEQ ID NO: 5738 - DNA, 1044 bp, Arabidopsis thaliana landsberg
tattgaatagataaagagaaatccggattacaaaaggtcaagaacacagtgtctacagaataaaacttagattaaaacttgttctcgaaaatgtaaagtacatgctacttatagcaaaatattctgaaatcctaatactcaaaatgacgcaatattgggacggattaagaactgtacacgacccaggtggtcgagtgagaggtcgagtgataagctggagacttcttttcttcctgagtgcggaatgaagaagactctgaagcaggcagtcgagtatgtagtcgagtgatcgagtgaatgtgatgaatgtactcgacattgtggtagagtacggtgatcgagtgaaggtgaagtggtggaggtgatgatactcgaccagggggtcgagtggtgacgtgaagtgttgaggtattctactcgaccaaggggtcgagtggtttggtgaagtcgtgaagcatctactcgaccacagggtcgagtggtttgacatgatcatgtccgcttcttccagttagctcgccaacagctccaaatcacctgaaaaaacacaaatatgcaacatgcatgcaaaactatcctaaacatgcaaagtgatgacaaatgatgagaaatggtataaaacagtgatgatctgatgctaaagtgatgacaaatggatgctcaaaacatgcaaaatacacacttatgagtagcctagcttcttgattcttagggtgagggtacatccactgcagttgataccacattgtccctcatgcatgctcttcatgaggtcttttgtttgttgcccataggtgcacaccatgtagggaccagaaacgctgcgtttcatgagccttccttccatgattcagtacctcgcactctgtgctttgagctttctggcctcacacttatcgggaggtgtgatccctcgttcgatgtaaacgatgattgggattctccagtcattgtacggtttaggtttgtacggggcaggttgttcgcgtgtttcgtactctggttcctctttcgttgcacttgccccgcagctgctgcgatgtc

SEQ ID NO: 5739 - DNA, 3112 bp, Arabidopsis thaliana landsberg
ttcaaaattttgattacagggagagaaagagtgctcttattacttgagaaccggtcagtgtaaatttggtttgacttgtagattcaaccatcccgtgccactcgctgtacagggtccacctcagcagccgcaacagcagcagccacagccacagccgcagctacagactatttatccgacacttcaatctcaatctattccttcgtctcaacaatatgggttagttttgactaggccttcttttttaactggttcatatcttcaaagcccttacggtcctccaatggttctgcctcctggaatggttccatactctggttggaatccttaccaggtaaatccatcttctaagcctttatctcgcttttgtaggattcttcattgctactctttttgtaaatgaatctatcgactttttaggcttctttaagtgcaatgccttcgcctggaactcaaccgtctattggatcaagctctatttatggactcacgccgttatctccttcagcgactgcatatacaggaacatatcaatctgtgccttcttcaaattccacctcaaaagagtttcctcagcgacctgatcaacccgagtgtcaatacttcatgagaactggtgactgtaaattcggatcttcgtgtcgataccatcatcctgtagatgcagttccacctaagactggcattgtcctcagctccattggccttccacttcgtcccgtaagtcttttttcatttttctagagatacaaactcgatccaatatcagattttcaacgagtcttgatatgatacgtttcaatgtatttgacagggcgtagcgcaatgcactcactttgctcaacacggaatctgcaagtttggaccggcgtgtaagtttgatcactcaatgagttcttcgcttagctacagtccgtctgcatcatcactaactgatatgccccgtggcgccatacccaatcggatcatcctcactcagcggctcatcagctccagtaagctcaagcaatgaacccaccaaagacgctgtgactcctgcagtttcttctatggtcagtggctttagccgtcctgagccagctgagacgagtggtgactcagccagcgtcagtggcagcatagaagctaagacttcatgttaaaaataaaaaaagagaggaaaatatcctcaattcttcatgaactaagcaacattaagaaaaaaaagagaaaagaagattatttttggggtctgagatttgatggaagcagagagactaaagcttctgtcattgaccatttgtccatatataatatattctctcatacggccatctctcctctcttgtttatttttcttgaataacgaattactaataaatggccttattcaagcgacattcatcagaagtcccctgtttttattccttcatgaatctggaggagtaatttaaaatgtctgcgaacgtagaaagaagcataaacggatatagtgtacacattttctcttcctcgttcttgtaagttgtatccaatgacatctacattcaatcactgcacattgcacgaacaatgcctatgtacatcttctttccacaaaagtatcagatctctcctctgaacaaagaagtaataaattgtggaaaaaatcgtctgttcatatatccctcagaaactcataatttttgcttaagcttcagcctaagttgccatccaatggcctcaaatccttttgttcagtttctttacggaagagaagtctacaaaattataattaagtcatttcattaaatccaagtcaaaccaggacaaacattcatgaaagcagaatgaaatccatttgctatgtttttaacattagcttaactatatgtaacaacaaagactcgacagatccgtaaacacataatctcatctcatcgacaggtgcttccgcttcttcgtcgatgaaggactctcacttgcttgtcttcctaaaggtcgctttgatggtgttgcactcttcaaagattaaaaaccagaaaagcattaaccacctaaagaaatcaaatcaaaagaatacaaccttatacatgaaaatattgcattattttaccttcgcgagcttcttctcttagagggcttgcctctctctttcatcaaactcctggttctctttctcgatcagtcgaatcagagtgtcgcatcttcttgcaagttcctgactcgtgcgggatttcacaaaccagtcaaacctgaacacagacgatgtcctaaatgctgcctttagctcatcccaattcccataaccaagtttgtgaatcatgcagatctgtttttcaccaccaaagttcctcaacagtcaaaaacttcatgatataattaatgagacagaacagcaaaaagggaaacgagaaaaagacataccatgaaacggtcacactcttcattgtacagcttgcctttgttctgaccatattgaatcttcagttccagccaagggtttctgtagcgatccagtttcttccctatggccttcatgatttcgtctttcctagagatccttgcctctcccctctcaatgttcttaatgattctatcatagtctacatatttagagggaaagatgataaacttacttagcataagctctttttggaggtaggaattacttagaaacatgtaaaaacactgcataacttagcattgaaaggtgttacttaccgttcagctccttgtaccgctctttaaatactttggcatatctttcaacttcttcctctgttttcccttccatctcagaggcaatgctttttatgtcgttgcggccatacttctcacaagccctgaggaaagtattaaaatctcttctgctccatgttgagaaaccctggagattgacaattacaaaaaattaaataaagcctaccaaatcaaatgtctaagaccactctaacatcaaacatattcacttgcctcctccaataatccctccttttcttctacttcttcagtagttaagggatccccaccttctaacaaaaaaattcttaatcagtaataggtttgctgaaaaacatgttaacaaagtgggtacatgttaacaaagtgggtacaagcttgacctctgagttcttcaagatcctgagagaac

SEQ ID NO: 5740 - DNA, 990 bp, Arabidopsis thaliana landsberg
gttccagccacgggtttctgtagcgatccagtttcttcccaatagctttcatgatttcatctttcctagagattcttgcttcccctctctcaatattcttgatgattctgtcgtaatctacaatttttacaaaggaaaacaagaggcagagcttacttaggataaatatccaactttgtcgcactgcaaacactcattaactttacttaacaatctaaagttactaaccattcagctctttatatcgcacttggaaaacttgagcatatcgttcaacctcttcctcagttttcccttccatctcagaggcaatactctttatgtcgttccggccatacttctcacaagccctaatgaaggcattgaagtctcttctgctccatgttgagaaaccctaaaaaatatcaactccattaaattataaaaaaaccatcaaaaacaaatgtcaacccacagtaaggtcgaatggtttggcttgcctcttccagcaatagctccttttcttccacttcttcagcagttaagggatctccaacttctgcaaaattatttcttaagtaatagattcagtaaaataatgtaagaaaagagggcaaagactgagaaagaccttcaggttcatcaacctcaattgtgtctttcatttgagttttctgatgtgcttgctgaaaccagagtgaaacaaattgctattcagaactaatcagacacaaaagctgcataaattacataacatgttgataaacttgttattcccaccataaggtatcgcacttctttttcatacagctcagtcagcctctgaatgttaaagaactgaaaatcatgcctgcaggatggacaagaaattagatttttacgataaaagtactataaataagacagggaaaaggctaaatgcagagtggagacaattgaggtactcacaattggggcatgcgtggaaatctaagctctttagtttagctggagcaccttgtcgcaacgttt

SEQ ID NO: 5741 - DNA, 1414 bp, Arabidopsis thaliana landsberg
  unsure (1)..(1414): unsure at all n locations
actgcatgaggaataaattttgtataatgcagccacaaaatattaagtatttgaacccttctcataattatcaaataggctaacgtcgccaatgagtatcccatttccttgaatctcctacataatcatcccaactttttcacaatctgtataacaaagcaaacatcctccttccggtaaacatatcaaaatcaaaaacaatgtcttcatcctttgtatataaacgcctctttttggtccctatcttggccgtggtggccatgcaactctcatttatacagagtgttttgtccctaaaccagacaaatgagtatctacaccatttatgccttaatcgtcaagggacatacgagtcaggtagtaaatacgcgagagaccttaacaatctcatccaaatgatctctatctcaattttaggtgacgttgtcgtctttagcggtgacaattccatctacgtcaagctccagtgccggggggactcctccacatccacgtgccgctcttgccttgacaccgccttctctggggtaacgtaatttgaatattgttgattagctgtcacgtacttgcaaatataaatgtacacacacatgcatgcacactagttttttggttgcaccttactatcctgtactatattcgggtggtttagttgttgattggcattttgacaatagtaccaaacgaaaccataaatataatatagtaccaaagaaaacaatagagcttgatttatgtgtcaatatatatgtatatatgacaggttagtaggagatgtctgaacaacaaaggaagaataatatggtacgacaactgtgttctcacaattttaacatttcatacgtatggcgagatcgattaccagaacaatttctatatttccaatgcaaaggatgtgagcggtgatgcaaaatcattcaacgagaagacgaggactctcctctataagctgaaggagaaagcaagtagtaaagaaaacatccccaacaagaaaaattacttatatgcaacaggggaggaaagtctcgggaagatgaaactgtacgcaatggtgcaatgtacgcaagacttatcaattaaaaattgtagtgtgtgtttgaactggattctggggaagcttcccaaatgttgcaacggtaaacaaggaggaagatttttgagtacgagttgtaattttaggtatgagctttacccctttgtaaaacttacgactatttaacgagagcttgatatgcatatacttgttgtgtttgaataagttttctcagctaatatatagatgtaatttactctttgtgatatcttttgtaacacacctttttaattagtctaattgcattagatgttaaccaanaaatgactatgtgcttaataaaaacgactactaagaatgtagttggtaaaatcatacaag

SEQ ID NO: 5742 - DNA, 830 bp, Arabidopsis thaliana landsberg
ttttattatatttgtttgatgatgacaaaaaattaagagagtagtgcaatgactagaacaaacaaataattcaaccaacaacacataaaataaaaaggtcgctaagagagtaaaattattggatcaacggtgaaaaaaggaaatgatcacatctatatattcaacaattacaatgcaatataacagcttcaatttaagggttgaagcttttgtgtgaagagatgcaacatttcaagcacgtcctctgatttgcaacaccatccaaacgaaaccctctaagttagaggctctaacaaaggtcctttcttttagtagtcttcaaatcataagaaaagggtacagctcatacctaaaattacaactcgtactcaagactcttcctccttgtttacccttgcaacatttaggaagcttcgccataatccaatttaaacacacattacaattgttaggtgtcaagtctttcgtacactgcaccatcgcatacaactttttttccccaagacccttctcccctgccgcatacatgaaatccttcttgctcttaatgttggctttctccttcagctcatgaaggagatcccttgtattcttgttgaacaactcaatatcgccgctcacatcctttgcgttgtacataaagaaattgttctggtaaatcaatcttgttaaaggtatcgattgaagagatctcgagaacacagttatcgtaccatattattttccccttgttttttggacatctccttctaatctgtcatataaatatagacaccaaaatcaagaacaatattgcactgacaattaataaaaattttactttttatact

SEQ ID NO: 5743 - DNA, 4128 bp, Arabidopsis thaliana landsberg
  unsure (1)..(4128): unsure at all n locations
gcttgttgtcagcctatcttttaccgtgagccaagccatgaaagcaagtttgagaattctttctttaaaccagatttgtgagtaccaaggaacagttggaccagcagggtgaaggtgattccaagtcctagcagatgagaagtttccatgcgattgatccggtgaagttttccacaagaagatatcatccccaatagcagttgtaggaggatcgtgagaagttagatatgatcggagtagtataactaagggatgccttccacgaggaagaagccaactcccaacattagcagcatcagcaaccaccgcaagaaccccaataccagtgacacgcggaccagcaacaccaacaacatcaatgagcggtcctaagtctgtccaattatcatgctagaagagagtattatgacctgaaacaacagaacaaaaaatgaaagtcctagcaatagaccgcagcttagcaagacgtctccaaatccagcttccggtgaaacgaaaatctgcatcccaaaaattcctgcctcttactaaatgctttttcacccaagaaacccataaggatccagcttgggaaaaaagaagtcaaatgagtttcaaaccaaagatctgattccagtccactaatctttttaaaccaagccctcccgcaactttaggagtacaaacaacttcccaagcaactttggcaccccgagcagatgcagtatcaccattccacaaaaaggcgctacacattttcttaagaacgtccaaacacttgttaggtaagatgaaaattgaagcccaaaaattgatgatactattgatcacagattgaagcagttgcaatcttcctgcaaaagaaagatgtctgctagtccatgacgaaatgcgagacttcactttatcgatgagaggttgataatctgaggcattcaatttgtggggcaataagtggaaccccaagataacggacaggcaaagatccatgagacacgttatgccttgcagcaaaaaaaattaatctagattatctccatctagaaacaagcacgatttggtaaggttgatactcaaacccgagtttgacttaaaatgagcaagaatatccagaatagccaccaaggaagctttagttccatcaaagaaaaccaatatatcatcttcaaaacttaaatgagtgatgagtggatcaacacataatggatgagtgcccaagctaccttgagtgacagcagcatcaagctgctttgaaagaatgtccataaccaaggtgaataaaggagcagaaatcgaattaccttgccttaaccttttttcccccgggaaatatccaataagctctccattaaaagccacaaagaaagaggcagttgtgatgcaagtagataaccaatttatgaacagaggcgggagatcaaaagccttcagaatgtttattaaaaattcccaatcaatattgtcgaaagccttagagagatcaatttgcaggcatcctctagtcacaggacctggagtgttgaaatccacaacaagttcagaagctaataacacattctcccaaaggagccttcctttgataaatgcaacttgattcctttgaaccgccaatcccatgaatagtttaagtcgcttggcaaggattcgagaaataaccttatatattgtgttgcagcaagagataggacaaaaatctccaagtttgtcagcagatgaggtcttaggaataagggccaaaatagtagcattaacttgtttctgcaatttccccgatttgaagaattctataactgcttctattagacatggaccaacgattgtccaagacgaaatgaagaagtcagcagtaaacccgtcgggtccgggagctttgtttctaggaagagagaatagagtagcagttacctcttcaggagtggggatcgcagagagctgggtagccaaatcaaccgagcatctgaaggagttcaactctcgaatttgttcaacggatagaggttggactgttaagttcttggaaccaagtaactgctgataataatccacaaccatctgttttaactgattttgctcagagattctctcatcatcatcattccttagagagaaaattcgattcctagaaatatgcgccttaacgaaattgtggaagaactgagtgttagaatcaccttcatcacaccatctaattctagacttttgcctaagaaaggattcatctgcactagcaaggaaagaccacttattcctagcctctttttcttcttcaaaaaggacctgagaaggactggtaagaagagtagactgaactcaaattaggttttcatgcgcttcagcagaacgagcctggatgttgttgaaactacttctattaagcaccttacaagccaatttaactgccctaagcttttggcagagggaaaacatgatcgagccatgtattgacggcaaattccaagcagtctccacaaggcattgatagtctgggtgagtagtaaagaaagagtaaaatttgaattggtctttccttcgctcttcaggctcaccggctgttacctggattggggagtgatcagatcctccaggagcatcaacaagagaacgagattgaggaaacaagaaaaccaagtctcattagctagacatctatcaagcttgcgattgatgggattggttggttgaccattaaaccaagtatccgctgctccgcgagaaggcaactctaaaagctcacaagtgtcaatacaagactgaaactcagccataccttgaatcgtaagagggaaaggatgaagagagtaatgatcttcagccacaagtatttagttaaaatccccaagaagcaaccaaggatgtcttctctgaagactgtgatgatgaagctcaaccagcgaactccataattcccttctcgcaatcatacagtttctggcataaatgaatgtgaccgagaaagaacgtttcgtaaccggatcaaaaactccacaggaaataagttgatctgttttcttgtaaacaaaaacggaaattgcaggaccccagatgatccaaattctgccattcttggcatgaggagagtagttaaaatcacttctccaacctgggaaattacctgccaaaattaaagccgcattatcttgttggacatgagtttccaaaaagcctccaatagaaggtttatttgactgaagccagttcttgagctcatgttgtctactagaatgattcagacctctaatattataacaaattttttttatcatcatcgattgtcaaaaggtgcgaaagcaaagctttcaagcgtgatgatggggacgtccctttccaggcacccgtccactattagagatctttgaagacttaaaattctttggaggatccttttttgggtggtacgaatccacaaccttcccagcaacaatgtctaaagtcttctttgttgtaactgctttgttagtaagggaatcatgaatcaatggagaccctgcagtttgtttaacggtgcactaaccattctgattcgcttcctcctcttctgcaaattctgagccagttaaagaaatgaactttggttcatgttcggaccccgagacatgtgagagtgaaggtcttgagctacccttcacaaccttccattcagacgctgagtcgaaagcaggggaatcaatgtatgagtgattagacttcgtaaagtcaaactcaccagccttagtaaccacgacagctgacgaataagtatccacaactgagactgggacgacatgtgaaacttttcggacgacctgtttgggtggtatagctctgtaggtgacattagaaaagtttggtgtagaattatgtggagcggtacgcttaacagacgaagatggaatcctttcgatatctggagctgatgggcatctgtgatagagatgtccaaattctttgcagtagtcacattttggaggaagacgagggtattctaccgaaattctaacttcatttccatcatcatcctccaccaacaccgattgtggaagagttttcttgagaaggatctcgaccttgatccgggtatgaactgctaaaggatgaagaagaattntacagtgtgtaaaggctcaccaattcctgaagcaataatctgtagnccagccagaaagtataatt

SEQ ID NO: 5744 - DNA, 1330 bp, Arabidopsis thaliana landsberg
tcgctctacagacactagaggatctctctaaaaacaatcaatgtattcagatcagattagcctttgcgtctctgcctcaatccgttcgtcttccatcttcaattccctgggggaaaaagacacacacaaaaagaaagaaaatgatgtttttcttgttgatcttacaacattgtagcaaagtccctcgaaatacaaaggccttagaaccgaatagtaagagcatacaaaagcgaacggaaatttcgaagttgaggtgaattacttgagcagaagtggagtcataagctgagcctttccagtaggcaagaggaagtttctgaaaaatccagctttcacatcaagtaattgcccttgcttacccaaatccgtcacatcctctttcaaaattaccttaaagacacaaaacaagatttaccattagtgtttcacttactccatttctctacacagaaacaaagcttcaaaccaatttatcttcactacttgaaactaaactggtaatataaaggcgtctacttttctaatgttgattcatctttcttcctaactacgctgatacaagaacaaagacgatgtttttacactaaacccataaattaagcatcttcaagtcttttactttcatctccaccaaaattctccagaaacacaagctcaaatcaaaaactaactaaaagccaaatcaaatttttgaaggaaacccatgaaaggtaatgacttttaccttgcgaagtttcttagctttcttctgggaaacaacttcaaaattgaaccttcgctcagatacttttagggtttcatttgcaccgccattgaagctgtgtgaccaacaaggagaggagctccatgagagagacaaagctgtcgaagaagccatagccaaagctgatttcacttcaaagcagagataacaagagcgcacagttgtagtaattgttatcttcttatcggcttttcgtgtgcttgctcaagtgaagtgacgaatgtttttcttatgtttcgaatttgaccccgtaattattctacttttctgttttcttacttaaaagttttataaagttcaattgagtacccaaaatttaacggttaaatcggttttatagtgctaaaagttcctctggattttgatttacaatgtttgtactttgtatgatgattatacatatacacaacaaatctactcgatttcagaatgtacataatctctaaacacaaagttcttctcttgttcatgtaaagcatatgcagaagcagctgataccagtgataaaccagcaagaaccagtcgaatctgaacatcagaaggaacaccagccgtggcggcccagaa

SEQ ID NO: 5745 - DNA, 764 bp, Arabidopsis thaliana landsberg
  unsure (1)..(764): unsure at all n locations
aaaaatattaaaaggggatttaagattatctttttttaaaatgtgttcaagcataaatacatgtgcggaaaataggggaatagtttaattatcattatcattttgtaaaaacaaattattaaaatttataagtttgtgtactttggcatcagagatctataaagtgtaaaatatatatttttttgataattggagtatatattatcaaaaacaacattagtaaaagtaatattgatatttttaaatgatttaatggaattaaaaaaagatatatgcagagtttgacatttgacatattagactgcacaagctaaaaaaaagcaaataaaatcaaatgaacatttatacaagaaatgaatgtatataaatggatttattttttcctttctctttctctccatttttttccctctctatccatttgtttacaactttacataaaaggaagtttctacatttgtcaacacaagaaaactggagaaaagccaggtttaaatgtgattcattccgagtctaacactaatagcagtcggtaccaaacacagagtcaataaacaatgtgcatcgctgtggtcaagagaaaagatcttgcaatctctctgagcatcctattagttcatggctagcttttcgcataaagatttgatatgccacagtgcagagcttgaattttcctcagcttcattctgtgtttcgncataccaaattgtagttagtgtcaagaaacacgtacgggatgcatcagttgcgaaaaacacaataaa

SEQ ID NO: 5746 - DNA, 427 bp, Arabidopsis thaliana landsberg
gttttcagagatctctgttctaaatgcaggtgcctatctctttgccaaatctggtgttttctcttcgagggacactgcgggtacacatgaagccgactccttctgatcaattatggtttggattcacgagcatgccagatatcgaatttgatctcgcatcttatgttggggaacacaaaatcaccaacagccatggtgcaatgttcttgagcaaccggtttaaggtacagtttctggctcctttgcgattcggcttctttgtcttctctagaggactttcagctgacagggggggataacattatgattctgctgacggccttacaagaagccgtggttcttaggaactgagaaaaggctaacgatttcttggatgattgatggaaaagatgattgggtttaacgcacagccgaagcatgcatgtgg

SEQ ID NO: 5747 - DNA, 2123 bp, Arabidopsis thaliana landsberg
gacccatggtcgtggaaccaagttttgacagctagccaagaaagacataccatcccttgagaaaacttcagcaagcttcatgatgtgaaaagaaaaaagccaataaattaggacatgcttccttcctgtgggagatacgaaagagaggagattgaaagatacctgtgcagaaccaagatcaaagatgtttccagcaaatatccctctcaccaaattctctaaccgttttccgtcatcttcaatagcatcactcagattgacaacttcaggaaatagtgatatagcctttgcattctcctcatcctattcattgaatgtgaactcatctaatcagagagaataagtgctagctatttggaaacctcaagaaaccttgaaaggaaattcacaccttaactttcttgaatatgtccctaaatcccaactctctgagtacttgctcacgaagtcggcataaaagctgaaaataagccaaaataatccatgaaaacaaagcttactacgccagagaaaattatatcatatggtgttttgacttacaatgccatctggtggcccgccatggctctctggatctttcttcaagtcttcaagaatcccagcatatcttccagattcaaggtaatacatatcaaactcaaatccaaaagactgaatcacgatcttgtgtatcatataattcaagggccgttctagtttatgaaggtgacattgacaaaagatttcctaccaaccaaaaccttgagaattactaccaaccatgcaaaaattttacctttctgcaaatttttcagctctagcaggagcatctggaacagtggtatcgctctctgcacgtttcctgcaaatcaaacagctttagaacattgagatttaatggcattttctggttaaatcaggattgcaactgtttcctacaagcttccagaaacaactatggcttcctagtgataactaagtcaaaaccaagtaaacccaggaaagtcaacacaaacaagacaccaacgacattagtcgaatttagctgaaagagtagttttttggtaacaaaatcaaagcttggtctgacccatgaacatgaacagaatctgaatctggtcaaagtaaatagaaactagtaaaggtcggaagagagaagcagtgggaagagaatgaacttgaaagaaggaatggaattggcgaagacgttgatccacgagatttcatttggagtggctttcttgggatcatcagaaggaaatctgtaaggaattgtgcaagctctgtagttgttttctattggcatcggtagttgaggaaacggaaccatctctgaatcgctctccattttctttgcttgtgatgatcttcagaaatgatacaatgattgatgacgatgaagaacaagtgtatctagagccgggtcgggtacgggtcaaagatccatattagtgattccactaccacacgaataaatgttgcattttttgctttgggtttggtttggatttagttaaatagtagccaagttcctatctttgtggtgtttgtttctgcaaagttaagttttttgttctatactaatcagtcatctttggtcttcaaatgatttgataccttatctgtggtcggctatattagctcgagcagcaatctgaattgtagaaaccattgaaactctggcaaaacttgctgtttgctgcccgtataaccgtatttgtcgaacataatatcaatgccctcttggattaaggagtaaactgttttggtaaggaagctggagattatagaaaacattcatatgccataaagaagttcaattttgcaggagtttacaattgtaatcagctacttatcataagtggtaaaaccacacctaggcaccttgacaagcaaagaagctctcccaattagagtgatccaataccaacctagccacaacacctactgcttgaataaagccactgaggtacaagtttgttttagatttaactcaaagagagaatgttaaaagtagagaaaaacatatggatatttccttttcatagatgcataccgatgtcggacacaattctgagtcaagcaaatttaacaagaccaggaaaaaaacttatcctttggattaagatatacaaacctagata

SEQ ID NO: 5748 - DNA, 580 bp, Arabidopsis thaliana landsberg
  unsure (1)..(580): unsure at all n locations
gaacaacgctggtttcttcagttgtctctctttggtgctcccacaggaaaagcttgtcctaattactctctcttttcttttcgcattttgaagcttgctgaggttttctcaagggatggcatatctttcttggctacctctcaaaacttggttccacgaccatgggtcatcgatgacttgaacaagttccaagccaaatgggtcaagaagccttggaagaaggtcacttgtttgttttgtgctttatctaatgcgatgttcagacttcagaggttaaccgcttgacaaaattaattgtttatgacaggcagtgatttttgttgataattctggtgcagacataattttgggtattttgcctttcgcaagagagttgctccgtcgaggaattcaggtaccggtacccttnnntgaaaatgacccgnnagtctttttttaccagtncncccctgnaggttggnaattggccccaaggnaaaagactatctaattgtctttctttatatccccctgaggtgggctagctgctaacgactgcactatcaacatgtaacatatactgagctacagatatcggtcc

SEQ ID NO: 5749 - DNA, 645 bp, Arabidopsis thaliana landsberg
tatttccaatttttatttcctcacttcttatttcctgacataaaaaaaaaaagttttcatttgtgtaaaccaatttttccaaatctcagtatcgagtttgaattgaaatatagctaggagggtcagagttagttttctgtttacttacgtgcgaactcgcaatggcttgacatatgaaataaagtgagtcaaaaacttctaatggatccactttaaactgaatttgtgcagacaacttatatataaatgtcaaacttggtttacatgtttgaatcacaaagcaaataaatgcgtcttcgttcttattgtacatcatataacctgaaaagcaagtattgtaaatatcgatctatggagcaaaatgtaagagtgtggacactcaaatccaacacagaggttaactaacattgacaatgccatggaccatggcttcatgtatggtgcaactaagtctggtcgaatcaatgctagtctcccgagggtaattgcactgttctcaactagtgcgttattgacaccctgcttcacaagaaaataaaattagatatactcgtccgatacaaaagtcgataaacttagacatggcctagaaaatcttaagtttataagcagctagctagagtgacctctccattttgaagaata

SEQ ID NO: 5750 - DNA, 1267 bp, Arabidopsis thaliana landsberg
gacagacaggaagtgagacaactgtactcgactgcaaaaactaaaaaacaggcaatgtgaacgattaagcgataacgataaaacagagaaataagatagacgataaaaaagagaaattaaagcttgcccagactaattccattaacagaatctaactatgcaggtaataagaaccgactgataaagtcaataaacgctctaaacggccaatcccttgggattgagacgcatatctcaggaactagtggatcaagcattcatcaaacaccttctgggttcggaaatgctttggatcgaattcgagttgatcaaaaagaaataagcagtaaacacaactagtcctgatgggattcaatcaattctaaaacttaaccattctacaaactaaggattcctcaatcgttctatcccatccttaagaactctatgtcactactcagacaacatgctcaaagagataatgcagataaacgataatattgcataagtaaatatatgaagattagagaaacaagatgacagatgaaatcaaatgcggaatgtaacttggaaaaatctcgaattacaggtttgcagaagcaaaagcagcgcagatagagtaaaacagaaaataaaactgaagcaaaaactcaatgttgacttgatgtccctggacaaaaccctcaaacaccaatttatacaaaacacaataaaatgatagtagataggcggggaacctaatcgaccggcccattgagtgataatgggccaagatgggcttcgtgatcggatgaagctccgggccgctaccaaacacttcttcttctcctcttctcttccttgtgctcaacttgtctggttgagtgcgaatttgagtagactttgaagatgtggtcgagtgcttgatcgagtgatggtgatgatggtgatgatggtgagtgatgatactcgaccagggggtcgagtaatgttgtagagtgaatggtcgagtggtggtcaggtgttgtggcgtagtgatactcgaccagggggtcgagtaatgtcattgagtggcataagctatggttactcgaccagggggtagagtgattggtaagaatggctacaatgttactcgaccagggggcgagtgtgctgctggtgttcctcgcccttgtggtttcgtgtgtcttctggggccggctcgctgtcccccctttgtgctcgccctcggtctcctcttctaaaagtggcccctcttgggcgttttatgtctgctcgcggtttctgttgttggggtctttccccc

SEQ ID NO: 5751 - DNA, 6273 bp, Arabidopsis thaliana landsberg
tccaacctcaacccaaatccaatttcccaaagatcacaaacccgcaactcttctgcacctgctggtaagggagctgtcacacactcttaacagcgccatagacattaaccacttatccttccagaactttgttttcttgccatcaccaatcacccaacttaaagcgggtatcacaacttctctcatacccacacagatactcctccatgtagatgaccaatgacctttcaccacagcccatctaggatcgtcaacctctgtaactttatacttactccgaagaagctgggcccaaagacttgatttatccttcaaaagcctccagcctaatttagccagaagggctttattcatctcccttgctgaccggatccccaaacctccttcactctttggacgacagattctattccacgaaagcaaatgctgtctctttttttctacagtactcccccatagaaacgaccttgatattttgtccagctcatctagcaaactcttaggtaaagatatggtgctcatagagtgaacaggaatcgacaagattacagcttttgtgagtgttagtctgcccgccatactcaaaatccgtaccttccatcccaagagtcgtgaagaaactctttcaattacttccccaaaggtatctttattaatccgattctgtagcaccggcatgcctaggtacttccccaaatcttttgttgacttaataccactctcaacacttataagcttctctagatcccggtgaacattcttagagaaatagattttagatttttcaaggctcaccctctgccccgacgccttacaaaagttctccaacacccctcgaattacccggatctgagccactgatgcttctgcaaagagtatcaagtcatcagcaaaacaaatatgtgataatttaggtcccccacacgacaggctaatcggtttccactttttagctcccacagctctatcaatttggtgacatagtctctcgaggcacatcacaaacaggtaaggtgatagcggatccccctgtctcaagcctctcagcggtttaaacgattatgtaagctctccattccacaagagattcatcgaagagcttgtaacacactgcataatccatgtaacccattgtgctggtaaacgtgccgctacaagggtatcctccaaaaagtcccatcggatgcgatcatatgccttctctaaatccaattttaacagcatccaacccttcttcccttgtttccgtttcatcgaatgaacagcctcttgtacaaccacgatgttatctgtacttaacctccctggaatgaaactagattgtgctggtccaatcaatttaggcataacatttttcaaccttatcaccatgatttttgtaagcgtcttaaacaacacgttacataagctgatgggacgaaactgcgacattctctccggtttattgaccttagcaatcagaaccagaagtgcatcatttaaaccggcgggtagctgaccagaagcaaagcaattcaacacaaactgggtcaccgaggcgcctaccacatcccaacactcttgatagaagactggttggaagccatctggtcctggggccttgaacttacccatgctgcgtattgagttctccacctccatcgatgaaaatggtttattcaggtctgctagttccccggcagttaacacagcgaatcctactgggtctagcgtgtccacacagctctccacatccttcatagaatacaatgttttataatactccacagccattgtttccaactcctgcgaatcagttacccagatctcatcaccattctttagcatctcaattctattccttcttctgcggataatcgttgaagtgtgaaagtacgttgtattcctatcacccaactctatccatttctcacgcgacttctgaaaccagataatctcctcctgttccagtacctcatcaaactctttaatcaaagcagcctccttagataacagctcatccgtctgcgttctgtctagcaagtcctgaattgctttaatgtcattcactagcttctccttacgcacttgaaggacaccaaaaacttccttgttccattttttcagtttgagtctcaacccatacaacgcttcaggagtcgacctgttctgattccacgagttctacaacagctcacgaaacccagagtgtttaagcaacgctgcttcaaacctgaatggtctcctacttgggtccctcttcgcctcaggactaagttgaacaaacaaaggaacatgatccgatgagagaaatggcagatgggagaccgttgcctcttgccacttcaaacgcacgtgtgcacaacagaagatacggtccagtcttttcgcaatgaaattactctccacacagccacgcttccaagtaaatttattgcctttgaaccccatatcaatcagtgaattctcattaatccaatccccaaaagcaagagaatccacagacaatctcccattcccaccagttctctcgtcaagacgaataatggtgttaaaatcccctccgattatcagtggctcctcactatctacaactttcttaattactgatgacagctgactccaaagaccacttctcctgctagccgatggaactgcatacacagcaattatattaattcgctctagcccattcacaaattttgcgtggatgaactgatccgacgactccactatcgtcacatctccgacgcccgacctccacagcatccaaagccctccactctgacccaccgcatcaacctgaaatgaattatcaaaacccagaccacgacaaattctttcggcccaatctccacccgcgtgggtctcaaaaattgcaagtacagccgtatgaaatttcatcaaaatgtatctaattgatcttctaaagttgggtttattcgccccccggcaattccagaataaacaatccattgatattgttgttaaggtaacgcacaccaaaactacaggggccttctgttattcgactaagctcaccacctctccttccggtgaactatgccgcataaccatatccctctgctctggagcctccgccgacgatgactccggcctgatctgaacaccgccatccacccgactcggtacaagtgtctcggcggctccatttttctttcccgcattcgaaataaacccagcaggtcgcccaacgctttcgctctccatcctcatcctcttacccgactctaacagcaccatatcttctatcctctggccaaaaactaaacctctaacgggcctaaattgtttatttttcattttaggcccatgaactttcggcccattcttgtcgtgggccttcgaaaccccaattgatttctcctgaccgaatcccttaaagcccacacgatctttactagcaatccctccattattcctttccaccctttgcgccacactcttccccttaattgtgtgattaggttgactcgtattttccttattttcctccatcagatctgttgattccactgaatcaggcaaaatatcctccattcccaaacttccaaatttgttagtgacagggatattttcacaatccttgttgattagaatctcccgaagattcctttcctgaacttcaccaaccctaggtccatgatatccaccgtgatttcccgccggcgttggtctccggccagctctccgcacctgtgtaaacccgtcctctgactgcacccgcccactctgctccccaggcacacttgacagtgttacactaactgccttttcgtgggctaactgaggacaattatgtacccaatgcccatacaacccacacttcgaacagatcatttgtaacccctcataagatacaaagtaccggttcctattcaccaacaatgtgccttttaaaggcttcttcaagttcacttcaacgcacacgcgagcaaacctcccccgttcacactgtgtcgtcgtcaagtctaccttcaacggacgccccaaactctctgttatcgccattaagagcgacttgtgatagaacgtcaccggtaagttcgccaagcaaatccagactggtgtagttgaaatttcatctttaagggggtcgaactccggtgaccaggtctgcgtcaagagacaactcccaaaaaccctccaaggtcccccagttaaagccgccaagaactcctcttcccgttcaaagcgaactaagaagaagtgacggggaagatccataacacacatcgcccccattggtttccacatctctcgcaacttcttattcatcaccgcaactgaaacattcctccctagcaactttatgatcatacacctcttccacaaaccattcatgacctccaacacttcagcacctattgttatgacgggctctccatcctccccatcaggaaactctgtatgcaccctctcccttacaaaagcatcgtccaaaatttcctccgggtttggaaatcctcccaagctacttcctgctacccgactagcccaagtcccctgacgatcaggaggctcccctggtggccgccccttcactccgacgtctaccatagtcgcatccttgtcgcccgtattcacaaccctaaaatcgccttttactgcctccattgaaaacacatataatggtgtgtttaatctttttatgcccattggagttttggatagaaaacaaaaagagagtaattaccatgcatgcttaagttgtagtggcaaaaaatgactaaaatgaattttttttatagtttgatttagatagcacaattactagtctatagtagttactaattaataattatacacttccatcattttttttgttcttaaaacagtaccatcatagtatattggcaatacgtccataactagttgataatttatcaatgtgtttttcttttcttacttttttgaatcaaatgaaaaagcaacaatttttcttaacaaacaaaaaaaaaaaataaagcaacaattttttaaaatttaattttccttttttttgactaaaacatgtgagttttctttcatggctcccgccgtaaatcctggtgagattttaggcttttttcatttgactacgatcgcttcgcttctccgatcaatcaccgtccaaactccgacgaaacaaaaacccaaaaccaaaatgtcgttaattccaaaacccgtatcaaaagtctccacctttaccttctttctcctcttactcctcagtttcacaatcatcatcgcttactcatcatccgattccaatgtcgaatcaaacgaacccggatccgattccgatctagaacagcttctagcagtagacgagcaactacaagaagatcgacctgagcaacaatcagaagccgaaacagtaagcaaagctcagagaatcgtactagagctcaacggcgataacacgaagcgagtgatcgatggaaacgagttcgtgatggttttagggtacgcaccttggtgtgcgagaagtgctgagcttatgccgagattcgcggaagctgcgacggctttgaaagagattgggagttcggttttgatggctaagattgacggtgataggtattcgaagattgcatcggagcttgagattaaaggtttccctacgcttcttctctttgttaatggcacttctcttacttacaatggtggatcttctgcgtaagttccctaatttggcttctctagtgataaagttttgattttgattgaatcgtttgtgagatatgttttggtcaatgtctcagggaggatatagtcatttgggtgcaaaagaagactggtgcaccgattattactgttgttacagttgatgaagctcagagatttctgaacaactatcatacttttgttcttggcttgtttgagaagtttgaggtattttcggatatcattagtgtaatgttggttttgaatgtaaagtgttgatatgtgtgtgttgtttgtttgcttagggttctgaacataacgaattcgttgaagctgctaaatcagacgacgaaatccagtttgtagaaacaagtaacagcgatgttgcgaaacttctttttcctagtcttagaaccaataatgtgtttattgggttggttaaaactgaggcagaaaggtacactgtatatgggaagcttgctggctgctgattttgaagaactctcttgatattatcatatcttttttcctgttgcctgtattgcgagaaggggtaataccggtctgcaatgcaaaatggatcttacaaaatggagaagatattggagtttcttaggagcaaca

SEQ ID NO: 5752 - DNA, 1752 bp, Arabidopsis thaliana landsberg
acgaatattagttgtctttcaccacttgtgtgtgtgttgtgttttttttttgataaaagatttaacaccacttgtttttattcttcatatggattatggaccactaaagaaagctatatttaagtaacccttgtaaatagtagtagtatgtactcgaaccagtaaacaaagtcaatattatagaccactaaatttctaaactgtgaatttttttctttcttttgtgttttttggtattttctcaaacttttttgccaaggcactcagtagtcgttttaataaataaaaaattgggggtcagaatttttgtttaatgatttttttcaaagaaacatgttttagaacaaacgtcattcacccgttttctactacttcaactcaggaaccttctcattgcagactaactttaaattaattttgaccaactttttcttgctcatgctgaattaagacctaatcacctaagttgtagttcttacgtaagtttacgtgtttgtttagtttaagagaaaaacacgatctaagaattccaattctcatataaaagtatcataaaattttgcagcagaaatcttattatatataaccaactttttgtatatccttttttcagttttgatcttcaactcagttatgtagaaacttaaatttgaactgatctttatgctttttcgataactatatagtactccaactttatttattggaatattgacttttccataggactatgtacgttcgaattcggttaggtaacacacttacactgaattggacatcctatgtgatgctgccgcttatccaaccaaactcacatgcatgttgttgtgatttttaatgttcattaaatgcacaaaactcaaatcaaatcgaaaacataaaacattcttttgatcaaacaaagtttatatacttctttaccttcatctaatattcattcctcacatccacttatgtaacatagtaaatgcatgctccacatatgtataaacaaatatacatacagacacgcacacatggaaaatgcatacacatataaaagaatatgaacgtatcgtaaggttcgaagtaggccgcgcaattactgaccacacatatttgtatatatataaacatgcatgatgggagacagagaatagtagcatttatttacatatataagttggaggtgggtcatagctcattatttagttgaacgcgttatagaccacttgtatacaacatttctataggtaacgacatttctcacatactagttttttttttaagtttaattatatataaagttagttgaattagtaaatacaaaacataattgtgtgttaatttcttgctttaatttttccagctgcgaccggagctggatttattgcaagggacatcacattcgaaaactgggccggtccagcgaagcaccaagccgtggctctccgcatcggagctgaccacgcagtgatctaccgatgcaatataatcggttaccaagacacactctacgtccattcaaaccgccaattctttcgtgaatgcgatatctacggtacagtcgattttatctttggtaacgcagccgtcgtactacaaaactgtagcatctacgcacggaagccaatggattttcagaaaaatacaatcacggctcaaaacagaaaagatccgaaccaaaacaccggaatatcaatacatgcgtctagggttcttgcagcatccgatctccaagcgacaaacggtagtacacagacgtatctaggc

SEQ ID NO: 5753 - DNA, 3538 bp, Arabidopsis thaliana landsberg
  unsure (1)..(3538): unsure at all n locations
gaacgcagcctcgtacaaagatttctgagaattacttgttttgtttcacgcctttgtacccataagcatgatatgagtatctgataatgaatacaggcaaagaacaaacctgagccattggctttcccctgtctatatcccgttgttttccttctcctgtaactctctccttatactgcgcaatttgctcttctccccactctgctatttgagcaatttcctgggaacccgtttcaaatgttcaacacttttttcccttctcttttcgattaccaaaattgcttgtcgatagtcaaggaattgtacctcatatctgcatcctaaggtccaccacgaagatttcaaagcacccctagctgcgtctttcgcttctaagttacgcccaagtctacaaaatatatagaggtcttagagttttctagaaaggacgtaagcatttacctgggggtcgttcacaagggagaaagagggatgatgagaaaggatcatacgaacttcagtaaaacttttgcgttgaaagcgaatggccgggcaaatccgggaaagttccctctctttgtataaaactcggtagccaccaaagctgaaaccttgtattagcacgtgaagatagtttaaaaagagaaaacacgtcaactacaacaggatagatattattactagccttacatggtctccattctcgatatgccgaataacttttcgttcaagagaatctggaaacaatccaacctgaattacaaagctaataatcatatcccagtatccatgtgcagaaaagattctgatattaacaggctcaatatatgtacctttcttaaaagataggcatctaaatccatcagtcttgaactggcaaagtcacccttactgtaaagtttcttcccagcttcaccagcagcattgaagatttcttggctgcattcttcgggtttggaaacatcttcttccaccaatattctgtgaatgaactgatcaacctgaatgttggccaatgaagtcagatatgagaatgaacactcaacaaaaataaccctaaattaacgcatcagtaatgctataaaaagactcattacattattagctagaaaccaaaccccatgtttctgaacttccaccacaggcatctccatactgcaaacaccacaaacaatgataagctacaaaagaagagaaacatgacaatataacaagagcaaggaggctctaacctagaaggagctgttggccaccgtaatagagcaattgaagaacctgaaaaatgaaagtcatacaaactcaatatgagagtgttacaagttacaacctcagataagaacttctgttcaagtccagaatcatacccgggctcattttcaccaatggaatagtaagcggtaacaagccttccttggcaccaggagaaactatggatttacctgatccattgtcattaccacaagcaaaagtcaccatttccgcaggttaacaaacaataacttcgaaaatacgatcagccaagtcagtgtaagatttgaacttacctctagctgtgaatatattcagcagctgcatcagatgcttaggaggctgagcttttgctatatccttaatgaaacattcatgttctgcacataatcaatcgttaacttcgattcactaattgttcaaattcggcaccgtaagaatcataaaccaatctcaagccatcgcacagcttccagaagttcaaatgaaatagcgaaaatgtgaatccctctcaccagatagtgaagaagaagagcaaaaggatctgacgaagtttctgctgccatggagaagtatcagtctgcgtttccgtccgaaaaccgccgcgccgcgatgcatcttagagttttccgatcggccgtactgtttctcttccgatgagatacagagaaacgaaaagctgttactgagaaaaaaaacaaaaataaagcccaaagaattagggtttaagagcccattaaatcagagcccagcaacgttcgtatttgttttgttcagttgaaatagaaccagtctcgaaatctagtagattcattgtctcgagctacgtgatattccggtaaaccgtcgccggagatgtacagtagatatttcaaatcgagctgccacgtcgctattttcccaccaacttttttttttttaaataattggaaaaagtttctaatttacacgcttcccaattcgtaaacaatgttctttaaaagtaaaacgaaattttttttggatttgaagataaaagatccaaaataaaaacaaaattgaagataaatttttagggtttataacgacccgccaaattccttctctcctccaacatttcagatttcgcgacccggatcttaacccggacccgcatttgtttcggttccgatctggtttcttgacaatggcgtcagaagcttcgccttcttcttcggccaccagatcggagccacccaaagactctccggtgcgtcaatcgtttttttttttttttcttactttctaaaaatggaacttttttctttgtgctattgaggcattgactttgatttgctttagtttgagtgaagagaacgaaactcgatggcttgtttgagcttctctatatgctcgtttttagatctagagattgctgcattgtgagatatgaagttgtttttgggttcgtttaggaaccatttttgctgcaattgatagtttctctcattgaacactgtgtaaaggaacctcattttgatgtttcaggcggaggagagaggtccagcttctaaggaagtatcagaagtaatagaatcgctaaagaagaagcttgcagctgataggtgtatatcaataaaggttgctatttttgtttagtttttttttgtatgttttatgtgtttctgaatctgattgttagaaattgatgtgtttgtaaccagaaaaggattgatgaaaacaagaagaatttgtttgctattactcaaagttttatgaggtcttctatggaaagaggaggtagctgtaaagatggcagtgatcttttagttaagaggcaaagagattcgccaggtatgaaaagcggaatcgatgaaagtaataacaacagatatgtagaagatggacctgccagttcaggaatggttcaaggatctagtgtccctgtcaaaatttccttacgtcctatcaaaatgcctgatatcaaacgtttgtcaccttataccacatgggtttttctggacaggtatgttgacattaatgtcgcaagagtacttgaaaatattcaagttgaaatgtaaacccctcgcatagtatcttaacgatataatcactcttgaaatgatgcagaaatcaaagaatgactgaagaccagtctgtggtgggtcgaaggagaatttattatgatcaaactggcggggaagcgcttatctgcagcgatagtgaataggaagccattgacgactaagacgaaaaaagagattttttggagcctgaagattatattattcggttagtattaaatggcangagtttaatccttcttgcatgttggtctcttagtgtgaatctc

SEQ ID NO: 5754 - DNA, 2529 bp, Arabidopsis thaliana landsberg
aggaacggctaaacacaagtcaacattacaaaacaaaacagagtctcttctttacttgttcttgggaatgttaactccgacgattggggcgggagtaatacgaagaagattcccaggcttaccaggcaaagcacctttgatcatgacaacattaagctccttatcaactttaacaatcttaagcttcctaatctttgtcctcgtccctcccattcttccaggcatcttcttccctttataaactcttcccggagtagtaccagcaccaatcgaacccaaagctcgatgactcttggaaccatgagtcatctgacctctcttgaaatgatgccttttgattcctccttgaaaccctttaccaattgtggttccagctacatcaacgagatcaccttctttgaatatctcatcgaacacaagcttctggttcggttcgaatccttcgatgtttgttaatctgaactcttggagatgtctcattgggattgtaccggctttttggagatgaccggtttccggtttagttagctttttgtcgcgtacacgacggtaaccgatttgaaccgcgtcgtaaccgtctgtggctagggttttgatttgggttacgatgttaccttcgcggaatccgacgactgttactggaactactgtgccgtcttcttcgaagaaactcatcatcccgagttttgaccccattactccgattccagcttccatggatgatgaaaccacgaatctggtttttggtgatgatttgatgagaagtgaagaggatttcgccgggaggaaagtgggagtgaagagtgaagaggataaggttgttttgttgagcagagatgggaaagaaacaaccgccatagctatcgccattgtcggagattcacagaggagaagaaactctgagagaggataaagctctgtgccacactcttatcttcttctccagttatgaaatttattattataccgctgaagatactcatatttacaaaacacggtggtttaccttttgcaacatcggtcctttaaatctgattttattcattttgtattttttcttcttattgtattcaatttaacctctttcaagattggtgtttatattagttagcacaagtgagaaaagaaaatagtacttgaattcttaaagatgattatcatatataaataatatcacaaggatataatgttccaatttattgaattaaaaacactgagaaaataagactgggaatgttttaaacgatccgacacgagaataattttagtttcatattaagacaatcatcacttgaggttccttctagtaaacgataactgatggagtttagagacgagatataagaagaggtacagaggcaggtccttcctcgcccatcacaggctggaacagatccaactcaccataccgctccagaactcgcatcctacaatcttcagctgccatcaatccagttgaataagcgccgtgaaccgagcccgggaagctcgagctcgtcgcttcaccggcaaagaataagttatccactggaaccctaagcctctcgtagagatcatgaggtttgcccacgatatcatagctataagatcccattgaattcacatcagatccccacctcgacacgagatactgtaccggaggcaatgcatcgggaagaattctctggagttgcaagacggcgaaatttgcagctgcttcatcagacattttctcaatgtctttggcaagctgaccagccggcatgtaaaccagaaccggatgacccgtggccttgtgcaggttcaaaaaataactgcaaccgtaggaggtttcagctaccactcctagaaactctactttcggccaaaagactttctcaaaatgtagtatgatcttgttctcaatacctactcctaggtcgttgattgcttcttgtttccactcaggtagcttaggttcgaactttatggttcccgattttaaaactccaagagggacagcaatgactgcagcatccgcaacaaaagtttgcccgttttctgtcgttaccttcactccattgtaccgcctgacaatcttagtaaccctgagagaaggagaaacacgaggttatgactgtgaaacactaaacgaatgccataactcttgaaaaacgcaaaagcttacctgtggcctactcggatatcaagacctttcgccagagtattgatgacaggacgataccctctaaccataagaccgtgtccaccaggcaacaattcctcctgcacatttctcggagtgttaaaccaaaaattcaagaagcagtctatacaaaaaaaactcttaactacgagagaaagaatgtaactaacctggtcccaacactttgcagagatggtttcagcatctgcggcaaaccatccttccatgcggcatacataccattgaagtacgttgtgtgcaagcccctctaacctggatgtgaaaattcaaaattcaaccatgaaaccaagcttgcaaaagtgcattgcctaaagaaattgagaaaatgagacattatgtataca

SEQ ID NO: 5755 - DNA, 1088 bp, Arabidopsis thaliana landsberg
cgttttttgatcccagggtttggcaagggtgttttgtaaaaaaagaatccccttttggcctcccagttaattggtgtaagatttagggattaccctcttttatcagtcctagccggtggacaaatgcggttattgaatgtccacgattctaaaaggggtgtacaaccgttgtggatattctaaatgtggaaattaagtaatcttctctctttgttggaaactcatggcgcaattatgttttctgcagttatgctctgttcgacaaggctggtaaccaagtttctcaagagttggtgacaaaagttggcgaaaattttgagcacattctggaagaggtgtgtacttggtgtccactttctcttttattatgttttatggatgttgcgcctctttgatttactaaacagttgtttcacaaatgcagatctgtaaagtcagggatgagcaggacgaagacatgtcaatagctcaagccttttctattgtatttaagaggaaccctgaattgaggtatggaaacatattgtctcaactcattccgttgatttgttacttatccgcttttatatttgttgcatgcttaattagattttcacttataggttggagggacttgcccataatgtgcttcagtggtacttgtgccgcatggaaggatggtttgctgctgatgctgaaaccatctcggcaaagtgttgggatcaggttagtaacttaacttctatgtctgtcctcggtttagtggttgaggtatgtccccgtttattgatttgttaattgaaacattcacaggaagaactgttgcccggtggacatggtcttatggttagagggtatcgccctgtaatcaacactctctcgaaaggtcttgatatacgactaagccacaggtacgattcatttgtcgaaggagtttccaccatttaacgagtctgcagctaaaaccttattggacttttgttttgtcagagttaccaagatttcaaggcgctacagtggtgtgaaggtgactacagagaaaggagacacgtttgttgcggatgctgcagccattgctcttcctctaggagtcttaaagtcaggaatga

SEQ ID NO: 5756 - DNA, 1218 bp, Arabidopsis thaliana landsberg
ttagttttctaattaacgattttttttccttcaaattttttgttggcactacaataatgaatgacttgccacataaattcggaaccaatttactgaaatgggaataaaatagagattcaactttcttaatccgtaagcttaattttctcttctctcttttacctccttgctggatccgcaacaacaacaatggcgaaatcaagcgccgacgatgaagagcttcggcgagcttgcgaggccgcgatcgaaggaaccaagcaatcgatcgttatgtcgatacgtgtggccaagagtcgcggtgtttggggcaagtctggaaaattgggtcgacaaatggctaaacccagagttctcgctctttccggtgatagaaccttaccttcttcttcttctctcttttgattcttcagatttgatagcatttctggattcatttcacctttgattacttcgaccttcttcgcgttgtttggctggttctaagtatttagattcagtgattatggcatttagagaatctgtttaatacgatatcgatgaaattctactgttcttggccattccatgactcgtgagagctcaattaggttttccagagcaccaaaaaggattttggtagtgtctattagccattaggtgaatcagtctagtgtactcgaggataatctgtgttgtgttgtattatgattcaagtggatgatatgttgcctctgatccatgattccagctctttccggtgatagaaccttaccttcttcttcttctctcttttgattcttcagatttgatagcatttctgaattcatttcaccttcaattactccttcttcgcgttttttagctggttctaagcatttagattcggtgattatggatttaatcagttgaatacgaaatcgatggaattctactgttcttggccattctatgactcgtgagagctcaattaggttttcctgagcaacaaaaaggatcttggtagtgtctattaggtgaatcaagctagtgtactcgaggagaatctgtgttgttatgattcaagtggaagatatgttgcctctgatccatgtttcaagctttctcgtccaattatttttaggttctttagagttgtaatcaactaagtatgctttttgttattctgctttctccagtcaaatcaaagggtccacgaaagaaagcatttcttcgagtcatgaagtattcaagtggaggagt

SEQ ID NO: 5757 - DNA, 1212 bp, Arabidopsis thaliana landsberg
  unsure (1)..(1212): unsure at all n locations
accaatgccaatcacataactgtatatgacaattatattagttgagtgaataatctgacaaaataagtggaatagatatctgcttccattatctttttatccccagcaagctagttctcaaagaaacaatgccaatagtttaaactaaattcaatcaagaggaaatatgcaaggtactgattctacaattactaatcatgctggacatataagcaattctaagttagtcagaaacctagtctcccaagcttaagatttaggcggactcttctctcttcattccatataacaaatacacaagtagataaaaaaaactcctcctttgtaagatatatactgattttacacttaaaaaaaaggaacaaaatggattaaacaaatgatgaaaggaacagaaaaagacatacgttcccaagagagcctccatatcctcttcctcggcctgagagactagttctttctcaacagtaactttcaaggcgctttctgttacagattcagcaacaggctccccatcttctgtacttctttgagtagtgactactggagtgttatcctagaccaatattatgaaacaaagaaacacaaattagataactttcttatatgaaaaagcactcagatatctgaaaggagggaaaaatgacaataacaattacatgcaaaagcttctttcgaatataagagacttagaccaaaatttaaagttagaataagttatagtctaaacctttgcccaaagggccatctcgacaatatctataccaacaacttttggaaggcggcctaatacgtctttgcatatgttcaatatgcaaactaaaagtcggttcctacaatcacgacagagaaaggtatgtattaaatgaggaaaactacgtcaacaaaaataccatcgcttatcatgtatacttcacatcttgtaatagttaatattgatgttgctaactgcagtacctgtcatcagtgttgcgcatggtccactgtggaggagcaacactttgactcctgagattatcaaacccctaaaagactttgcatcagcaaaagcagtgggaacatggaaaatattgaacagtgttttacaaattatttaagtaaaacccctaaaagactttgcatcagcttttgtgttccatctcttacaccacatgctacgaattanttaagtaattatgcatttcttcttggaatcttagatactaaccactt

SEQ ID NO: 5758 - DNA, 3923 bp, Arabidopsis thaliana landsberg
caagattgtcatcgaaggagaaaccctttggaactcctttactctcgacaggttcatagaggtcaaccacaagcttaggatgagcccccgtagacatctcctccagctgccactgccccctcctttacctaaaattacttctgctcgggccatcgcagctcgacgcaagacactgtccaagtcgattgtggaggcttgcgaagtgaacaaatcattcctccaattcacagtcgacaagaaggaatatagaagaaccttgctagtcgacgatggcagtgcgaaggggcaagatctgacggtgcttacagacccactcctcaccgtgaaggtcatagcggtcgatcatcccacagggagcgatcacctcgtcgtgactcacctcggcccacctcccgaactggactaagcagcgagccacttgctgacctgattcggaagaagagagacagatcaacccgcatcagctcctcccccaaaagagacaagacgagagcctgaactgaccgctctactcggcggtcgccgccaccccgatctattggtcctcctcctccagtcaccgtatctccttcatccggatcaggaggtgaaaaggccgaacggagtgctaaccctcggtgggatgaaattgaggtccgagatgctggaactaaagctgttttggttcctcagaccaagtcgctcacgggttagaaatttctttctactttatatcattacattttttaccatttcgacttattgacttagcgttccttgactggtcaaaccttctctaacagcgatggaaacgtagggaaacatctttcgatgtttcaaaacacgaaaagacaccatccagccaggcttcgatagatggcgtcctgcaattcgcgagcgattcctactccatgctcaccactcatctcgggttagttccctttacccacaatagatattttaatctttgctccttcacttagacgttaaacccttctcgttattacctggttcaagcgaacagcgaactcaacgacatgattgagtactatgaaaggttgctgctagacagggaaaaggaggttatgacgtggaaagataagtcttcgtcccttggggcaatcgtttttatccaaaccaaaaatgttagaactgagctggaatcaaatacaaaggggtggccaactatcgggatgctgagttagcgaggtcgacatcaaaagccaggaaggaggtaaaaggtcgcgggatggaattgatccaaggggcaatcgtctttatccaaaccgaaaaggttagaactgaactggaatcaaacatcgaggagtacgagagcaatctcctccttttagatcaaacccatgataaagactcttccgagaagcaagaaaggtccgagttggaagccgatttagcagagaagcgaagtcttttggtcgctcttccttcttcatcattcaaccctcaacagttcgaggaattctttaccgactcacctcctttgagcgagtctggtttagattgggccggtaagttttaaaagcctcaaaattttgaaataaaatcgcaataagttactcttgcgtctttcttgatttgagataattgtttcaggtcccagtgaccccgtggaacccgaggtgtccgttatcccggttgaaactcctgaaatggcagccatcccgccagtaattcccccacccacgaactctgaaacagtggtcatcgaggacgacgatggttcagaatttgggatgcctaccgaacagctcactgccaacgaaccggatgaaactgaaacggctgccgcggacccggtcgatcctgagccaactcaacctgaactcgaggtggctgaagatccgtagtggctgtgtccacttaatggggattgtccctttttgttagcaaactcgaagtttatttctgaactattttaatcggctaagtaggctttaatttcttaacaagtattttgcctgaggagacttttaaactttttttaagacaatgatcccaagagggtttttactagatttaagtatggatttgcaaagtccatctttgtttaaccatttggtcaagttacgagatttataggttgatcaggcctatctctgaaaacgtgagtttgaactcgttttaaatccgcgaactccccaactcgggtttggtcagttcgatttactgggcttgagccttaattgtttttcttttatttaatgaaccgtttgtcttaaatgcgatggttgccattttcttccttggaaaataggaaaagcttcaagcctctaaggcaataattgccttttcctcgattcccaaaaacagtttaacccattcagacacgccacaattattaatttagtggtttcgagtaaaaaccctaaccctctataaataagagcataaactgtcattagtgcctcaaaatatgatctcagaaatttatttggtaaacacttcaagaatggaaaacgaaggagcctccaccgtatgccatctcgaccccagaagtccattgtttctgtccggcgatgactttgagcccgccggcgttctctttcctcatgcttgctttcactttccttcgaatgacaagaaagaggcgtacgattttatagacaaggtaagtcttttaccctctttcttatcggaaagactcccactcaaactaaagaactttgttctaggtcatcgacaagcatcgccgcctatgcgatgaaaggtagcgtttaggcctcaagaggcaaacgcttgaggcccgaattgctcgcatcgagaggaagataagggacatggagagcgacccttttcagtgggagtggaggaactttgactgcgtggcgaagatcccgcacatgctctcgatgtacctccgtgctcgaggccaagtccccggtcctgtaaacgctccggttcaagtgatcccgtctgacagtgaagaccgtgaagattaggaggaggatagtaacccctggaagcgcgtgaagtgaacccgacgtggacgacaaaaacgaagcgtccacttcgaaccccgaaccggcgatgaaggagcctgttcctgagccccttcactaaatgttccccgagactaaaaaccctcttttttattttcgcttggacctaactactgggcttcggcccatttatttaagggaactttctaattttccttgattcatcaaatattcgttttggagatactctttgaatgcagggcgactaaagcgacgtgaatgttccgcgaatcactccgactttaaatggaatcgcatcgctgaaagctaagagacctccctataaattccctctttagggttcttttcactccttactaaccataccgctcttttcttttgcagttatggccttcaacctccgttgctcggaatccatgccagacttttcgaggtcgatgatgatcgatgagacatcccgaacgtaccagacagaggacgctccccactttgcaactttaaatcccagatccgagctccgtgtgtgttaattaaggacctttcgagcagagatcaagacatcgcgatgtccttcatcaaagttctcgcggctcaacacaaaaaacgctcaacggaaaagaagaaacttcgaaagaagatcaaccaaatgctgcgaagagtcactgtgatatcaagggagttacacaccctcaactctctccccgaagattggatcgaactcggaatcgcagaatttgctcgcatcccggattgtatgatgcccattcttgacatcgccagtcaaggggtcgaggtgttctgcaagatgaggaggatttcctagttcaaagtgtgtttaggacttcgacacattttttcttgttttccgttttgaataaatttagctttgcttcctgctttgtacgttcgcatagtcgaattccttgttttcactcgttcgtataatcgaactctttttcaaca

SEQ ID NO: 5759 - DNA, 3299 bp, Arabidopsis thaliana landsberg
  unsure (1)..(3299): unsure at all n locations
tatcgaaatgtgacaactttatctctatatatttttatcagttattcggaaaatcactgcagtcttctcgtgttgctgcatcttcccctagcttgctatcaggttcagaaacaggggtacgttttgtttttgttcccaatcgagttggtagtatatggttatgtatcttatcatcagatttctatgtatctgcttattttcgatgaacaatctaataaagttttatttgagaatctgaacaggcatatctgcatcgtggaaatcatgctcatagctttcataaccttgctttgccaggtacttcttacaacttatttatatgtgacttttgggttagttttagtttcttaagatttttgtgctcttattttgtttgtatcccactagcagggaactcgggcatctcgaggtcggcgagtttagtttcttcaaccctgcaaagatgggtcaggcctttttcagctgaaactggtatgtatgttcaacctgagctctttctctctttttgttgtggtattaggtttgccatatctgggaacctatgattgcttagaagaaatccaggagctcatagttttgattccattcggatgcagattcttatgaaacgtgtatctcttaattatggttttgcaatctgctactactgtagctttgattggattagtagggttttctcacacgctttcttgttattgttactgaaggagataccgtggaagcagttgtgcctcatatgggggaatcaattactgatggcaccttggccacctttctgaagagtatgtctcttttgcattatcttttccggttctttctgatgtctgaatatatatctaaaagttaatttgctggcacatttcagaacctggtgagagagtccaggctgatgaggctattgcacaaattgaaactgataaggtatcaatatttattttttctttgtcatttttctaaagacatctgtgttaaattttaaaatctattatttgattcatatttgtggattaggtgacaatagatattgctagcccagcaagtggtgtaatccaagaggtaaatatgtttgctctttgtgttgtttattcagtcgttattgttgttctctttctggtgtctctctatagttagtcttcactgactagacctgtttgattttgtcttctaatgcagtttctagtcaacgaaggagatactgtagaaccaggaaccaaggtcgctattatatcaaagtctgaggatactgcatctcaggttaccccctctcagaagataccagagacaactgataccaaaccttctcctcctgctgaagataagcagaagcccaaagtggaaagtgctcctgtagcagagaaacccaaagcaccatcctcaccacctccacccaaacagtctgctaaagaaccgcagcttcctcctaaggaaagagaaagacgggtatgcaaaatctatcatttttcctggcttccgtctgtaaatttttaaatgtctgatcagaggttaaatanagttagtttgttacctaataaaaagcttgacagtcacataatcagtgatatgacatctaacaacactgcaggttccgatgacaagacttcggaaacgagttgcaacaagattgaaagactctcaaaatactttcgcgttgctgacaactttcaatgaagttgatatgtgagtaacagcttaaacccgtcaagttgatatgtctatatcagttatgcgagtccttttggtgcactgaattatactagtcagtttgattttatttgctaattatggagctcttttctgcgtgtaggacaaatttgatgaagctccgatcccaatacaaggatgcattttatgaaaagcatggagtgaagttggggcttatgtctggatttattaaagtatacacttacttatttttcgatattaataatacaatgccagagttaaatgatagcaaaaataataccctattcttcgttatctgtctcaggctgctgttagcgcccttcagcatcaaccagttgtaaatgcagttattgacggggatgatatcatatacagagactacgtggatatcagtatcgctgttggtacctctaaggttagttcacattctttagctatcattggtttgtgctaaatttcattcttattgcgatcatgtatgtgaggctgaattttttttcttgtggtctcttatccagggacttgtagtaccagtcataagaggtgctgataaaatgacctttgccgagatagagaagacgataaactcacttgccaagaaggcaaatgaaggaaccatatccatagatgagatggctggcggatcattcaccgtttcaaatggcggtgtctatggaagtctcataagcactccgatcattaatcctcctcaggtttaaatttatttcccatctcaccgggtcccagtcagaaccacgttttttgttaacagtaacctgtggttttgcagtctgccatactcggcatgcactcgattgtgtcacgtccaatggtagtaggaggaagcgtagtgcctagaccaatgatgtatgtcgcacttacgtatgatcacaggctgattgatggtagagaggctgtgtacttcctgcgccgtgtcaaggatgttgtggaggatccacaaaggcttcttcttgacatataaaagatttggtttcgaggagtcacaaagtgtctggcttttgccagttatagacctgcagtgtctttaaaacgtttgggggtaacaacaattcttatctttcaagtttctttacagtttcccgagtattgcgggattggaagaataggcctcagtgtctacgttcttactttttacacagtttgatacagatatgttcaattttgactgaataagatacccttttgaggtttttcggattgaatgatttcctaataagatctagacgagagagaagttacatgctttctttgtattaaatagaaaagctgagaaagtgaacatacgttgctttcttactttcaagggaaatccataaattgtatcagtcttactgtcaacaaaaggaaatcaactataagaggattcactcagacctattggagctccgatggttccgacttaatttaatttattgaaggtaaagattctatcttgttgaatgtgtcatgaattatggtaacacgcagaccagaaaattctcagatcctgacttctatgcgctcctcttgtacgtgctctttcacagattggattggtaccttatacaaaatagtagaataatagtgttaccaggtataaatgcaaaggttttaac

SEQ ID NO: 5760 - DNA, 854 bp, Arabidopsis thaliana landsberg
ataaaataattataagctaaaagtgaatcaacaaccactttgctgatttttagttcaataaggtgatctcagacaagtgcttgcaagacacctttggaaggaaggatgccaaaaagatttcatttaaaccgctttgtcaaattttaaggacaaacaagtacttatatgtgaaagccaagcaatcttgcttcttcaaaatatatagattggaatttggtggcttcttttatttcccaacgtggtaaaacgaacaaaaaagtaagaaaagagaagaaaaggaatgataaatgtcaacaacacgaatgaaaaaagagcaaacaagaaaacgaaatgtataaaacgacaatgtactttggaaataccaatgaaaacgtaatgtcatgcatgtagttccaagctctttggcattccgtttcaattctattattattttttgtttgttatacgaagaaaaaagagtttcgacggtccagtttatttgcgtaaccttcacatatacttctttgaacgttaacatctcaatttggtcaatcagactgtattcattagtgtagagggaatcaaaattttatagccacaagttcacgagtataagacgaagaagagtttcaatgaacaaatcaacaaatgatggaagggcttttgtattttagtttaatcaataatgacttttcttttgtatttgataaatgctgatatctaaaaagaaattgcattgtataaccaagaaaaaactatataattcatcaactaatattttgtagccacaagtttacgagtgtaagacgaagatgcgtttcaataacaaatcaacaaatgatggaagaggtttgtagctaattttatatttaaat

SEQ ID NO: 5761 - DNA, 4063 bp, Arabidopsis thaliana landsberg
  unsure (1)..(4063): unsure at all n locations
cctagtctagttctatttattacggattttatttgattttatattaaatttgtttgagttaaaattttcatttatttttggatttcgacgaagcgttgtgtaacttttttttttttttttgttctttgctaatagccacgtaacgtgcatgacatgagtaagccggccacgttagcgaaaagtgggaagtaacacaagaagtctaaagaccatgggatattcaatggtgagggttaaaaaataccgagattaagtaggaagaagatgaggaaagaagacttgtgttagaatattggagacaaaccaatgatccttagacgaagcaaagaagagaacctccaagagaagtaacggtgattgtggtgaccgtagggattactttcagctttggtaaccataagtaaaatgatgataaattcaatttggatagaaaaatacaccacttaagtagcatcccacatcaatccacgaaactgaaaagatcaaaacatttgctattaaaggaactattccaaaaatttagtgaaacgtgcctaacataacacatatacaaccgataatccgatatgtactttgaaaatcggaggaagcccaccaaatataccagaaagttggctagatctcatcaagtaaatgcaagatggttgtcaccatgatgatggtgttagaaatcataaaatatgtaaatatttttaacatgttcatccatcagttgagccacggtcaatctgggtcgatcctgacagccctataactcggaagatagcttggttcgctgtccatgtcaggtgtcaggttaataatcattggatcaggctgaattggatatctttctattatttcttctttcttattccaggtttgggccaaatgttcttggaagattaaaactagagacgcacggttcaatatatattcaacaagaagaaggaaaaataactttgtaaaatataaagaggtgggccaatgggtttagaggagagttgccaacgtatatattcccatataaagaaagagagaacggtaaacgataactactattggttattcagtcgaactagatgcctttaataattgatcaaattggcgtgttttgaccgcaacattatcaaagaacatacgaaaatatgcgtggatatggtcaatgttaggttcatctccgttgtgcaatggcctccctcttcaatcgttacgatggaaattgcttctaatgcgcaaattttagagtctctcttaaccaagtggcggttttgtgttgttgaggattcattttatgggtctaaaaaaataataaaaatcgcctcaaacgtgaacttatctaactttcttgcttagccatccgtcatctcgaaactcatatttttattggactcaggaatagacttggtctaaaaagaccagattataaaatgtaattaaaaatcattattgacaatgtagaagttcatttttttaatcaacatttttttttttttgattaaaccatgtaaagcttgtttttttcacagtgtaaaacattagttattacaaacggaatccaagaatgtgaagcttattttaaaacagatgttttttttctttttttttgaaggttaaagaagttataaattacttataagttataaattcactactgcaccacttacttataggttataaattcactagggtttttattacaccacaatgttacttttaacttaattttgtgcaatataatcaccccttccacgtggggaaatcaactgataatatacatcacttttattaaacataagcagcaacaacaacactctttagaaatcataaggtcatcaaacgaaagcacttttttgggataaaagccacctatttagttttggtacgatacagaaacatgtccatcacacacatacatcttataaatgtattatttgggtacataatcattactttcttatttgaaccggcatagtatttaggtggagtctaaagtcccttacctccccacccgagtttctggccggtgattttgctgacccgccaattctcagtagcgtttacactactccacccgggtgctgcatcccatgcatgccctgatgctgtattctgtgcccgccctggtgctgcatcccatgcatgccctgatgctgcatttcgtgcccgcctggtgctgcattccgtgcctgccctggtgctgcatcccatgcatgtcctggtgctgcattccgtgcccgccctggtgctccattccgtgccccccctggtgctgcatcccatgcatgccctggtgctgcattccgtgcccgccctggtgctgcattccgtgccccccctggtgctgcatcccgtgcatgccctggtgctgcatcccgtgcccgccctggtgctgcatcccgtgtatgtcgtggtgctggatcccatgtccgccctggtgcttcatcccatgtatctcgtgtccctgctgcaatccattacctatctttcccatttttccctgaaaaatgatcattaggcaaattaaaaaacaaaatatatgtttaagcagataggatgacagaaggttctatataagattaaaaaattggtgcttcttttataatagtttgttaatataaataaaaaccacaaaccgttgcctaaaatttatcttcaaaactcttgtggcgtgaaggtcgaagctatggacttttgattttatataatagtatgtttttataccggatgaattcaggacttgccctctctctacgaaagagtgtttgaacttagggcacaaaataccaactccattttatcactagaccaccacctcaatctgtttatataactttgtttctgatgtttatatatacaaatcagaattaattgttttatttggcaaaattttagcaccaattttcaggacttcaaaattttaaaagataccttacatataaataaatatattaagtaacataacataacatgattagtataaggtaacgacaccaaaagagataacttacgttgtggtgaggctgagtcactggaggtggaggcctgaagttcatatgaagtggttgcggcaacgcagtagtgtgttgggtccggctgctctcaaagaactcctccacgtctgagtctgagtcttcttcatcccagacatgcatgggtggacggccatggttgcccgtacggtggttgtagcgggcttgacggtcaacgaagcctcctgatgactccacacgactcgaaaactccttgtgctcctcgaacccgaagcctgcgcttgcctggaaatgcccatgtccgcgccggagacctccgatccctctggtaagcttatcaagcatttttctgtaaatttatacttgtgttagtttctttgatagggataagtaattaaaatctttcaggtgtttatatatatacaattttgtactgtagtagtagagtgttcttttaaatttgtgttagatatgatcccatatggcaataattcgtaatatgctttgaatcttattctcttttctaccaccaccataccgaaagttgagtagacatatttattctgattccgttcttcctaattaatgattagtccaattcacgtggaaaatccgagtatttatggaggcatattatgtaatctagtttagttccactacggttttgattttggttatactgtgttttgatatcaaatttgtttgggttaatattgttattcatcattgagtgtatcacttaatttttttatgtaaaccatgtagcgtaaaaaacttgttttgatagtttttgacctttggtctagttctaaaggtgtttaggcataatcctatttgttctacttgtgctccacgaactctaggtaaagtcacatgctacgtggtaagaagaatactttcttttgaatggtcggatggactcaagacgtcaaaattcacccgcactgacgatcgattgcctagtcccttcatcaagtccattcatcaaatgagtcgagacatggatacttataagctgaaaatgcctcgagctatgcaacatgactcttcacctatataaaggcatgcanagtattccccacaaaaactta

SEQ ID NO: 5762 - DNA, 2786 bp, Arabidopsis thaliana landsberg
  unsure (1)..(2786): unsure at all n locations
tgtcagatcaaggagtggatgcaagctctagagtgtatttctaataagatgggtttgtccttgggagacgcaaggtattttctaatgcttcttttgttttcctataatttgtttttcaaaaacatgtaatatcctatatatttaattagtgtatagaaataacccagtttccaatatgggatattctaaaattttaataggtttcattgagatgtgaatgagaaacgatccaacgtacacagtccaaactcattaaaaaccgcccaatttctttctttttaactaaggtttaacaacaattatataataattaatccccacaaagacggccagatataataactaaggtaattttagttaaatttgtttagttaactgatttttatcgtttaatttgggctgcttgttctgaaagctagaaagattatagtagtttaaaactttaggttaaatcgttttgtaaatttgttttcaatggaattttggttttgaaagcttgcatgagtagacgaatacccattattttttggtaaataagaatgcatggagtcatattttggttcccgaaggcttaaaagaataatattaggtgaatttccaataggttttatctcatctatagtttgtcacattatttttgtcgacttgtggatcacattttaatactactattatatatatatttttttaaaatcgaaataatgtttgggagaaaagtatgccaatggatttgaatctccagatctgatttgtctttgtgtgacagagatgatgtaaaagatgtgtggagcttaggaattatagaaagaacattttctgtagttttatgtttaggatagaatgtatcaccctttttgtacttatatctacttcattaatttctttcgttgatcctttcatcttgtggttgagaattcctcgattatatcacgtgaaaatatttagtttctctgcactttagaaaatatccattaattgagttacaatatatatatatggcaggtctgaagccgattttattaaggaaatcgttaaagaggttgagaaagttctagccacatttacaagcgaggacacagaagatcatcactgtgtcaattgttgaaattgtatccttgattgaacctgcagaaagagaaaagaggtcaagatgagcgaaatcaagaatctcctgattctcgtcgtggatgcagcaaaccgttaagcttttgaagggcctcgtcgtgggttgccttgcccatcaagaactgccgttggtgttggtttttactcaagtttactactatcttaagttttctattttcttcattgaggagatattctcatcatgttttatgaaagggtgtgttggcaaactagtcacctattgcattccatcttgttttgaaatctatcaaagaaaaaccaaaaagaggtagtcttaactacccaaaagagctttgtcttaaagccctgcaaggaggacttgcaaatcaattcgatatcgattcctggaatcgatctcggttatatcatctcaccatcgtttcatcaccactaatcgtcatcttcatactctgttttctccctattaaaacggagccgccgtgtcctccgctcgtagcttctgcctttctatcagttggtatcagattcttgtcgttctgggcgttgaatttgttaatcatgcctcctaaagctaacgtgatgctttaattgcatctcaagaagatttccagaatatgatnnnnnnnnnnnnnnnnnnnctgaatcaaatgttgctgcaaagtcttggcaacatagaccctcatcgtgatgttgcttttgaaaaccagccacaagaccaaccagatagtccgattgctcgtaacagacaacactaacgcgatctcgctaatgtttgtcaacatgaactacatgttgggaagctagttttcgtctcgatatcctgtagtttcatggtggaattcgtggtgattcgttactggattggatcgtatctgttgaagagatacttgaatttaaatgagtcccggaagaacgtagagttgctttggaagcaaccaaattccgtggtcacgctgcatattggtggaatcagacaaagacaactcgtgcccgcattggaaaagttctaattcatttttgggagaagctcaagaaaaagtttaaggacacgtatgacaggactgtaaggatttgaactataaactcagctcactaacactcgattcgaacttgattcttgtttgtaatcgatttgtgtaacaaagaaagtaaaagaatgttgacacagaggtttaacgagttcacgtttccttcaccgaaaacgctacgtctcgccggagtttaccttcggaatccactagaactttaatgggaacaaagtatcatacaatcactcaatctcagagctttctcactctaatctctctctctttactctcgaaataaactcaacaacaactttaacggaatcgaagaagagaagaagaagataaagaattgcagaggaacaccgaaattaccaaactgccctcattgaccgttgcagcttcagcgagtcaacacacgtgcttctcacgtggctcttcctctaactcatgaaatgaaaccctctgaatgcttcagagtctctcccatacttaagacattccttaagaacaatatgagccacttccttcaaatctccaccttggctcttattgtcttctgagtcttaacctgttctagttaccctggattccaactccggaacatgagctccaccgctcagtgacagatgactcgagagcatagggagtgct

SEQ ID NO: 5763 - DNA, 564 bp, Arabidopsis thaliana landsberg
aatgaatttttttattctacatttatcataaattatgacaaataatattcaatacctacatacaacttaacaaaactacattatataaaaaaagcccacggcttggcgcgggtttcgctctagtgtaaactaaaaaagctgtttagaaaataaaatgcaatgtagatagttatgaagtatgaactgatacaataacttgctagtatttataacaaaataataagtgctggaagatttaggatttcttgttttttaaagatatctaaaacaattaaaaaaaattgtatttttaaacatttcctagtcattatcataacaattttttgtcaacttaactttatgttatgtgataatatatcaaaaatatagttatggtagttaacattttaatttatgtaaacatgcttaaaatgatagcattaacctcaattttagttattattgccaaaagaaaaaaaatcaccttgcatctacatatgttatctttcttgtttccatatgttttgttttgtgtgaaagatatctaatatttataggaacatatttctttgttatggtgctttc

SEQ ID NO: 5764 - DNA, 1390 bp, Arabidopsis thaliana landsberg
gaccctcgattgatacagacaatcagaaaatagtacataacacagattgatcactggctgtctctgtacttgtgtgtcgaaatctaattttacacattccactcacttttttcatcctttctcgactattgaaagaaaagaggattagaactgaaaaacgaagtgtacatcttcgatttgtcactttggtttcgatctaacccatcagaaactcctctgtaacccgcgatcccgttatccgaacgctgatcaaacgatcgctctgcagcaggcgtgtagtagtaatactgtccctgtatagacctcttgtaaccactctctgaaggtaaatcttgtagtctctgtcttggtgcgctttgtgatcggacttttgctttgtaagactcagtgttagccatgtagttagggtgatacccagagtagtactcgtactcgcttctcgcaggcgtgaagggagtttttctccttgaaccaccactgctgcttcctgttctagaccttaattgtggactgttctccacacttgtaggaaccactagagatcctcttttccttggtgactctctgaagtgaggcttccaagtgtcgacttctaggattttgtcatcatcttcattgtactttggtgcgctccatagactttcctctgtcctccattggtctaataaccggcttgaacccatcggtgaacggtggttgttgtggtggtgatccatggcaatgactttactgtactcagcctctgaaacgcatcgtgcatggaaagattgtggggaagatggaatcattagtgttggcggatgggaagagtcagaaacgtgagaagaacgcgaagctctagctcgtgcttggagccgaaccagcgtttgcattcgacgcagcatatcagccgtttgtttccttactatgtgtcccttcaccaacgcttgaagcttcactaatgccttcagtgctctcaacgccctcctcgcctgaattaaagaaaacttggttacacacttaattcaaaccacaaagtaatacactaatactccttattaaattactcatagtttcccaaccactatcattttcttctaaatgatacacaccttatttgttatatacgaagcaataagattagagaatctctaaattatgtgtctaaactacataacctatctgtcaaattatgaaaaaggtaggttgcaactttgatagtaacagtggtgatgcaactttaaagctcaaaaagcttaaaaaccaatctgtagtttcacctttatagtaaaatacactttggaactttggaaactaaaaagaaagtagatccaataaagaacttggccctctcctagttattaaatattgctgacttggtttaatgtaaaaattaatttattcaaagaat

SEQ ID NO: 5765 - DNA, 3047 bp, Arabidopsis thaliana landsberg
tgttttcggaagaggcgagttggttgatgattctaaagctatagccatcaagtacctctcctcctacttcatcatcgatcttctttctatccttccactcccacaggtaaatgactagctatttgtgaccttaagttgctaatggctctttaatattctcttgtttcttctgcagcttgtagtcttagctgttatccccaatgtaaacaagccggtctctttgatcactaaagactatttgataactgtcatatttactcaatacattccaaggattcttcgtatctatccactttacactgaagttacaagaacatctggcatagttactgaaaccgcttgggctggagctgcttggaacctatctctctatatgttagccagtcatgtgtttggagccttatggtacttaatatcagtagaacgagaagacagatgctggcgtgaagcttgtgagaagataccagaagtgtgtaactttagatttctctactgcgatggaaacagtagtgttagaaacgatttcttgactacctcttgcccgtttattaaccctgatgatataacaaattcaacgggattcaactttggtatctttactgatgctttaaagagtgggattgttgaatcagatgacttctggaagaagttcttctactgcttttggtggggtttgcgtaatttaaggtttgtaacactctctctatctagttattagtaatttaggattcatgtgacacacttgatggctggctaagatatgttgagcatgaaacactaatctgatcacttgctttttctcactcgctgcagtgcattgggacaaaatctccaaaaaagcaaattcgttggagaaatcagtaacattaactcacacaactcttactactactcatagcttaagataacaccattattatcagttaacacacaaagaaaaccagagtttacgaggatttagaagatgttgaacataaaaaggattagatagcttaagataacattaacacacacacaactcttactactcttcttcgtcgtctgcagaggctcgaacgtagtcggctgcatcgggttcatcatcttcgttacggtagtctggagactgctcagtgacaaaacaaaatatggggtcagatgtaggcaaaacatagctggaagaattaagtgagaaagggaaactcgcggtaagaggttgttgactcaaatggacacaacaagtctgcgtttttggctagaatgcttacagaatgtgtatggtcctcactcttgagatgcgtgttgaaatcttcaaagctttggccagcaaatctgcattgctcacaaagcaaggcaggttcacctttttctttgcacttgtcctcctgaggtgcccctgaatccatatcatctgcgtccgtggagataactaggtcagacacagcttaactatttcaacactgtactgagtgtgagagagagagagagaggacacggacctgctgctggtaagcttgccagtaagcttttccagaggaaagaccctgtagaaggggaggcggaggatgcggcttgttgaggatcatctggaagaatagaccgaacagtgttgtatccgatcctacctagcatgtcaagagtggtcaagtagatatgctcgtacgatatgagcattaaattagccggaggttgattataccaggtccacttaaccacagcccacccaatccctgagagagctgtttcggaaactataagacttaaaaacaaaaacaaaaagggcaaatagaagcaaaaccctaattttagaaaatgaaggatgagaagatataaaccggtgggaacgtgatgaagagcgattccagaggaatggacttgtgtgaggaagtcatgagggacgtctgttagtatcccaacggcagtgatggtgagaggaccagagtagcctaatttctccaacgcccgttttataaacggaccgaccctgcgaacatcaacgtcagccggaaccggacacctgttgatgtcccaccagacgcgtgtcgctgcagccccagccgaacacctgttgatgtcccaactgacgccggtcgaggccccgatcacggtcgaggcatcggcctccttggtcttcatcatcattcaagactttaaaacctgaaaagaaaaatcaaactgaaatttagaatttggagaaccaaatcaatctttaagtgtcaccaaaacgtgctagtaacttaacaatggaccgttaacttcttaatcccaccgttgattctcaaccctatagtgcgacgtaactgtccacaaaaattcatcccgatcggaataagttgagacctctatacgctgttctaaagatgacacattgaatctgtgtatctagggtctcaggaattggcagaaacagaaatttcttgcttaagaagcaatcgttatggggattatgatttaccttttccgacgactttgacagctcagatagcttccctaacacttcctctatcaaaaaccaccgtagatattttctatgcggctcaggtattaccggaaatatcctccaaaaactccaacttgaatctgaaatattttgctgaaataacttagcttttctgaaaacagaaccagtgatttatcataaacttgcgagatgaattgtgaatgcaatatacctctgtttgataaaccgtaaaatgctatggactccttgcagctagatgtatcccgagacggtaaaagctcgatgtaactctctttggttcgacgggtaattagtcctcaaaacccttacttgtcacagtttcctcttcttcttcttcacaaacaaaacctagatttaaactaagagtctatgagatcaaaacaaaaattttcagaagaagaagacataaacaggttaggtttccttacccaacaaaccaatgatgacaaggctcgactccggttaacaccggccacaacttcaatgaaacacgaccacgtacgaagcgacgatggtgacttttcccactacgatccttctttgtctctgtcattgtctctccctctctctctcgtttcttcttttg

SEQ ID NO: 5766 - DNA, 1931 bp, Arabidopsis thaliana landsberg
  unsure (1)..(1931): unsure at all n locations
attcccaaatttattctttcttgtttcccataactttaagcaatgtttatgtgttgtgattgataatagaacaccttagaaactgacgtgttctcgtccgaatacaacatctcaactatcttttgttggtaaagaaacgaaaaccctaatgattcagagatgagaagtgagaaagtaacttggggttgaagatataaagaaaaagtggggactggccatgagtcaacttctgacacaaacatatctcccaacttagcttaccatcttcctaagctttcctgttttctataaaattgttcccagaaattaaaaggagatttaaattaacatatctctaaagatttatatagttcatcaatgtaaagaaaacaaacgaggttctgtgtttgcttaacgtatttgataaattctctctttcattcttggcaataatagaactaatgtagattagcctctctcttacaaactctcgttttaggcaagaaaaaacgacatgactagttaaagataacaaaagaaaaaaccaatctgtgttcgattcaacaatatcagatatgaaaatatacaaaacaaaccagttctcatgttgtcaacaaaagtaaagcacttttgttactctctcatcagatatggaagttcatgttgaggcaaaagaatagagtttgttcatannnnnnnnnnnnnnnnnnnnnnnnnnccttgcatttggatgaagttctgggaagcattaagagatccgccatgatctgcagctttttgtcatctcttcttgcctgaacatgaacttccaacagctcaagacacggcaatttccccaagacatgtttcatttgcactatctctccgatatctcctacgaactcggttatcttgaggaccttaatagggcaggacaacaggaaagaataccccaacaaacattcgcaaacagcttccaaatccagtttttcataanaattatagtgcaagggaccctgaaaaagacatgaaaatttttgagatacttgacaagtatatctgactctatatgagttctttagtctgtccaatgaacttttggtcatacctcaatggtgagagtctttagatttggagatttctcaagcagaatttgcagaggatcccaacagaaatctgcttcactggtaaccgacaaatgaatcaagttttcaaacactgggactgcttccttgaagttataaaataacagctggaacagaaaagataaacaaattagtcggcaatctcaatggttcctagatacaacttatcctcatgctcttttattttttaagctgcacatacatatcaagaacacttacgtccatcgtatgaagaaccttgatgctcagaatctcaacattttttagccctctaatcaaattcgaaggatcagcagatctgttaagccaatagtcgtactctacttccctaggaagagtgagcctagcttcaacaatggagttgagattaacaattggatacccatatggaataacatctttgtattttaagtaagcaagactcggagtatcaaaactaacgctctcaaaatcagtccaagtttcaggttcgggttcccattctttacgccgaagagtaagtctcttaagagtcggactagacacaaagcgagaacctttccaatgttcccagttgagacgatctataactaactcttcaagcacaggggaagcagagagaagccttgtgaacgcacaaccatcactggcgtagaaccgaactgaatcaagaatgagagtcttaagagctggaagcaaagcattcttagggagaatgtcaataacaaaaccacaccctagtttcagtctaacaactgtcttgcaggtgaagacatcaaaagggagtatgtaatcttctttgacgttaatgtcgagctcaagatccaagacacctcgcttcaacacatt

SEQ ID NO: 5767 - DNA, 1242 bp, Arabidopsis thaliana landsberg
attacttatttgactaaaatacaaataaaatccatttttttttttcaatttcattatttactaggtgaaaagagaagagattcaactatatttctctgctcattatctgtctatggctacgtatttgtgtttctcttctcattatctgactatggctacgtttatgtgtgatggtttcgggttttgtaacaattgagtgtcaatgcttaatgacttcgtgtgtattgtatttgtatctctggacacaatctatataacaactttagtctcttgtagccataatcatctagttcttgtgtatgttggtttatgatgtgtttcttttttaaatcaagctttgttctagttctctgcgcattgcatatactgagatatttttagctcgttgataaaacatataaactacaatgttactagagccgaaacaaacaacatcagtcaaatcatatcccatttaccaaattgtcaaatagactgtgtaaactgtaaagtaacaataacatacagcacaaatgagtcatagtagacctaacgtagctgatagctaatagctatagcatctctcttacaaactcaagtgaattaggcacgaagaaacgacacaacaaggagccaaagatgacaaaaatgtcaagctgttatatacagaaattgcatggataagaaagacactaaacaaaccagctctcatgtcaacaacaaaccggaagctcatttgtttctcttatcagatatggaagttcatgctgaggcaaaacaaactggaaacttgacctcgactttgcattcagacgaagctctttcgaacattaggagatccaacatgatctgcagctttttgtcatctccttttacctgaccatgaatttccaacagctcaagactcggcaatttctccaagatatgctttatttgcaccatctctccgatatctcccttgaactgggttatctttagaacctcaatatggcaggacgataagaaagaatacacctccaaacaatcgcaaacagtgttctcatccccatagtgattagtagtataatgcaaagcctagaaaagacaggaattttgagattgaagattttgactctttagtttgtccaatatacttttgggggtcttaggtcatacctgaatggtgagagtctttagatttggagatttctcaagcagaattggtagaacattccaacagaaataaacttcagtgctaagtgataaatgaaacaggttttcaaa

SEQ ID NO: 5768 - DNA, 815 bp, Arabidopsis thaliana landsberg
tagtatctcaatggttcctagatttaaatttcctcatgctctactagttgttaagctccagtaacatattaaagagaaccaatagcgatcacttacctgcatcgtgtcaacaacgcttaagctcagaatctgaacattttctaagcccttaatcagattcttaacatcgtaggtatcgccaaccataaaaagaggaagttctagcttagcttcaacaagggacttgagatcaacaactggatacccatctcggagaacatcaaagtattcgaagtattcaagactcggagtatcaaaactaattgactcataactagagccatcaagatcttcccagtcttcacgccgaatagtaagtttcttaaggatcttactagacacaatgcgagaccattcccaatcttcacggttgttcctatatatcactaaatcctctagcacagggcaagcagaaacaagccttgtaaacgcacaaccaccacttttatcaatgaaccgaactttatcaagaaagagagtcttaagagctggaagcaaagcgttcttagggatattgtcaataacaaaatcagaacctagtttcaatttcacaactttcttgcaagtgaagacctcaaatggcaatttgtaaacttcattgacattgatgtccaattcaagatccaaaacacctcgattcaacacattgcgtagacattcgttgacaagatggtacttagctgaatcaaattccaaagaacgtagtttcaaagagaatctccttatacggtaactgtcacgtcgagctagtaatcgagaacgaaatctttgaagct

SEQ ID NO: 5769 - DNA, 634 bp, Arabidopsis thaliana landsberg
  unsure (1)..(634): unsure at all n locations
ccccgcgtctgccctagtggaagtttaaagatttcgctgatcgaataatgttagctcgacttgccagtcacttttattaggagattctctctaaagttgcagtctttgaattttgctcagtataaaactgtcaacgattgtttacgcaatgtgttggagtgtggagtcttggatcttgaactggacatcaatgtcagaggagattactcactgccttctgagatcttcacttgcaagagcgttgtgaaaatgaaactagggtctggttttgttattgacattctccctaagaatgcttggcttcctgctcttaagactctccttcttgatacagttcggttcgaattcgataacactgctggttgttcgtttacaaagcttattttttgttgccctgtgctcgaggagttagtcatagatggccacnnnnnnnnnnnnnnnnnnnnnnnnnnnnnnnnnnnnnntcagatccttaagcgacttactatttctgtgtaagaatgggttcatgatggctctagttttgagcctatcagtttggatattcctagtcttgaatactttaaatactttgatactcttcgagatagctatccagttgttagctcaactcctttgtgtagcttagctagaa

SEQ ID NO: 5770 - DNA, 3361 bp, Arabidopsis thaliana landsberg
  unsure (1)..(3361): unsure at all n locations
tgctgtttatgatttcgttaccacgaattgatgaaaagttctgacatggatatgttttgtgttgtgttaacagtttaagtttctagtttcacttttcgtctatagttttttcatacgtttgcaatggtgaattaaaataaacaaaccttgccattgatggatggatagaacataatccagaactattacaatatagatcatgattgtaactaatgacttaaacaaatcaaataatattctacttgtaactaatgtttttgcactttctttggttgatcatgattcataacttgaaatcgagtacacataagaatagagaacagtttccgatcaaaacttgcattgtgtatagtacagattcacgtagtaccatcgcttcatacatgtaatctatcagcaacttgcaattgcaataaataaggtaatcatcaatcagtaacaaattttctgtggtaagctttagttccaacaccaatgtgatgcccccaagaccagggtatatgagaagcaaaactcatagctctgttttcatatcattacctaattgactgaataagattccaatatccattccttgattcaccgtaggtatgactactgaataagggcactttgtggaaaatccaacctttttgtttttagactgttttatcgctttgcttagcctgtttacgcatcgctggaacttcttatggcagcttatgttagtcatacctgcaaataggaagcaaaaatgcgattatttcatcgtaaccttgttaactcaagaccaaaagtttagcatttgaatcagtgaaactatagcttaagaacaatgaatcatagcagcagagttacttatgatcatctgagccttataggccttaagagatttatcatacttgatatcttagcactctgcattacacaatttgtgtagagaaaccggacagaccagattgactacaatctcaaatccaaggactaatcaagccaacttacattcatactaactctgtagctaatttccagtttatctcagctctgtttatagagacctaatgggcatacaatattggccagtgtaaacctttccagatgataataccaaaactacatcccaattcctagtacacctaagaacggtaactagaccttttcgtgcagatccatatttaacacagcagtaagggatttgcgtattcttgattgattaccgtttaactcaacacaatggtcatggatcttacaacaagcatcaagatcatcacaaggctcctcaccaggacaaccagaatgtccaatcccacaatacttcccatatcgaatagaaagagctgaaacaaacatacatgtgagtcagctaaaaagctaaaaaacctaaggaaacttcagaaaagttgtaatcttactgtcacaattctgtgcaatgcaagttcttgnnnnnnnnnnnnnnnnnnnnnnnnnncaaacaagacacaaaatcaattcattgttcgaaattaccgcaagaaacaataaaacacagagacataaagtgaagtgaaattagcaaaaacatcattgtcaaaatcagatttttggcaaggttccaattaagtcaatgcctacaagaatgtgattccttttgtctaatttgggaaacagagaaaaacacagaaccaaatcgaacctcactgcgagcgacaccgacgagaacgacgaagacaatggcgaagaaagctgccgcgaaacgcatcaatgaagtgcgaaacatcatcgtcgtcgtctcgtaaatcgttgttgtcttcttcgctaaggtttcgaaattgtggctaaagattccaattgggtctccttaagatcccattggtcttcctgctttctcgcacacaccaaaattttattattatttttttgaatattctctcgctgagatttgaagttaattcaatattttatcttaagtccactcaaataaatgtattatatatttctatttttgaatttatcagctgcaaaattaaatttttacttcaactatgatatcagtttctcaaacaaaataaaaattacagttttttactcaaaaatcattttcttgtgaatatcataaattcttcaaaataacatttttttcaaatattcctctatttttgaagttattcgacaattaacaatcacttaatatattaaaaaaaataattctctgatgttttaaatattgtgaacagatattaaactttgtggataaaataaatatctaaagaagaatcttgtatcaaatgcatttttctcaacttattaagagctttaccaaactgtttttttttcccttagctccaacacttctgtttcaggaaaaaactgaaaatataaatggatttgaggaagtatatatagttcaagtgaggaatcatatggagggagttacaagcgtcaggaagaatattccggcgacctggttgtttgttgtctcaatttcaagggtagtagccggtgaaagtgaatcctctgccgacgatttcacctgcgcaaaaccaagcaaagcattctaagccaaacaatgcagcgattcctgcatcttccaccttcagattcgctctgttcttcaataagttctttgcgtagtctacttctttcctaaatgtttcgtagcgcccgggaatgctgtagttagtaagaagagtattagctatagacgcaagattgcgtatcacagaaagccgaactcttcaactgatagcaaaacacaatgtggtgcttataatgtgttatctagacgggaaaaacaagacaggcacatatattatcctaatcaccagagatttaccaactcaattccatcgaggacaaaaactactagaggataacaccaaattctcaagcatatttttttcaggcaaaaaaggctagctactcgcaagtaatgcaaattcaacttgcacatttcctcagcattatctaaagattaatgtttcaaaagtatacataaaagatagtttgagcatggccattgaaaatatgtccatgagataaagagagaagaaaatggtaatgacctagcaagacgagtgtagagcaattgtttagacaaatcactgcacttctctatagttgcaggctcttggatgtattgcttgttctgctccaacaattgcttgtagtaggaattcccatgcttggccacaaactttgaagcctgacatgcctttgattgaagttgaaccaatttcgatgccatttttcaataccaaaatcctacaaaatcatagagtcagacattaaccatagcaagagagaccagctcatcaatatgtacaattccaaagtttctaaagcaaccataaacaagttcatgattcattagacacctccacgataaaatccaatacctaaaata

SEQ ID NO: 5771 - DNA, 3855 bp, Arabidopsis thaliana landsberg
  unsure (1)..(3855): unsure at all n locations
atatcaagcttcattctttctatttcgcacaaggactctaatgttaaggacgagatggtctcttccagtttctccaatgtaagagacgaacactgtagttctatttccttgctctcgagttcttgcaacaacaacaaatgctcggatttagacatacacaactcatctcttaaagagttaacttcttcttccagattccttgattcagccaatttgaactcaagatcgtgcagatgttcattgagataattcacttccttgcttctgaaaattagttgatcccgcaagtaatctacaaggcgaagattaatatatgctgaaacatattattattagttcagaaaaatcaagactggttggcttaaatagaaaattaccaatttccttatagcaattcaataattctttctccatcatctgaattcttgctgtgtcttctaagcgagattcagataatgacttcgtgtgaagttccaacctctgcggtgaagagaagattaaggtccgaaaactcaaccaacagaatgagaaaatactttccctgaattgctcatattaaacaaggagaagaagactactctgactagttcaatactatggggctgtgattctctcagcaagtccttttgtttccttagctgccaataacaaatcaaagagcacaaaacaaaacagaaatcaacttcagcaatctaagagtcagaaactaccttataatgagcatagcaatgaagtgtttacctccctgcgtgtagtcccaatctgcaaaagatcttcaacatcaaacgagttctcacaatcacttctggaactacacgccgagctactgcttcccgagaaactccccgagctactcgacatttagagacaaaaatcaccactgcaaaggcaatgaatcattagcaccaataacctatagaaacactttctacaactaacttcaaacgaatccaagttttcattcccttaatcaaatcagatttttctttcagtttatctttccacggaaatcaaattaggctataaaaacacttacaacaactaaatgaagaactagagaagacgtcaacttcacaggtccaattattcataaaattagatgaaagccttgatgcttctactcgattcctttgaagtaattggggaaaacagtactacacacaccactagatagccaatttcaacaacgaaggataaaaattgcaaccacaaaagaaaaagcgaacacgagaatacacacgaatacaagcccaggaaacgtttaccttcgcagctcaatccctctctgagataattccgacggcgaatttgccggagaaatgatgtttgaatttgatgatcctccaaaaaaaaaaaaatgtctctcggtttcttcgaagcgatgccagcccagataagtaaaaatgactctctgctttgtttaaaaaccaaaacccggtcaattccggtcgggtcggttcgggtcaaactagttattatttcggatttggtttatgtactgtgagagtgagagatttatatagtaagcaatccctctctagtaatggcggtcgcaatacctcaagccacttctcttcgaacctcgtcttcctcacgaaattaatcccacgaggaagcttcacctccatactacntaagcatcatcggaaaccaatcttcgtattctctctccagactcaattttcttctccagtaaccacactcacctccaaaaaccctaaagatgatgagcaacagcaaaaactctccttcaccctcaactaccttatcgactcatgtggactatctccagattccgccaccgtagcctctcgtaagctcttactagattcaccagaacgacccaacacagttctcaaccttcttcgtgaccatggattcaccacagctcaaatctcatctctcgtcaagaaacgtcctgttctcttattagccaatgctgaatctgtcctcctcccgaaactcagcttctttctctcaattggtgtctcaaaatctttacttgctcgaactttagcttctgatccaaccattttgactagatcccttgttaatcagcttatcccttcttacaatttccttaaaagcgttcttgattccgatgagaagattgtggcggcgttgcggaggacgacttgggttttccttgaggatcacactaagaaccttgtcccaaacatcaactatatggcggagactggtgttcctgagaaatgtatcaagctgcttctcacgcattttcctgaagctgtgatgcagaagaaccatgagttccaagcaattgctaagcaagctcaagagatggggttcaatcctcaaaaatcaacatttgtgttggccattcatgctctctctgggaaaggaaacaaatcgatatgggacaaatgttttgaggtttatcagagatggggatggtcggaagatgatatcatgtgtgcgttcaagaagcaccctcattgtatgatgttgtctgagaggaagattaacagaacgatggaatattttgtgaatgagatgaatatggcgcctagatcgatcgcacagtgtccagtggtgctcttcttcagccttgagaagaggattatcccgaggtgttcggttactaaggttttggtatcgaacgggcttgtgaaagaggattggagcttgacgtctttgttggttccagtggagaaagtgttcttggagaagctcgtgatcaagtacgaagaggagttgcctgagttgatgaatctgtatctaggatgcaccaaactctgagcttttgtttttgactgttttcattatcaaatgtcagatgctgagagacatgaatctttgtgaaaagagtctagtgtgtaatccaattttggtagtgaaaggaaagctgattagcaagcccaacgtgtgttttaaagacagaacaattgaagacttgcatgtagaagtagaatcgtcatctcaatataagggccaaagccaagaatcggtctgcctatatgatttgtatacacacacgcacatatacatatacagacacgccttgatagagtatacaaacgtacatatgtatgtgttcataagaattggtgtgacagtaacagagattctaaatcttgcagacgagagaaagagagagagagagttttacaacaatatttcttacacgaaacgatgatcctcattcaccgaaccgacctgcaaaaaacgaatattttatcattagtgaggaataatacatagagactaataccaaatctatctgcactagtctaaatgaacttacaaagtaaggagatgtgaagacagttttcatttatcaacgcctacatcaagtgctttagagcccatcatcacattcgaatcgatttgcttatcaaatttcttctttctcctctcttcaaagtcttggtatccttccatctatccatttttatataaatgtatgttacacaaaacccaattcaaacaaacaactttaaaaagtgttctttcgaggttatggattattgaattaccagctgaaactgatccatggaaataggattgttatgcaaagaaaggttttgcaaactcttgcaatgtatcagcaatccatctggaatctggaaaacaacaagtgttacagatttcaaaggaagaagatagtgattcaataaacccaaaaacaaaaaaaaacacatttcaatctgtttacctggttcacttgattattgtctaaggaaagcgactttaactgaatcagattgcagagtgatgcaggaagctcttcaacaacgttatctgcaaggctatcccgaatcacgattaagctttggagaagaaacaaccagaggaatgtccagaacaaaatgtcaatagaaaaaaacataacac

SEQ ID NO: 5772 - DNA, 3217 bp, Arabidopsis thaliana landsberg
ttatatggcgtgacacgtttggataagacggttttatattgcaagatgagttttgatgtgttcatgttctggatgacaaataagatgagacaatgtactacaagaggatgcttatcattaacagtgaaatttcaactatacagtattaaacactattttgtggagtcttggaagaataaacattgtatcaaaatgagtggtaatcgttttggacacatctaaatgtgtgatcgtgatacaaacttactaaatgacaataattctacatgttaaatctataaacactgaaagttttagttatatacttttgatacaaaaatgtgaatataacataacagatgaatattaatttgtattgtaagatttgacccgtgatacaccaaaagataaacttattaatattgtaaacttatttctcactaaaaataataaacaaaattatcgaaaatcattaatcaacacaaataacaacaaacattatacataaaaattcattttataaaaatcaaacataaataaaatatttgacccgcgatatattgcggatcctatcctaatctctctctataaactcctaattcttgtgagaattcacaacccaaatgtgaaatcaatttattgtaaaaccataacataaaaatagaatacatttcaagatccaagtataaatagtctactactacgtatggggtgtgttgaattttggtgttgataatccgagatttgggggatgttaaaagccaggtcgaccacgtgagaactgtaacacgacagcgtttcaatcagcgccgaataaaaacacacataacggtgcttattgctgcgagaacggcggaacattttttttatttttatttttattacttaataaacaaaacaataaaaaaaaaaaacaaattaaaaagagacagagaagaaagagaacctcctcaccttcctcctctctttgcgcgttttctctcttctctctctcctacggctgttgaaaccaatggcatttctccacttcgccggaatttcgatcggaagatgaatcgtctccttcgtctctcttcgcttaatcgtcgatcttcttctgtcgccgtctaattgcaaatccaaatcgtaaacgcttcttctcttattcttccttcccccattgttatcgtttcttcgctcgatgtgatcatattcgatttttagagttttatcgcttctttcgatgagataatctgcgtttcacatttccagatcatttgattgcgtttgttttttgtgttcattcccgattttgaactttttatatgttttcactggatttatccgcgagcgacggagaattctcgaggacgcattctgattttgaatttgtgttgctcgaagaatttgaagatctaattcatgttttcttcgacgagatcgtttttttcagagtttttttagtttgattctgcaatgtagatcggaatgttattgtaatttcacgagtatagattggatttatacattgaatttgactaacttggatttcaagtttcagattgttcaaatttagaggttctgattcttgaatgttctttttcttttaattgtgtatcaggttttttgtatggcatagagatttggtgaagaactagacgcagcttagaggaagcttttatatttattgaagcttagcgggaaacaatgtcaacaaagggagaacatcatacagttccactttctgtgttgcttaaacgtgaatcagctaatgaaaagatagacaatcctgaacttatacacggccagcacaaccaaagcaagaaaggagaggattttactcttgttaaaacagagtgtcaacgtgttatgggcgatggtgttaccaccttctccgtttttggggtaattatttgccttctttctctattgattgtggtcctatcgatttttgtagttaaaacattgaaatgtgtattgcagctttttgatggacacaatggttctgcagcagctatctacactaaagagaaccttttgaataatgtattagctgcaataccttctgatcttaacagagatgagtgggttgctgcacttcctagggctttggttgcaggatttgtgaaaactgataaagatttccaggaaagaggtatgaacttatcaatgaaaaaccttgtgatgtgattcaagtcccaagagggtgaactcgtctgtgtctttatattcttatatcattctggtgaaggctatgtttgaggttttattgttttcttgcatttcagcaaggacgtctggaacgactgtaacttttgtcatagtagaaggatgggtggtgagtgttgcatctgtaggtgactctcgttgcatacttgagcctgctgagggcggtgtctattatttgtctgctgatcatcggcttgaaataaacgaagaagagtaagtcagattttttcctgctattcacccaactgatgataatcttgattgtatacaatggcatctcaatattttggctttcttttcaggcgagatcgagtcactgcaagtggtggtgaagttggtcggttaaatactggtggcggtactgaggtacttctttagataattcttgaaagtttcttctgtatgcattaagtctcacgttatcatgcgctcttgatactagcaatatatacctaaaaggtaactgagtgcaaacttctaggatgatgttccagaattggatgtttttgcgagactgtattatacttagctgatgaactgtcatattgtggtagctttgtagaatgtaacacatagggaactatctttgtgccgtcaaattgaagagttttgataactaaatcttatttttttagattggtcctctgagatgttggcctggtggtctgtgtctctcaagatccattggagatctggatgttggcgaatacattgttccagttccttatgtaaagcaagtcaaggttcaaaactcataactaaatctaatctaaattgatctttatgcgcttatagcacaagctgacattctaattattgagttttatactgaaaactgtatctatttattttgattatgtagttgtcttcagctggtggtcgactgatcatctcaagtgatggtgtgtgggatgcaatatctgcagaagaggctcttgattgttgccgggggttgccacctgaatcttctgcggagcatatcgttaaagtatagtatctgaattactttattttagatatattctctaca

SEQ ID NO: 5773 - DNA, 2218 bp, Arabidopsis thaliana landsberg
acactcaaacccttaagttgtggttaactctggctaattgtctttgtgaacttggtttgaatccaaaatcctattagagtgcatcaatgtatttgtgtgttttcccaaatctttttggagctcattctattgtctctgagtgcaggtttctgtgcgctatattggaaaacttcagaagaatgggaagattttcgattccaacattggaaaatcaccatttaagtttcgtctaggttggtattataactagattcaaagataatagcttgggaaattggttgagaattacagtgtattgctggtgtaagtgatactttatgttcttattgtaacgtgtaggtattggatcagtcattaagggatgggatgttggagttaatggtatatatcttaatttcttactgtttttttacttataactttgttcaaaaagtgaatcgtgttgtattcatctcaagtttttgaattccacaggcatgcgcgttggtgacaaaaggaagcttacaattcctccatcaatggggtaagtaaactcattttgatttatgttattttgaattagcaatgttttgttaaacctttttaattggatgataatattgtttggctcacaggtatggtgcgaagggtgctggtggccagattcctcctaatgcttggctgacttttgatgtcgaactgattaatgttcaataaaactgccctgaattcatagaatctctgatgaggggtttctgaatggtgttgtagctgcaaaagattgtttctttcctttttaacacttgaatctttttgaaaaatggatttgtgtttcaagtgataagaccatagcatttgtttcccagatttcctcttccagatagcttttgttggcctattttacacttgcttaaaaaccaaaaattggaatcatacaaatgctgtttacatagtagatggacttgaacccaaaaagggaccaatcaactttaagccagattttatagcaacgacaaccccgactcgtgaatccgttcaattgaataatgtaaataataccccttttttttggtgtaaataaagtgattatagtttcttcttcattagttagtattcaatgattcatttgtggaaagtctctctcactagtctctaatcaaggtctctctactctcaggtacagttacgtcaccatcatcaccgtgacgaatttgtcatttttgtaccgtcagaaagactttgacctatttcttgttctgcaagttctttttgactgttatttctgaccttttgacccgtttttctttttttatttttgtaacattgatgatccaccacacgtcaccattattctccgtcgcaatggcaatctctacggcgggcctctggtttctgatatcttaatgtttttagaattggaatttctcatttttgatgttcggctcctaagtatttgatggactatgattgtgaactttagagtttgcaaatgtaattatcatttatgcctctgtttacaaaaccttatgtgatgttcatcaacacaattaaatcaagcatatatatttcagaccaaggacttcaacaacaagaaaaaaaaaacaaggagtgataggcatgaactaagagacttccccaaactagagtattcagttttttttttgcaacacactaagcaacataacataatcatccatcaacgcttaagttgttttgaatagcagaattcaccttctcaagaatcttttgccactctgtctcttcccctgtttcacacatatacactaatccgttacatagtaagtttttaatcataagacaaaagaaagataagtgtaataaattaccttgattacatgtttctccatgaagcttccttctagcttctttcaagaacgaaaccacttttggatttattcgattatcctttgctctgagacaaatatctccaactttcgcagtagtcacttggttaatccaaggaccttgtttccagaaaagtttgaaatcacatccacaaatttcgttcccttcctcgtctcgttcatgcttcgtcctctccacctatatacacaaaaaccgtattactcaaaccggagttgagatttcaaacactaaaccgggattaatttctagaactcaccgtaacgacgatagcgtcgtagaacttgacttcttcggtgacggaaggaaacgtggcgcagacctgggtgccttcatggaccttgagacattcgat

SEQ ID NO: 5774 - DNA, 3152 bp, Arabidopsis thaliana landsberg
ctgcgtagatagtagatacgtcccttataattacattatctcaaaatatctaaataatcaaacaataagcgtacaactaaattttttgacgatatttatgtaaataagcaagaatcatctaactgcaagtggaccaacccatttagcttggtttacatttatggtactttattgacaaaaatattctagaaattaatgtttttgtattgatcaaaacaactagttacatttactcaataattgttttttcaaagtttgcccatttgaagataaccaactgttgttgaatcttttcttggtttatataactcctccttgaacaaggttattccaaacgataacctgatttgcattttctcctagtaattaacaatactcgaatccatgtagtgtttggttgtgtgctaccaccacacggtagtttttctctttcatctctcgaatggcaaaccgaagttccactgtgagtccatgcagccagaagaaataatcagcccaacttgttcttttaagtcacagtttaacaagtaaacgaacacaaatacattttaggattaaaaacacagtaagaagataaagagaacctacatggcattttgctcttctgctaattcgcttttttaacatatcaaggcaataattggcagaaaacaaacaatccatgagcaatttgtcatgcatggttttaacgtggaatttcttaggcacatgtatttgtcaaccatttcaaaaaccagtcggagatgttacatactgttatctttataataatttttggttcattcttttaatttgcatagttatggagggttcattttatgcctatattaacgaaccataagcataaagtgaaagtagaaaaaaaacaactataaacctaatttaaatattgctacgtcaaaactggtacctagttacattaaaagtgacatatttcttacttgtaatcaatatcattacaactaaaatcatgcttcataaattctaacaaatttattatacggaaataatcagtggtttaacctaacaaaataataataagcataatcagtggtttgacgtgtcaaacatataacatctaaaaatagtttaaaacaaatacggaagcttagctaaaaaatactatattacattttggattattcaatgtacagtacttgtagtgaaatggaatcagaagtatatcatatgaaaatggacaatcgaaaatttgggataaaagaaatcaacatatacatatacgaccctaggtgctagaagcctagatacaacaaactaataccactgggcctaaaatgaatgagcccaacaaagaatttgagacttaatgtgagcccatttgaaacctaaacggcaatcggagcctaaaccaactaaaccgaaattttaccgatggctgctcaaagcttgcttgttttctccttcacataccgccaatttcactacgagacccgatcgtttaagtttggtccgcaggtaaactgctcgagtataacctcaatcagagacatagatttcttcttctcgatttggctacgatgattgctattaaaaagttatgagcttgatcgcttttagtcgtcgtactcgacattagcttttgtttgttagaaatgcttcttcttggctctcttctagttcgccacaagctaaattctcttaaagattgtgcagtcttttgtagttagaagcgttgataggaatagctgaaataccggcttctctaagctatacagctgagaaaacatccgtattccactgctctcgaataaagagattatcacagagagccagtagaggaacatgttgccacacaatcaataagagcagcaaaagatccaccacttgtgtttatggtactctgtgacgctcaaagttaagttcaggagttgcctgctaaagtctttttatatattttgaactttcaacttctttttcctccattttcatgtatttattgtttgggtcttgattctgcttcataaatgacacgttctcaggtggtctcgccaggactggaggccttgtgtggttggtgtgtttacaagtttaacaactggtgtcgtggcctactatcccttagtacattgagatgaaatatttggtgacaggaaaaggtctagtttaccatcttgtatattaggataagcaggtaagcttcattaactgtctccaggaacaataagcaggtaatcgctactttcaatcagtaattcaagtaattacagcagatctatggaaagccatataagtatactgtgtgatactaacaagtggtcatcactgattattatgtgcacatgagaatgtccatcaacttatatgcatagatcatcattcttttatcaaagtgtagagaaaagaaaagaaagtccattgtgtaatgttatacttttaagagttcaccacatacaatacaataacaacatcaaagcagcttagttttgttgtctctctaataagtctttgatctaataagtcgtttcttataattctctaaaatgtcgacctcaccatatgaaaaattgagcgaacaggagaagaagcagatgattaaagagatccaggagcaggcctatgaggcgttgctatacgcatttggcgtggaaaagaaggtacatttcgaaattatggtattgagaatttaaaattttacattcgattcgtagctaattaattgttctttctctgaaaatgttttcttaaaatgcttatagatgatcagtgatgatgtgaagaacctattgaacatcaaacggaagtctgcagaggaaaagaggaagatagcgtacgaagcaactctgcttgccgccacattcagtcattccttggcaaaagaccgcgatggtgtgttagctacgttgaagaatcaactccatataactgatgactttcacagggaatgccagaatcgtgtcaggaacaacattttagtcgtccaattgactggagaagcatccggctcgaattatgtaggcgaaacagggtggacgactctcaggcgtatcagcaacaccatcttccgcttttaagaagacatagaagtaattttaatttcatctaagtagtaattaaataccgaatttcattgtctctgatctctgcgaccgaacatacatcatcgtcgccgttgataaataaattatgaggtc

SEQ ID NO: 5775 - DNA, 808 bp, Arabidopsis thaliana landsberg
ggtacctactatgttctttatcgatcatccagtaggtttcatcatacttatccagttctctgtgtgccacttaccctttagagtttctttaagcccttttgcctgtttttttcttgcgttttttgttttggaccttggaaaactctatcaaagggtctcacttgttcgtcaaagatctcaacagtttgcatatatcgattttttgaggtcttgtgttatcttctgtttctatttgcaattactgcgactacgctatttgtagttttggatttacttcaatgacagtaacagagggaaatgaaaaaaaaaagaagatatactggattagaactatcctctcgagcgtagtgtgatagcataatgtgctaatgctgacaggaaaaatgctaatttgtgattcgttgcagctacacagaatccgatcctgtgaaaattgctgttgagggagttgataggttcaagaaagaaaagtgtgatcttattattgttgacaccagtggtcgccataaacaagcagcttctctctttgaagaaatgcgtcaatcatatgactaaagtttatgtctaatgcacagatcggcaaaatgcttaagccagagaagtggcaagcgtcttttgatagcgacggaagagtttctggtttccagaaggcgcttaaattaattattttaggggtatgttttcactttggtagaagaacttgtaacgcttttgattattcttcagtacagaggtataatgtatgatgtttttcattagggaatcgacccgtctattagagctgaagtttggaatttctcctgtggtt

SEQ ID NO: 5776 - DNA, 1221 bp, Arabidopsis thaliana landsberg
ccctctggcattatttcagcacgcattcgaggtagcatggagaaaacctacaaaccaacaccgtatttcgttttatcagcatcacgttgtgctctttagcttacttatatttgaccagagattctgacctccttaagtgggcccatgttcagcatgttctggaactggtcgtacataattctcaatgtaaatttaccatgagagagcatttccagaagttcaggctgttgatctttaggtaccacctcttgtagtttattcacgaatccagacatatcaccatttcctattgtacatatacattatcaagattctgagtcaactcctcacaatcagtcaatgccatgatatttacctaagagacggctgacaaacggtttagcatcaaaaacttcaaactcatccatatgctctcctgttccaatgaatatgacaggactttttgtcgctgtaacactaacaagatggaaaatagataagatccacttgcccatttcgagtacatgacaactcagcagctacaagatacttacgcgctaagagtcccaccacccttggcatgaccatccatcttagtaataattacagctcccacagaaacagtttgtttaaatgctcgagcttgttcaaatgcagtttgaccaatactgctatccataacaaatataacaagatctggtttctgtaaagtgaaaaggcagcaattagcgcctccaacataattaaggaacaaaaacagaggactttaagataagagagtaaaaccgttgcttcagaaatttgacgcatttcttcaaagagagaagcttgttgtttatggcgaccactggtgtcaacaataataagatcacaattttctttcttgaacctatcaactccctcaacagcaattttcacaggatcggatcctgtgtaactgcagagaatcacaaatcagtattcgcacattctgctatcacagtatgccctagctaatggttttaatccataagagttttttattttttatatatatttcctcatgttattgacattgaagtagaaccaaatcgacaaattgcaaaatagaaacagaagataacacaagacctcaaaatatccacaaatctatgaaaaagacgtgagatcctttgttagagtggcactgtataatgaataccgaaaaaagagcgcgaagaaaaaactggcaaaagggatttataggtaactggagagggatat

SEQ ID NO: 5777 - DNA, 1131 bp, Arabidopsis thaliana landsberg
tcttttatggaaggtgctcatcaacctctttggggtgttccttttttatgaagatttatcttactatcagttttcttcttcggtgctctttagaactttggtggtatttccagaggatttttgttagcttacttataggagtgtatgtaaaaaaatgatttgaattttctttggaacggtagaggcaagttatgaaataggtttagtttagactcgaggtttggtttaggtcagtatcttcatatatctggactgaaaaggacttctgttacttatatgtttctttgtcctatcatccagtaggtttcgtcagatttctctagttctctgcgtgccacttacctttaggggttcttttaagcccttttccctcttttttcttgcgcttttatcggaactcatttcactgtgccactctaatttttttttacatctttgtcgaatagttcataaatgaatcttttgaggtcttgtggtctcttctgtttctatttgcaattagtgctactgtgctatttgtagagttggatttacttcaatgacagtaacacaaagaaatgaaaaaagaagaagacattctggattaaaaccatgctctagggcgtactgtggtagcagattgtgctaatactgagttgtgattcttgcagctacacggaatccgatcctgtgaaaattgctgttgagggagtagatacgtttaagaaagaaaactgtgatctcattattgttgataccagtggtcgccataaacaagaagcttctctctttgaagaaatgcgtcaagttgctgaagcaacggtatgctctgttgccttgaagtcttctgtttgttcctggttgatgttgcagactctgatcatggtcttttcactttacagaaaccagatcttgttatatttgttatggatagcagtattggtcaagctgcatttgatcaagctcaagcctttaagcagagtgttgctgttggagctgtaattattactaagatggacggccatgccaagggtggtggggctcttagcgcgtaagtatcttgtagctactgaatcgtcctatgtacttgaaatggtcaatatgaaattcttgtaggttttctccagttggaaaagtgaattagatcctttc

SEQ ID NO: 5778 - DNA, 1463 bp, Arabidopsis thaliana landsberg
  unsure (1)..(1463): unsure at all n locations
aaagcgaccacatacgtagtttaagcagtaagttttacatatttcttatctgattccgcaaaatagcaatccgaccaagtggtagggtgaactcaactttgtcggatttaccaaattgttttaactaaacaaaagccgactcataccaaatgtctagatagcaatacctccatcaatggtgaatgcctgcaaaccaataatttcaaccatggttaggtcactaacataatcagaaaccaaggttaaccacaattcgacaggagtatgagatgttaacctgtccggtaatgtaactggctgcaggactgagagccaagaattctaccaagccagctacttcttcagcttttccataccgtcctgaaaaccaaaccgttttgctttgtatcagaattcttttttatctaacaattttttcatgtctcagatacatcctaatccatataaattacccagcaacaaatgtaagacatgaaatgtccattacctaatggaattgttcccatgattttcttttccatgtcttctccaagctctgcagtcatgtcagatgcaatgaatccggggcaaaccacattgacctggaatagagcaaattgtcaacggaccaagtttcaaaatcatgtccaggaaggaagttttttttaaaaagacgtatatgatgagggagaaaggtcacatacatttatattcctgctcgcaccttctctggcagcagtcttggaaaatgaaataactccacctttagccgctgcgtagtttgcttgaccaatattaccaatgagaccaacaactgacgagatattgatgattcttccctgccattattttaggcaaagtataccataaattatgcttggcctaatatcacttcttaatcttatagaagagctccaaaaaaaaaacatagttgtctttttatatatcattactcgttatgctacagggaaggagtaacttgtcaaaaccaatgacaaacgtgtaaggatatagacggtgttaccgcatatgacaagtaataatatgtggggacaattgcgagaatatgtagaaagtgatacctttttcttcttcatcatgatctttacggctgcctaaagagagtaaacgagtatcagtccctgagaatccgagtatcaaaattttagcaggattgaaggaatacaaacctgagtacagagaaatacaccagtgagattcaaagcaatcacttcgtcccattgtgattgcttcattcgtattaacaaggtatcccgagtaattcctgaaaatatgtagccacgtcagtaaggtactaagtaaaactcaatgggaaccaaggttttcatttacctgcattgttaaccacaacatcaatggttccccatttgtcaagagcctgcagaanaataacaaaaggaaaatgaanagatgtataaggattagggaatataagatggtgtacagttgatcactcacggttt

SEQ ID NO: 5779 - DNA, 527 bp, Arabidopsis thaliana landsberg
acttcctcgtgaaccacttccatagaaactcgtgagcttcctccagatctttgtgcactacttccacttctagcggttgaccaaaaatttggcctacctcgttgttgccttctagcagcagaattttggaatatttcatcatcatcaatggtaacacgatacacttcttcttcttcttgcgtttcaggaacctcggtttgtggcatgttaccactgtcactatctgagtaatcttcaccttcttcatcaagtccatgctcgtggatcaattgttctcttctttgacgagcagaatgttgagattgtgattgaacatcatgtactacgagacatcgttgcatcacgtaccaaaatacaggcggttttcggttcatgctttttgttaatttgcatccctgtaattttaaaataatttagatacgtgataccaaaattttgaattataattgattaatacaaatatttgatgtacttacaaactcttgttcagtccaccatgcgtcagatgcatttatgaaagatgtatc

SEQ ID NO: 5780 - DNA, 1749 bp, Arabidopsis thaliana landsberg
aaccacaaccacaagtttgaagaaataagaaacagagtaataatatatcaaataaaatttcatggctgatggaatcttttttctaattgtaggtccaaaaaagcctaaattaatggggaaacaaaaaccaaaattcaatagtaattttactaattatgtcttggttaaatagagtaaaaagaaaattaatcacaaacctccaaaaatcaactaattgagatcaaaacacgtgtcgcatgccaatagggcggtggatcacatggtaaaaaaattcactttaatttttgtctttcttcataattcatctcacagatttcaacttcttttttggattctctcaccgtacaccgacggcgtaccactccccttccacaccgtcggcattaaaaatctcaaaccctaaaacccgtatccaataacccacccggccaaccggttattcaaacccggtcaatccaaaattcgcctcggaatccaaacctccatacccaatctaacatggaaaaacctccaatcacaaacctccacgtggtgatcactcattggctcttattctggaatccaagaggacctttttagtataaagagccccttcgttggtcctatcaccttctctctctcacacactaacagaaagcacaaaaaacagagacaaaagaatggcgcgaaaatccctaattttcccggtgattttgctcgccgttcttctcttctctccgccgatttactccgccggtcacgattaccgcgacgctctccgtaaaagcattctcttcttcgaaggtcaacgttccggtaaactccctccagatcaacgcttaaaatggcgccgtgactcagcattacgcgacggttcctccgccggcgtaagtctactctactaacatacatttcaaacttctccttcttctaatctctaacttttccgacgatatttcaaaaatctcaggttgacttatccggtggttactacgacgccggagacaacatcaagttcggttttccgatggcgttcacaacaacgatgctttcatggagtataatcgatttcggtaaaaccatgggacctgagcttagaaacgccgtgaaagctgttaaatggggaacagattacctccttaaagcaacggcgattcccggagtagtcttcgtccaagtcggagacgcttactccgatcataactgttgggaaaggcctgaagatatggacactctccgtactgtttacaaaatcgatagagctcatcctggttctgacgtcgctggtgaaaccgcagccgctttagccgccgcttcaatcgtttttagaaaacgcgatcctgcttattccagacttctacttgaccgtgccactagggtacgttactctgttttcacactttaaccattagcattaactgtggtaattaattttaattattacaaacattttaatattctctttgtttttctttaatagtcaaatttaatagtcaaaaagattttaatttttaatcaattattctttgcttgtgagataagagattcgtgtccatatgcatttataataattgttttatttcagtacttttttgggtgatggttggttcatttctatgattcgtttttaataatttgacttttttgagtatatttattcttacgtatatgtactcctgaatccctatttttactgacgtagagaagaaatataaaattcacggatctgaaataaaaatgttgtaccgttgctcgcaggtatttgggttt

SEQ ID NO: 5781 - DNA, 711 bp, Arabidopsis thaliana landsberg
acatgcatggattcttaccaaactaaaacgtattgattacttaccaaatgacccaaaatacgtacgggaaccagaagttgtagcatatattatgtgcctataaatatgaaccctaaagccctcaaaactacatatcaaaacaacgaaatctcaccaagtcctaataatttttaggaaaatgaaagcttcgatttaccttgtaaccgttttcatacttctacttctgcttctaccaacggcgatccctcacgactactccgatgctcttagaaagtcaatcctctttttcgaaggtcaacgctctggtcgtcttccaaaacaacaaaggatggcgtggcgtagaaactctgcactcaacgacggaaaaaacctcaaaaccgacctcgttggtggttactacgacgccggggacaacgttaagtttcattttccgatggcttttacggccaccatgcttgcttggagttctgttgacttcggacgctatatgtctcagcatgatttcagacataatctcgtagccctcaagtgggccactgattatctccttaagaccgtttcacaactccctaatcgcattttcgtccacgtacgtctaaactcttaacccgtcgtcgttttatttagtgtaatcgtgcatttggttttcaccatctatggacacaatagttatagtaaaaaatatatatttttgtatattcaccaatacat

SEQ ID NO: 5782 - DNA, 574 bp, Arabidopsis thaliana landsberg
tctctcccaacattgatgatccggtgttggttcccctacctagatatcattatttaagattataaatcaaattctcaatatatatgcatcagtttaactcttatgaatattatagcctcgttaaataaattagttaattactaacaagtaaaaacaaacaaaaaataagtaacaatattgagatggaaaaaaaaacaagataataattgtttgtgatatgaacaaatacattacgaatctaagatctaaagtaaaatttgtgagaactagatgtatgtgtaaaagacacacaaatacaatcgttgttaactatcctaagctataaatacatgtataataaaagacaagagcttattgacgtatagtcaccgtacttggacgaagatgcgattagggagttgggaaacggtcttgaggagataattgctgccccaccggagagcgacgagattgtcccggagatcagccggagacatgtaacttccgaagtcgatagcgctccacgcaagcatcgtagtcgtaaaagccatcggaaaatggaatttaatgttgtctccggcgtcgtagtaaccac

SEQ ID NO: 5783 - DNA, 885 bp, Arabidopsis thaliana landsberg
gtattgatcgaggtaaaagtacgcatcaagagatatatatttatgtatgggaaatttttcaagtaaaggaaaacacatctttaaacctttgagtaatatttttaatggtacttacttattttttttaggtataatttataccgtataaacaatggcaaggtacataaaagaattttataatgatttattcttatgcaatttacgttttcatgatacaaatttcttttgttttaccgttgtttatctttatgtcttaaagtatttatataattaataaaaattaaaagaatacatattataattataatatgtatttttaaaaaataaaataatatgtatttatattcaaacagaaaattatttattgcagatatggttttatttgtggtaatttagatgatgttttataagactcgataatatttttatcgctttcattcgttttttttttttgccaagtttacatatcctctttatctatagatcaaatttggaaaagaaaaactcgccaatatatccatttaaactaggacaaaaaaaacgatttaacagagaacaaaaagttcttgattgtgataaatcatggtgaggaaagtttagatataaaaatatacaaggagttaaaacatgcgggaaagtttccatagaaaaaaatcgaataaaagtttatatatatgcatcgtcttatttagtcatctctcataaaccctaaaagagaaaacaatgaagccattggtttgctcgtttatagttatcctcctcatcctcctaccaacgacgatttctcacgactactccgatgctctcacaaagtcaatcctcttcttcgaaggtcaacgatctggatatctcccaagagaacagaggatgacgtggcgccacaac

SEQ ID NO: 5784 - DNA, 764 bp, Arabidopsis thaliana landsberg
tatgactcacaagtagtgtctccatttcccaaatcagctccacctttctctgatagggtacaaagagattactatgaatatatagagacatatatccaacatacctctgatatggatttgtaagcaaatatatgtatatatatagcaaccatgcaagcgacaaacctgggaatcggtgagtgaagctatcccaaacgttaagtccacggcctctaccgccttccacctgaaatgaaaagaaataaccatgcaacgttggattttaattagtgtttggatggtttttctatacgtcaaatatggaaacacaatgggtgatttgtaacatgcctggtaagcagaagatgcaacaccgaagatgaagcctttttcgaaattgccactgttgaaaagtttagtttggttacatgtgaatggctcgttctcttcacaaacaaactcgtcacctttacaagtcgccaaagctaatagaaaaacaaaggcgagcataagaagcttcatggtttattagtagtgtgtatgtttttgtgttgcatggaagcctagtgccaatctagggtttatatagcctttgttagagaagagtgacgtatacattaccttgtcttagcgtcatgatattttgggaggttaaggtgacatgaatcccgtgggattgcttactctacctgaatgtaacaattttttaattttaaatgtttgtttacacttttcggactgctttgcttttcaattgatcattttaatgtgttgcaatctattac

SEQ ID NO: 5785 - DNA, 885 bp, Arabidopsis thaliana landsberg
ctaacatcatgatctcatggttcaagaaaccttcatattcatcttgcagaacttgaggaaggtcccaatggaagagggtaacaaaaggagttatattctttgctaggaggccatctatgagatcgttatagtacttaacacctgcttggttgattcccctcttcacctttcctcctgctcatatagatcgtagatttatttttacgacaaacaatatatattcatatatacatgcatggattaatgtgtacatacttggagcgattcttgaccaagcaagcgagaatctatagccgtcaaccccgagttcggtcataacgtctatatctttctgtagtaatacaaataatcacatgtaaattccacacgtagttgataaaaattcagtgactaaattcagtaattccacacgtattaacctgccagtgctcatatgatccacaagtgctgtctccattccctaaatcgggtcctcctttctctggtagcgtacaaagacattactatgaatgtatagagagataacgtaccgacacttctctcgtataaatatgtaagcctttatatatcaaccatgcaaacgacaaacctggatatcggtgagtgaagccatcccaaacgttaaggccacggccttttccaccttctatctgaagtgaaacaaaacaaccatgcaacgttggaatttagtgttagtgaattgttttttacgtcaaaattgggagaatatgtgatctgttgcatgcctggtaagcagaagatgcaacaccgaagatgaaatcatcatcgaaatgttttctgttgaaacgatcagtttggttacatgtgaatggcttggtctcttcgcacgtaatctcttcagctttgcaagtctccactgctaat

SEQ ID NO: 5786 - DNA, 565 bp, Arabidopsis thaliana landsberg
tgttgcttatggatctcgagtcggcttagttcgccttcgtcgcttggtgttactactttgtcgaacatgggggctctggccattgatgaagaagcttcttcaataggcttctctttatcttcttgattcatcttcttacaatctcagatctctcaagattttgactccctcaccatacgatttgagagtaattcgataaaaccttttttggtagacaagaaagagagaggaggagataaaaaaaaccctaatttcagaaggaagagaattgagtatgggggtggatgagattgacctaattatacaaaaatggcaagtgggtttttgcctaacttcactgattagcacgattctctctttgaagctttctctctctactgtttatggaacaagaagctcttcaattccaagaaaggaaaaacaagttaggatcaatctctaagaacaaggaaggagaccagagatagataaggagagagagagagagctcatgtaacataagattgatagagatatgggtcgagaggaaagaatatagaggtgagaggggggcccatgaacaatc

SEQ ID NO: 5787 - DNA, 718 bp, Arabidopsis thaliana landsberg
acctacgggagttatgtcacctaaaccttcggaaaataataagcacaatgtaatgcataggtcagtactcttctttacaaaggctatataaaccctagattggcataaggcttccatgcaacacaacacatacatctacatattaaccatgaagcttcttgggttcgccttagctattctattagttgtggcgacttgcaaacctgaagaagagattacttgcgaagagaacgttccattcacatgtagccaaacagatcgtttcaacaaacaagatttcgaaagcgacttcatcttcggtgttgcatcttctgcttaccaggcatgtaacaaaagtacacattgtattgccagaccgaaatgatttaacgtcaaaactctaaaatccaacgttgcatggttgtttcttttcatttcagatcgaaggcggcagaggtcgtggacttaacgtttgggatggcttcactcaccgatacccaggtttgtcatttgcatgattcctataaattaagttttacgtatccatatgattttttttttgtccaaatgacgtatcatattacgtatccatatgatatgaaatatttcttatgtatatatgtctctatacattcatagtaatgtcattatatacgtacgctatcagagaaaggtggagccgatttgggcaatggaaacactacttgtgactcataccggacttggcaagtttatttct

SEQ ID NO: 5788 - DNA, 1712 bp, Arabidopsis thaliana landsberg
tccagctcttgactatgttgacatccctcacactcagatacgaaaggcaaatacctatacaaccttatatattgattgcttgaggtatttctagattacctcgaccatatatctctctgttttgtactataagccaagaattccgaagtcttgttaattgtataaatttgacaggtcacagcctcacgtttggcattctcaaagcaaactattcctcactactacttgaccgtggatacatgtgttgacaaaatgatggggtaagtattaagttttagatcatatattttgattaggtaagtggatgctaaacatagctatttttatatgcagtcttaggagtcaactcaattcatttcaagaggcttccggtgggaaaaggatatctgtaaatgatcttgctattaaggtgcatcttacttcttttcttgcaagtctaattaaatctcattttgttctccattatgaaaccttttctttttcgaaattgcaggctgctgcactggctcttcgaaaagttcctcagtgcaatagttcatggacagatgaatacatccgccagtaagtacatattctgtttcagaggttcatgaaaactttgcaaatcatctagtttcttggttcttattttcctccttttatgtacagatttaaaaatgtgaacatcaatgtcgctgtacaaacagaaaatgggctctacgttcctgtggtcaaggttagggagctcttgatacagttattaaccttcctctgcagaaacttgagatttctgaaaaactcagttcatctaattgcttgatttcaggacgcggacaagaaaggactgtctacaattggagaagaggttcgattcttggctcaaaaagcaaaagaaaacagcttgaagccggaagattatgaggttggtttagaattcggtcaatctcactagcataatactgctgtgaaagcaaatcagctcaaactgtttcttctgacagggaggaacattcacagtctccaacctggggggaccttttggcatcaaacagttctgtgccgtcatcaatccacctcaagcagccattctagcaatcggatctggtaagtccttagcatactcatccactttatccgttgaagtttcttccgcgtaacttattatagtgttggtgtctgaatctcaaaacagctgaaaagagagttgttcccggtactggtccagaccaatacaacgttgcttcatacatgtctgtaacactaagctgtgaccaccgcgtaatagatggtacagaatccgcctctcattcctattgtcattattaatcatcacctcatcgaaaacgtctaataagtcatcttcctgtgcaggtgcaattggagccgagtggctgaaagcattcaagggctacatcgagaccccagaatctatgttgctctaaaattcagacgcacacacacatcaaaagctaaactcataagagtcttctgacctcaaatttctttcccacaacatattctaccagatttgatcagcagtaggcaatggcctttaaagttgagtgttttgctattctctaaatcattgagttgacagatttttgtctcaaaataaaatcaggaatccaacaatttcactgtgcaacttgtttttggcttaatgcttgttcatcatggggttggcaaaataaaacccattaacttaattttattaatcaactccaataaatatc

SEQ ID NO: 5789 - DNA, 1300 bp, Arabidopsis thaliana landsberg
cttcctctctctctctctctcttctctaatctaatctaatcaaatttctcttttttaggaagagaagtttcctcctgcgactttgttctttctcaatatgaatcccggaaaatcgggaacctctagcgatttcagctaatctttacttaccttttctttagttctgacaagaagtagcaatacccttttggagattcgatcgtattcgctgtttttttttgtgtgttttagctgtcttcgtgtctctgctactttgtgtttgatcatggagagatctgattctagagatttctacaacttcgctaagacttcttctggtcagttctctttcttgttcagctctttttgttttcaaatctaataaaagtgtttttattttgtgattcttcagtttgctaaagcttctttctttgatctgagatgtgaatgatttgatttgcttctgatttgtgaaaactttaagagaaacatactttttgtttcatgcttgttatgtttgatttatcttccttgttacagtatttgattcgttttttttttaagttttgtagtaacctataagatttactaatttgatttttgaagttgtatgaaatgattgaaatgtcacagatttgtttacaaaagctttagttttacttaaattttctggtcaactgattgtcacttacctcatgtgtttgatgaaactggatcttattgtctttgtgcagataacaatagtgcactctttgacgcatctcaatatgagttctttggtcaaagtcttgaagaagtcgaattgggtggtcttgatgatgatggtactgttcgtggacatgttgatgatgaagagtatcacttgtttgataaaagagaggtaatttggactgagtctgttcttggcaatatttgatgctaattatatatgagataaatggaagataaaacaaaacatttacttctggtttcagggtgctggtttaggatcattatctgacatggatgatcttgccacaacttttgcaaaggttagcatattgtaaattccgaattatgactttaaataattctgtttctactaatatcattttgttaccatttttcatcgtctctcttgagacaaatgatctgtctttctcagcttcttattattacttgttctctactttaacttatcttattatttggtcttaatcttgtgcagctgaacagaaatgttaccgggcccaaacaccttggagtaattggtgacagaggatcagggtccttttcagagaaagagggttttggttactgctactaatcctgttctctatgg

SEQ ID NO: 5790 - DNA, 1311 bp, Arabidopsis thaliana landsberg
gtcagccttttttgttgttcaccttatttccttcaatacatttccattttatggtgattagtctgcgttagtgatcgataaaccactaaacaattttttctcgctctgctcttttacttaaagaaaaagaaaactacaaacgaagtaatggatcgtctaatatattatttaagccaaaggaggagacaagttctattttagatcaccgacatcaagactgatcaatatccatatgcaacccatattgtcatattgcacgaatcatacaaaacaaacaattaagaacatgatataataatatttctatgattcaaaagaaatgtttctacatataaatgctcattaaaaataataataacgtgaacatgaacgacacattggccgactaacttagacaaaggcggcatgggctcacgtgaagccgacctttctaaaaaatctccaagccctttaaaagattcaaccatcccctaaacctctctctctcactccaatttctttcattaccatataaatacaaagccttcacatttgcactctttatacatttctctcgagagcagaaacagagtcaccggtaaactcatctccggcgacataaaaacacaaaagttcatatatttagattctggtgactctctgctctaatgggtcaatctcaagtttctctctttcttcttctaattcttgttttcatctatggagtttcctccaccactttcaccatcgttaaccagtgtagctacaccgtctggcctggacttctctccggcgccggaacctctcctttacctacaaccggattctccttaaaccctaccgagacacgtgttatcccgatccccgcagcttggtccggtcgtatttggggtcgtactctctgcacacaagacgcaaccaccggaagattcacttgcatcaccggggactgtggttcttccaccgtagaatgctccggatccggtgctgcaccaccagcaacactcgctgaattcacactagacggatctaacggactcgatttctacgacgtcagtctcgtcgacggttacaacatcccaatgacgatcgtccctaacggcggagctatcggagtcggtaagtgtaacgcaacgggttgcgcggcggatctcaacggcttatgtccggagcagctgaaagtaacggttgaagcggctggaacggctgctgtggcgtgcaagagcgcttgtgaggcgtttggaacgccggagttttgatgtaacggcgcgtttggaacgccggacacgtgtcagccgagtgagtactctgtttcttaagaaaactgtccgc

SEQ ID NO: 5791 - DNA, 648 bp, Arabidopsis thaliana landsberg
ttgatattaggatccacagtccatttgtggaaatgttaattgaaattatttggataatgtcatttttttttgctttcaaataggtaattgctattacagttgaagatgaagaggacattggaaagttcaaagattacaccccatcatctactgctgatgccgctcctacaaaagcagaaccaactcctgccccaccaaaggaagagaaggtcaaacagccatcatcgcctcctgaaccgaaggcctccaagcctagcacacctcccacaggagatcgtgtttttgctagtcctcttgcaagaaagttggctgaagataataacgttagtttcacagtgttctaaatattctgttttttcttattattcctgcttaatttttcttcttgtttactttatttaaaaaaacatcaggtgcctctctcagacatcgaaggcacaggtcctgaaggacggatagtgaaggcagatatcgatgagtatttaggtataagtaactccatgactcgtcctttcctttctttttctttcagacctttcttgcctctgtttacagttatcactcatccttgtgtcgtaatacatcttccaatggtgcagcttcaagtggtaaaggagctactgcgaagccatctaagtcaactgattt

SEQ ID NO: 5792 - DNA, 540 bp, Arabidopsis thaliana landsberg
tattgggatgtactcttgtagcatttggtgtaatcgtcagtgtagcaaggttcgccagcttaattattttgcttgatactatttaagtgacttggtttcttctttccttttgttagacttctcaatcgacacaacgtaaccagttttaacaaatttcatccatgttgagtttatatactactttctcatccatgttcagtgggtcgggtgccgctcattcatttaaagatacaggaatactttggagtcttcttatggtgttttcttttctgcttcaaggagcagatacagtaatgaaggtttgtcaatcattttctaattaggtcgccaacttcaagatgttgggctcttctctttaacgggacatttcatatccttgcaggaagtcatctttctagatagcaaaaagcgattgaaggtaattataccgcggaaccctttaacaacattcgcgagtgttggattctgaaagaaatctgttcttattattacagggtgcttcactagatttgtttgttgtaaactcatatggttcaattt

SEQ ID NO: 5793 - DNA, 2358 bp, Arabidopsis thaliana landsberg
  unsure (1)..(2358): unsure at all n locations
ctatttcttgaagaaggtaatccatttactgttatactagtagaattgtaactttttcgttctaacattctttttgttgcagataacaaaccagtcgaagttctcccatccagcgagccaccaagaggcttactgtcactacttcaaggtgcagataaattgcaaacatttgacacaaaagcaaatcccgacctttcaacggattttccttttcaaggccatgccactaaaagaactgatcagttaagcagcacttccacaactaaatcagtaacagctgttccacctgttctcacttgtgaagaccttgagcagtctattctgtcagaagtcggtgacagctatcatccacctccaccgccagttgaccaagacacgagtgttccttcagtaaaaatgaccaaacaacggaaaacatctgttgatgaccaggcttcgcagcaccttctttctttattacagagaagtgcagacccaaaaagtcaagatacgcaacttctttcagcttcagagaggagaccaccaccaccatctatgaaaacaactacaccaccaccatctgtgaaatcaactacagctggagaagcagatccagggaagtctttgactcttgagaatatatctgggagtgccttcatgaacgaactggagtcgattggagaacctgtctctggaagagctatggtttctgatgctccaggggtcccgcttggatcagaaaggtcaatnggagaactgagccaaagaaaccaaatcagacctgacggtccccccggaggggtactagccccttccagaagatggtaacttacttgcagttggcggtgcatgcaaacccatcaaaatacatgtcttttccaggatctcataatcaagagcctgaagtagctttcaacatctctgacaagttagctgccttgaactctggtccaaggaacgaaagaccaacaatgggtggtcaagatggtctttttctccaccaacatccccaacaatacgtgaccaacccctcgtctcacttgaatggttcaggcccagtattccatccgttcgattcacaacatgctcatgtaaaaccttagctcgatttcatgggaccaggaagcactatgtctcaacatcatgaccctccaccaaatcaccggtttccaccaaacatgattcaccgtccacctttccatcatacaccaaccagtggacatcccgagtttgatcgtcttcctccacatatgatgcagaagatgcatatgcaagacaacctgcaacatcatcatctaatgcaaggattccccggtagtggtccacaaccccatcactctcctcatgtaaacaaccagatgccgggtctcattcctgagttaaacccgtcacaaggctttccctttgcccatcgccagcccaactacggtatgccaccaccaggtataacataactgaacatatgactttcactcattttgggcctcagatcaagatcttgtttggacttgagtcggctgctctagggagccaggtattaatatcggctaatgtagggactagttgattctgagtttgctctttgttttctttggctttttaaggttctcaagtcaacagaggagagcatccagcttcactgcagacactcttggggattcagcagaggatggacccagccaaacagataccggcagtgggtcaagccggtggtcctaatcgtcaaggctctgtgggtcatgaactcgaccttgggtttggctacaggtaactttgctctggccacaatcctttttaacaccctaagaggtgtgtctacctaacagtgagttgctttgtgatgtgcaagtaatcaaaattaccatttgtgatattttttttaagatcaaaaaaaaaaagaaaaaaaaaatatatactttgtctctatggactctcgtttctcttggtgcttgtgatatggggatgcttttaattaacagtagttgattttcttctatgaacgctggagtccctggtatttgcatattctattttaggctttttggttttttgaaaccagagttcaagtctgaaggggtctctgtcgaaaggtaacacagatggcgtgtggtaacaaagttaacaaaatcttgcaattttgcatcggcccataaagcccaacaaatatttagcctaacgtgtcgtcttctttctttaaacgccgggatccgtaaaccctacgttagtccatctgtatcaatgaaaagcaagagaaagccgacgaagaagaagaagacgccgacgccgcaatgaacattaattccgtcgcttcctatactgaaaacaccagagctttgcaagttcaggtcactcttgggacacacggagagttgtctttat

SEQ ID NO: 5794 - DNA, 4249 bp, Arabidopsis thaliana landsberg
tcgacttgcattaaaactgtcccccagaccattcctgatgcatcagtcctctacaacgaacactttaccaaagtcgggtagtgctaaaactggtgcagtagacatagctctcttcaatgcatcaaaagcttcttgggctgactcactccacacaaagctgtctttctttaacaactcagttaaaggtctggttagagttccatacccttttaaaaaccttcggtaatagcctgttaatcccaaaaatcctcgtagttctttcacagactgaggcgtcacccacttagtcatagctactgtcttagaaggatctgttgaaacgccttgctgtgatatgatatggcctaaataatcgatcttggcttgaccaaatgaacacttctttctgttagcatagaactggtgctcctccaaaaccttcaacaccattgccaaatgttcctcatgttcttgctcattgcgactatagatgagtatatcatcaaaaaacaccaacacgaattttcggagaaatggtcgcaacatgtcattcattgatgactgaaatgtggcaggagcatttgacaatccaaatggcattactaaaaattcgaagtgtccatcatgtgtcctaaaagtcgtcttttcaatgtcttcaactttcattcgaatctgatggtagcctgctcttaaatccaatttagagaaaatgatggctccatgcaattcatccaaaagctgatctatcatgggaattggaaacttatttggtattgtggctctgtttaaagccctgtaatccacacaaaacctccaactctgatctttcttcttaaccaataacacgggactagaaaaaggacttttgtttgctcggataataccgttatcaagcatttctgaaactaaaccttccataagcttctttatgagcgtgtggatatctgtaaggcctcacacttatagctcgagtcccaggtaaaagggaaatagcatgctcattacctttgataggtggtaatccttttaggttctgagaacacattctcaaactgttgcaggattttttcagttccacttgtgaacattgaaggattttgtggtaacacctgatggctgttcaagctgacttccagctctttgttctgcagcctgaattttgtaaagaaagacttaagagacattttaaaggtatccaactccggatcacctcttaaagtcactgtcctcccatgatacaaaaaggacaactcatgcctctcccaattgaccttacaatctcctaaagttctcattcatgcaattcccaatatcacatcaactggaccaagatccaaggtgataaaatgtgttgtcaactccaattcctgcccacaaccaactggtagagtcatcgtcactttatcacacaagcctaaaccttgcacagtgattcctgtacccaatcttatatgaaagttagggaaataaaattgtgtgtggcaccactgtccaacatgacaacaacctctcctttacaaatagatcctttcatcttaattgttgtataagatggcaaacccatgtatgatgaaaacgataattctgcaaattgagcaactgaatcatggaattcttcttccacgctattactctctaaaacttccatttcaaatccattaatcactgttagtacccgcagctccttattgggacacttgtgttctttggaccaaggtccatcacatctaaaacaaatccctttccttctcttttcatccaattctgcactggatgccgtctagtctctgatcatttcttccaattggtttgtcactaccatgatttgactcagtcattacagacttcatcttccagttgtttgtagctggtgtataagaactcttgtactcagaccaatgtggatctttattctctttacttaccaactgcaattccttttgcaccactcttctcatcacactcgtctccatagaacgtgccacagccaccatttcaggcagattctgtggtttatgcatgtgtaccagttcctgcatttcacctgtcaggccattcaagaatataccttccaatttctgatcatctaagcctccaacctgtgatgacagatcctcaaacctctgcacatattcagccactgaaccagtctgtttgatgcaaaacaaactctgactaggccctctcagcttcaaattcccgaaccttaacatcaatcctgatttcaacttcaaccaactcacaaaatccccacgactgatagcccaattgtaccaactcaaagcctcgccactgacgctaactgataccaaggctaattgttcagcctcattgtaacctcctgaacgaaaaaacctctcgactctcgcaatccacccatatatcccagatccatcaaacattggcatttctacattcttaagtagattctcgcgaattctaggtctaatcacaccacgacaaggttccagttgagaaacacgtacctggttcctatgatcttgcgatcttggaggaagagtttgacttgtaccacccacttcttgcaccgttgcaatacctggcatcgaattgagtaagagctccaacttcctctcaatcgctccgaattttagatcttgcgaacccattttgtcatccaacgacccaatcttggaatctagggttgataatcttgcatcagaacttctgattttacctcccaaatccccaatctgatcgtacacatccgccaacgaagccgcgtgctcctccgcctgagaaatttcacaaaccggagataaacttgattccatcaccattgcaactactatcgtcttcttcgatcgaacaaaaattcccaaacttcagcgttagattcaatccgagatcacgaacgcaccatttgataacaagaaaactgtaaatcttattatccgaaagagtcaatacaatttgtttgatacaaagagctctagaacacaaatctagatcattactctcacaaacccagacacatacgtcacaggcagttacaaacaaaatgcataaatcttctaaagaaagctaagtctcgatatatacacttcacacgtgtgacgtcttcttcagcgcacgtgctcctcagcaccatcttcattcgcacgtgcttcacgcctcttcctccttgtatacactattaagggcttgtcatcttctttgtcatcatatataaccttcgattagtgacgaagaggacctgcaatttctggcttaattctttcatcatttttttctggttttgatattagtagaaacgcttatatatttttgtttgcgtgatatggacagtaacatactttagttcggttggtttagagtttttagctctttcccacaggtgcatggttcaaatccgatagtaggatgatttttgtatttttgtttttaatacgaaaacgatgtcgtttactgtttgacggaagatgttgatgttgactttgtaccgttaaattgatctgttaattgactatacaatatatcttatttggtaaagtcaacaaaaattagtgatttaattgaaaagtcaactaaaattgatgattttattcaccataagtaaagttgatgatttgtttcaccacttttggcgaaataatgattttaatgacgtttttcctgtttttatttatacaaaatacgaacgttattaatattaggaaatattaggcaagaaaacactttttaaaaacttaatttggtaatagagcattttaggaggagtatgtatttttaaaagttttttttatcataaattcctcaaaagttagttaatcatagttagtttcatatggtttgggaataaaatattattttttgcagttttcctaaagtaaaacgacacgaccaattattcgtcactttgacctaaaagtgaaattatcctggcgactgtgttgaaataaacctccgtatccgttctcaatccgtaattcttctcccgtaaatcatattcgtcttcctagttatccaaaaagtgcccatctaaattccgatcatttccctccgtgaacttataacaaacgggcgacattaaaatccctcatttttacttttcccgctggtcagtaatcaatgacaggtaatcgttttctgttttttttgttctattaccaaaaacagttatcttcttgttttatccatttttgttctaaaatttccttaccaattaagtaataatctcttcacaaattgtccctttgattgcaggcgcggtcgaagatgatataattgacaacgatactcgtctgct

SEQ ID NO: 5795 - DNA, 224 bp, Arabidopsis thaliana landsberg
taaactacaatacttggtaaatatcaatctaaactcactaaaattcaaatttccagcctaatttatataaaaatagctaaaatcaacatatgccgaaacggtgttaattaaccacttaagacgataagttagttaaccacttaagacgatgagtcaaccagtattgtggcaatgacggagcatcgaagtggagtaaaacaatgttgtttcgtgagtttctgata

SEQ ID NO: 5796 - DNA, 776 bp, Arabidopsis thaliana landsberg
gagctcaaactcagtaacaacaaactagctggtcagcttcctctatgtttaactagcttgactggacttcgagttcttgatctttcatcaaatcaattgactgggaacgtaccctctgctctcgctaaccttgaatgccttgagtacctatcactgtttggtaacaacttcgaatgttttcttttcacttggtttactcgccaacctctcaaaacttaaggtgctcagacttgattcacaatccaactcacttgaagtagagtttgaaacgtcttggaagccaaaattccaattggtagttattgcgctacgatcttgcaacttggagaaggttcctcattttctcctacatcaaaaggatttgcatcacgttgatctctctgacaatcaaattcatggaaattttccttcttggctgttggagaacaatacgaaactcgaggttttgcttctacagaataattcttttacgagctttcagctaccgaaatctgctcataacctgcttttcctgaacgtgtcagtcaacaaattcaatcatctctttcctcagaactttgggtggatactccctcatttagtctgtgtgaatttagcctataatggttttcaaggaaatctgccatcttctctggataacatgaagagtattgaatttctagatttgtctcacaacaggttccacgggaagctaccaagaagatttttaaagggttgttaataacttaacaatcttgaagctgtcacacaacaaactaagtggagaggtctttcca

SEQ ID NO: 5797 - DNA, 2719 bp, Arabidopsis thaliana landsberg
agaagattaacaaataagaatatgtttaatgtattcacatattgttttcaaatatttacatttcttttttatttctatattttttttcttattcatatgttgtttttcaaaattttacatttctattcttttgcatatataattttattttctttcataaatatcttactatatatgcaatgatacaggtcctagttgatggtttcaaacctctaataatggagacgatgattgacttcccagatggaagtgaagctctcgtaacacttacctataagaagctgagaagacactttcattactgcttcagactctcccatgaggaaaaagattgccttgaaaaaccaatatcaaaggagccttatcgacagcctatagcacttgttaagccaaaagagcatgctgcaaattcaaactacactaaccagtcttctcaaagaaaagtgaaggagattcaaaaacattatcatactccctcaggaagacctaatgtgatgtgataatgggaagcttggatcatggagctaaggagcagcttgaacccgaggagtttggagaaaggacgcagcttgaggatggagagcttggagctaaagaggatgaagcattgcatgttcttgaaggtccaataacaagatcaaagacaaaggtactaaatcaagctatcaccacacttctacaaaagattgagggcagccttaaacaaaaatcttgtcaaaccactttggttgtgattcaagccgtttaagcaaacaacaatggaggtgtgtgacttgcactctttttccctcctcttggttctgtcccaatgggttttccaagagaggtttttaatgagtcaagcccacacactcttatcatggcccattgttggttttgaagtccattagcaaaggagaaacccaaatttcgtgtttgtatgtttatttctctaggatgactcttcctcttctctagggctcctcttcttctctatatatattctattctcttcttctttgtaagactcatcaaactttttattatcaaaaccttttctaattgtttaatctgaagagtgtgtaatatctcttcaacttgtgattgctttggtgcgtaatatcctagcaagttcgagcccgaaagttcaagagtctttccgcaactcttgaaagtttctcttcatccattttcagttcgttttcatcatcattttatcttcaacccttcaacttccccacagatccattcattcaccatatcatcttcacaatccatataaagagacttcaagggactggatcttaacacccaaggtcatatcataattgagtccttgaactcatcttattcatcaaagagaacgtactcaacaagagaggaagttgaaaggagtcaggctgaatggaaataacgagagtacagaacaacaagtatcaaagaaggctactcaaatagagagcgaacttctggtgttggttctacggacctcagagataggcttcaaaattcaacaagttttgtaagaagttcccaaaaccagcagctccaatggcgtgaaaagatgcattcaagagacaattttaggcaagattcctttgaaacttctagaacaaaaagaccacctctggaaaaggagtttgaaaaaacggcgttagctctcactgacaagtcaccatttaccacagaacaagtaataggagaattaagggaagcaacagtccagtataccagctgttcggacccgatagagagtgctgccataaaacaaagagttattcaaggggaagcaagaggattaatgccaaaaatgctgctaaaattatagcggctgctacctgtaatagccagaagatcccttccctctagagcaatctgttataatgcgtatttcaagtcagattaatggaataacagatatgatacccaacgatgaaactcccattactgcgcccctggtggaaaagaaaaaaaagaggacgtccacctctaaataaggccattgcaaaaaatatttcaaagcttacaggggccaaatcaagtaaaagaaacatggtgatagtccaaaactcaccaacgaagagaactacatcggggaaaagcatcacccctagcagagaaaatggttatggtaacagagagatcccaagagaacatccatacaagtctccaactgaagcaagcagctcaagaaaccaaaatcgtcaaagggcaggaacatccagggcctactcacaggcgggaccttaaacaaggattgtgcctgcaataaagaaaggaagagtggattttcacaatccaccatctcctcttccttaaaaatcctgagttggaactgttgtgggttggggaatcccacaacaagcaaacggattagtgagatccactccaccatctcaccagatatcctattcctcatggagactaagaaccctgacgataaagttgaaaaagttttgactggattaagctatccctctcaccacaatgtatctcctcacagtccaggaggaggaggtcttgcactgttttggaaaaaagaggtggaagtcacaatccttactacttgtcagaactttattgatacaaagatcaaacacgcagggaaatctttttattcaacatgtctttatggtgaacccgatagatctaaaagaaaggttatttgggagcaattaactgagcgaggcctatcaagaaaagagccatggttcctgacaggggattttaatgacatcat

SEQ ID NO: 5798 - DNA, 937 bp, Arabidopsis thaliana landsberg
  unsure (1)..(937): unsure at all n locations
tttttaaaaccaaagaacgaaaaagaattattgagatgaanccgctaactcgttgactataggactattagggagggggtgacttttgcatgtcaaagcagaaacaaatcaatatccctattcttaattactagttcattgctagcctaatatacatgattaggtagctaatcaatatttatcatgattccatatttccatggaccctctaatttttgctacatcttattttacttagaattcccaactatagtttaaatgaaacgttgattattaacgattatatatatataattaaatactaatcatctttcttagcccaaaaattgtttgcaagcgacaaataaacggaacttttggtctaacaaaagaagactgatgaaaatctcgacccacgcgctgctggtcctcctattttttcatttatgcaaaaaaaaaccaaatcggagggttatataatccacgcatttttgtctcacgcgctaaacgcgcttatggtgcgcgtgtttttatttagtacacgcgtgtagtttttttttaaatccttttaatttccgcagaaaccatatgtaaacaagctaacacagagatcaatatcataaatagtttcaaggatctgaaacagtttgctagaagaaccaagtctaacactaaacatagatgcaacatcaaatgatgtcaatagatgttataatacatacatgagttgcttcaaatataaggaagaaggttacaaactctcacaacattcaaaccgacaatcagaacctaagggttgttttgctgagatgttttcgtcgctctctccagatcaatcttgcaattttctctcaactctatcatggctacaaagctattgagctgcacaggttatgaattgcnatggacatccaaacacagaacccaaatttttacggaccaaaacaggacacagtcg

SEQ ID NO: 5799 - DNA, 3190 bp, Arabidopsis thaliana landsberg
  unsure (1)..(3190): unsure at all n locations
atctaagtaagtctgaatgctacaaccagcctgtaatttcaagttattcgagattctttcgggattaatttctgggtcagttgaccttggaataaccatagtacactatcaagtgttttccggttgtatttagtttacatgatagattagattatgcaaaaaatgatggtatttgtcatgattttattatcatagtttatgcctattgggaatatattttaccgttatatggctacaattccaaaggagaacaggtcggaaaatgttgagtttgacgtcttctcctgacgttgaaaattgtgtttgacgtcttctcctgaagttgtgaatagaccttgtattgcagtagcagcttcatagattgcttgttaccggagaaaaattttctgcacataaagttcactctctcttttggtagatatggattgtagactgcatctggttttgttcttctcctgtgtttgtctgatttgcttgtcaagtcaacaagaaaccgggtttgtctacaatggcttcgagcaagcagatctttttattgatgggatcgccaaaatactacctgatgggcttttgcagttgacaaatactacagagttgcaaatgggtcatgctttcttcaagaagccgtttgattttgatccatcttcatcactatcgttctatacacattttgtgtgtgcgcttgtgcctcctaagttgggagctgatggtggccatgggattgtctttgttgtatctccttccattgatctctctcatgcatacgcaactcagtacttgggggtcttcagcaacttaacaaatgggacttcctcttcacatctgctagctattgagctcgataccgttaagacagtagagtttaatgagctggagaagcctcatgttggtattgatttgaacagcccaatatctgttgaatctgctctgccatcttacttttccaacgccttggggaagaatataagcctaaatcttctgagtggggagcctatacaggtctgggtggattacaatggctcgcttctaaatgttacactggctcctacagaaatccagaagccaaatcagcctcttatatcaaggtacatcaatctttcagaaatctttcaagagaagatgtatgttgggttctcttcatcaacagggaatcttctcagtaaccattatatacttggatggagttttagtagaagaaaagaacaattacagagcctggacctctctacacttcctcgggttcctcttcctaaagaggaaaagaagaaattatctccattacttattggtttggtcatcttattagtgattcctgtggtaatggttcttggaggagtttattggtacaggagaaagaaatatgcagaagtaaaagaatggtgggaaaaggtatacggcccacacagattctcctataagtctctgtacaaagcaacaaatgggtttcgtaaagattgtcgtgttgggaaaggtgggtttggagaagtctacaaaggaactttgcccggaggcaggcatatagctgtgaaaagactatcccacgatgcagagcaagggatgaaacagtttgtggcagaagttgtaaccatgggaaatttacaacatcggaacttggttcctcttctcgggtattgcaggagaaaatgtgagttacttttggtgtctgagtacatgcccaatggtagccttgaccagtacttgtttcatgagggaaacccatctncttcatggttgcaaagaatttctattcttaaggacattgcctcagctctcagttacttgtatacttggaccaagcaagttgttttgcaccgggatataaaagcttctaacgtcatgttggattccgagttcaacgggaggttaggtgattttggaatggccaagtttcacgaccgtggagccaacttatctgcaacagccgctgtgggaaccataggttacatggcacctgagctaataacaatgggaacgtctatgaaaaccgatgtgtatgcttttggtgcttttcttcttgaagtaatttgtggaaggcgaccagtggaacctgagctaccagtcggaaagcaatatttggtcaagtgggtctatgaatgctggaaagacgcttgcttactcaagaccagagatccaagattgggagtacaattcttacccgaggaagtcgagatggttctgaactttgggttactctgcacaaatgctatgccagaatcaaggcctgcgatggaacaagtggtgcaataccttaaccaagacttacccttaccaaatttctcgccgtctactccaggtatcggggcttttatgccagtttctatggaaccattatctgcaattggggtctccagtgtaaggaactcatcagtttctatgtttgttactcacacaatcttggacgggcatggaagataagatctaagaaattctatactctaaactctctcctctctgcatctaaaatctgtttagctacgcaaatgttttaacttaatgtattgactatgttgttggttgatgttgtactcgaacttctttaggtatcaattgacaaataaaacagttcttctagtcattgtaaactgacaagtttttagttttttggcttttgaatcaaaacggcctttaagtacaaaacagtttggcaaatggcaaaacctggggaacacaagtctctatacaaagtcaacttaccaactttataaaaaaaagatatcaaaatgaacaattttaacaaatcaacttacaacattattagtttttctatggtgaaaagcagaaatcaaattagagtgaagacttgtttctctatctataacttatgatttggggaaaaagttgacaactcatcttgatccaacataaacttatctctctacacaaaaacaaaacaatttgatgtcttctgagaaaactgaagacaaaaaaaatctcatctttcttcaccagaaagtccgaggtatcagagacgaccatcttgattctttcccggtctcagaaacacatccagaataccttctagacttatgaatcctcattttaacacccggaactttacgtgcaatcgcttgccatatcatctgtaccgcatcatctacctttgatggaaaatggaactcataatatttaaaaacttcctttaatcgattccacattagtgtccattcctctttggttattcctcttatta

SEQ ID NO: 5800 - DNA, 516 bp, Arabidopsis thaliana landsberg
tctatgctcgagctctgcttcacacgctttgacgtaaagatgttacctgtgcatgtcataaggaacagacaaaactgaagctaccaaaccaagaacggctccatgcacccccgcaatggactgagttgaacttgatttcctgaaaaaaatcgattacaattctcaggatcatgttaaaaacataatcgaagacaagatatgcaaatcacagcttactatatattattttcatttgcgtttccataatggaagacaaaaattgagacaaaaaaatgcttaaaagggaagaaaggaaaacctccgatttcttctcttttggattgagtttgcctctgcataggatctatcacgaaaatctgcagcaaaatcttcatctcctcctttcattaggcctgctagaactgctgctgcatgctctcgtacctgaaaaccagataaaatcatttaagggaaagaaaactgtgcacttggtctttccagataccactaaacacaaggttgaatcactcagaacaa

SEQ ID NO: 5801 - DNA, 1430 bp, Arabidopsis thaliana landsberg
caaaaacaatcccccaaaaccaacttaaagcgcgtgactaaaacgctccaatgatgagaaagcgagatagactacgagccaatgtaacgtttgtgttctcgtacgacgtgggactctcttctttcacctccatgcgcgtgtgcttcaacctcctctgtaactctctctctttcttccatatttctctcctcttcttctccgctctgtctctttcttcgaaaaaaccattcacagtcaagaacaagagctcactagaaagaaaaaaaactaaagaagtgagtaaaaatttcatttcttctgatcgccggaaaatggcagcgacgttaaagatcgtcgtcttccggcgaaatcctactgctgaagaatgtcacacgtaaaatccaactctcgctttaaacccttttagcaagagcctcgaaatttccgatttagaaactttttttctttcttgatggcgacgactaacgctcacacggcgactcaacagacaccaccaccaccacctcctcctcctccagctcctgctcctccggcgatggatgggttaacaacagacgagctaacagcgaaagcattaaacaagagatacgaaggtttaatgacggtgagaacaaaagcagtgaaaggtaaaggcgcgtggtattggactcatcttgaaccaatcctcgtacgcaacaccgacactggtctccctaaagccgtgaagcttcgttgttctttatgcgacgccgttttctccgcctctaatccttcacgcactgcctctgagcatctcaaacgcggcacgtgtcctaatttcaactctgttactcccatttccaccatcactccttctcctacctcttcctcttcctctcctcaaactcatcaccggaaacgtaactcctccggcgctgtcaccaccgcgattccttctcggcttaaccctcctcccatcggaggctcttatcacgtcacgccgataaccgttgttgatccttctagattctgcggcggagagttgcattattcaactcctccgccgccgcagcatttgatgctctccggtggaaaagatgacttgggtcctttagctatgcttgaagacagtgtgaagaagcttaagagtcctaaaccgtcgcagactcagtctcttaccagatcgcagatagagtcagctttagattctctctctgattgggtcttcgagtcctgcggctctgtttctctctcgggtcttgagcatccaaagtttcgagcttttttaacacaagttggtttaccaatcatctccaagagagatttcgccaccacgagattggacttgaagcacgaggaatccagagcagatgctgaatcgagaatcagagacgcaatgttcttccaaatctcatcggactgttggaaaccaggagagtccggcgagagtcgttgatcctctagagtcgacc

SEQ ID NO: 5802 - DNA, 980 bp, Arabidopsis thaliana landsberg
atgttttcaagtcatgattaagaatatgaatttccgatgaaaaaagcgagtgggatcattacactattgtaccaagagacgaagaagcaaaagctgtcattaattagagtttctaacttctaaccgatacatcgatgacaaggataagaaactgaaatagacacatatgttatatcgaaaaattatgatggtatattatatagactaaagaaatacaaatactctcaatcaccttctaaagaaaccaagtacaaattgaatattaatgatagtatgaatgagatactagtaaatcaaagaaatgaatttaaacaatcctaaagaaatgccaaattctaatgaaaaactaaggtgaaatcaaattgatcaaaaaagagattcaaatgtcacactgaggatgtatcgacaagaacatcgtttagcatatggtcgtcaccattagccatagcgagaagctctgcatccctatcctcctcgtttgagaaatctctcctttcgaatttcgagttagcggatatgaagatcagcttttgagctcgatcaacggctgcatgtgaccgcccgttcgagtttacccatttcaaaagagaggagttgcatttgaaccctccagtcgtagcgtggaggaaaatgagccttactgcaacttttcctagtgacctgaactcgctaagatacgtctcccaaacaagtctactgctttgaggattcgctatcctcatctttccggaaaccggatcacgctctttcatttggaccgcccttgcatacataggatcaagcccttcggttctccatttcattagttccatcaacgcaatgtgtgcctcatctctagacacaagccttgttatcaacttatctacatctttctcttgctctggcgacaaacattttgacggaggaagatactttccgctactatctcttatcaagtaaagagggtcaagtataaaagccgcagcccaagccggatgata

SEQ ID NO: 5803 - DNA, 3950 bp, Arabidopsis thaliana landsberg
gaaggttagagttcattcaatataaaccttgtgagctgactttgatccttgcagataggtcttctagaaaaccgttcggcatgctgaaagacctaccagtcatgattaatggcgtagaagtgcctacagacttcgtggtgctggatatggaagtagagcataaggatcccttaatactgggaagaccctttttagcgtcagcgggagcagtgatagatgtcagggaagggaaaataagtctcaaccttggaaagcatatcaagttgcagtttggcatcaacaaaactccacaagggtcaaccgaagatggaagaacctctggaaatgatagagcgatctcaggagaaggatatgagactgaaagagtgaaagaacttagaaagaagtctgataagcataatgaaactatagagaagctggcccacaccattgaggaacttaggagtaagcagaatcagatgcagaaggaagctcaacctaaaggcgggattaacactatcccgagaaaagaattcacttcaagatggtctccaaagacagattaccctcaagaagagaaggaagcctattttgaagaaaggggaattgagtattctgctgcagacctctccagggaggacgctgagtatgatgatggtatcggagaggattatgctgaccctctctacagttcattttcttcttgataagtgtgaggagtcaagctagagacttaaaacaagctcacttgggaggaagttccatgactatccttgtaaataatttttactttcttgttatttttgatttgttttggttgtgtttgtggttctcaggaagaaaggagtaaagtgaaggtagagttaaaattcaaaacttttactctactgatgtcctagagatcgagtatattggtcgtgtttgagtgatgtttaaaaacgtaaaaaaatttaaatcatcattttactcgaccaacagaagctacagaatgttacaaagagttcatcaagtttacagaagattgcgggatttcctggggatttttctagtgaacagagattatagagaagagacaaggagacaacgagggacccactgctgcagccatgtctcccacgctccccacaaagtgataacgaaatctatctcttcttctccactccactcgacctccccttatcccttcactcgatcccatcgccttctctcttcaaaaacgcgacctccccatctctcttcctcccacactcgaccaactccaaacaactcgacctcaccaattgctgcgacactcgatttcacatcaccgtctcctccgtccaagcctcatcattcgccctgaaggaatcaccaccgcagctcatctccaatccacttgctactcgaccgtcgctcatcaccattgtcatcctcacaaccttcactcgacctctccactaccacaaccactcgaccgcttcacaccgccgtcttctcttcttccgtgagctccactttactcgatccccaatcaccatcttcttcatcgcttaatcactcgacttcttctcacatcatcccttcaccaagccgccttcaccacttctacatcaccacaagaccaaggtgccgtcgttctcccatcgctcaagttcattggccactcgacttccccaagttcactcgattcaactccaatgctcgttgttttcaccactcaagcttcacggcttcactcggctgtcaataaccactcgaccacaagcccgttttcatttcacagttcactcgactcctcctcttcaagctcaccactcgaccaagcaaaatcactcgatcaaccgaaaaaaaatctatttcaaaacagacggtttactctattaaatcactcgaccggttcacttgattggtttgtgtttttggtttgctattactaacgtattaacgtttatttttgagttttgtccgttttcaggtttcatcatgagtaactacagcggagaatcctctatggaccctgattacaatgtagatgaagctgagtcctgatccgctagactgagagagcaacatgtttaccagagcttcagggatgaattcgaacgctctgcagcccgacgtaatcagagaagagctgaaatcaccagaggaaagagggcgatgtcaagtagatatgagctgattgatgaggatatcgagactgagtatgagccagagtcatggtgcagggagacgaagctgctgaacaaacccgacgaggttacagtggaggagtatatcaggttctttaagatgaatgatttctggggaacgcggtatccgtgctatgagactttagcccagctggggttactggaggacgtgcagcatctgttccagaagtgtcatctgcagacacccatgtcttacccttaccctgcctataaggaggatacaattgagtttctttccacgctgcaagtggaggggtatgaagcactcacagactttgagctggatgccatgggattaggcttcttgacgttcttagtgaatgaacagcggtatcagctttcgatcaagaagttagaagaactgtttggtttccctagtggaaagggaaccaaacccagatttgacagagaggagcttaaggatttgtgggccacgatagggaacaatctaccgctaaactcagcgcggtctaagagcaaccaaatccaaagtcctgtgatccgctactttcagcgatcagtcgccaacgtcttttactccagggagtctacatgcaccgtgtctaacacagacatggagatgatagattatgcgcttacagggattctccgccggacgaagggaagaatgtcttgagaggtgatctcaacaacgcaccaccagtaatgcctctgttgatgcatctgtgtggatacaggaagtgggcgttgacaaacgggaagaagaaggtgagaggagcactatgggtgggtggcgttgtgacgccaattctggaagcttgtggagtcccgctcaaggaaccagggttagccccgaggatgatggacttggatcatttgcgcagatgtgagttcttggagtttgacatggctggcgactttcaccgctacaggttcgagcattcatcgattaaaatcgccaacattcttctcccctgcattgatgctactaggattctcgagggcagaaacattgacttcaagcctgcgcttgaagaactttatttcgagggtagtccgccaactgaggagatcagtcataccgaaggagctacaacagaagatattgatgagacggatgatatagatgaggcggagtttgacacgagcatgtatcatttcagtgagcatataccttctgcgagggaaagcacaagtttgagcgaagctcacaggaacaacagcaagctgcagaagtggtgcatgaaacaggacaagttactcgcctcagggctatcaagtttatcaagaacaagctcagctgctcctcttccactaaagctaaaccgcagggacatctccctcaggacatgctttgaggagatatgacgcgtctgagccaagtcggcgcaggcctgagcccagagagcaggagattctgcatgtccctgcgaggcattcatcattcaagcctcgtgaatctgggaggaaaaggaggaccacactcactcgatctagtagtaggagcagacgacttctgcagtctggtagtttacgcgaccacggtgctggccgcagcagaagaagagaggtcgagtatcatcagagcggtgctggccgccatagaactgatgaggtcgagtacccacctgctggagctgatacggaacaaggcggttcgtttatggcctgtgagcaatcacatgcagccattgacgaccaactacgttcattcttcgactgaggtaagcgcctcacttcaccattgtattatatcatctgttgtgaaatgttaatcattttgtttctgtgattggatttgtcctgagtacgttcttc

SEQ ID NO: 5804 - DNA, 4680 bp, Arabidopsis thaliana landsberg
atttgtaaagattgacatattaactctaaatccaagggttttgtacctagtgaaactcatcaaaagttctaactttcacgatcaatcgctacggctgctgcagaaaatggacacgattacggtagcatctctcagatctgggtctctccctctgatgggcctcaggaaaacccaaccatcactatacatttattcggttctgcaagtaagtaacagttttgatgatcttcccaaagtttcaagtctctttttttctttatatagtttctaatattttcttgataaaatctttcttatatatataggcaaagacatatccgcaggaacccttgtgtatgtcacctatagatctggggattttacaggccttttaaaaacttacgacctatgtgatgtgagtgcatgtaaccctgaatatgtgattgaagctggcaccgactttgagttgactctttccgacgttctttatgttggttttgatgaggtaacatgcttttataataaatataaagaaccaaaccggatctgactttaattcacatttccatgtacgtcttttttgttaacttggcaggaaatcaagtattcggtatctttgcgcgaaaagacctcagaggagaagaatccaataataaaaatgtgtgtcgacttcaaagtacctcacccagcttttcctcctcctgcattggtctctatttagtcaagttggcagatgaaaagatgtttccaagtctcttttgattatatgagtctctctcgcaactttgcttttccttttgtccctttttatatgttctccgacaaataaattaaaaccttggcttggttgatatgaaccaccatgtcttttctttgatttacttgttgatattaatcaaaaataaagttttctgtacagaggaatgttttacgagtagcagagatgcataataagagcatagtggaacagagaaatacagtatgaggagactttcaagtaattaagctttatagattgtaggatcgataactctaaaaccaacacgtctttgctttacccttattgaatgcaagcttatctattatggaaatttactttgtgttatatgcctatttcgatccagtacaagtaaggttttgatcttctaaaaatatctaaattacaaatctaaaaagttaaaaatcaaactggagccctgttttgttgcaaaccaaatatatacttgcttaaaaattaaagttgaagtcggaccaaaataagaaaaactccaatatcaaaaacgaataataaataaataaaatccttatatttgacgagttatttacgagatttggtattttttagaagagtattgtggaataaagtatttctgtttggactacgaatttaaatatttcttggtcatgtgaatagacgaatttatccttaaaaatttggagagcaaaattcaaattatttaattatttttttttttaccagaaaatcgtgttggtttacaatttagggtttagagtttagtgtttagaatttaggatttagagtttaggagagtgaaagaaaggtaagatcgtcattttactgaaacaaaaaatgcttaaaactaaggggctgagaagaaatacctaaactgaaagttttggattgacaaatgctatggacaagaacccctatatttcacctttggtgtgtaatatgggctagttggctagttccctactttgggctaaggccttgaataggcgtgtaactcttttttttctcccgcatgtcattcgaaagcctttattaaaagtatcaatgttgaaggtatattggtattgcaagaagtttttttggtttctaaattttcgtttagccaaggttttgtttctcttttgtgactatttgaaattaaaaccctcaagcattaccaaaaagatgaggccttaaagcaaatatgccttaactcacaagattctctggctctctcttccctctttttcttattctttctctttctttttttgtcctctttctcctaaactctttcgaatctctttttttctttttctttctggcttctccatcaggaagattccgatgagaaactcgccgtccaagcacgggtcggcgggagggcattctcgtacttttacagacacaatctggtctccctttgtcaagtccggtttgggaatatctcccaacagatcctacgccctagtctccctcctcatcctcctcatagtcggcgcttttatctccacgcgcctcctcctcgacaccaccgtaagtccttcaaaacgacacggtccacttgtcgtttagctgaaactaattcttcggtgtttagtttctttatgggtttgaattttgtgccttttgtcacgtgagagaagaattttctattagtactattgatcggaagtgtctttggtggttggtgttgtcggccaatcccgtagaacacgacacgtgtttgttgtgggactcattatgacttttccagttcaattaggcattagctgtctcccatgaccatgagtagaatttcgggtttaaaggtttttggggttttagaaggacaaaaaaagtccaaattaaagaactcggttctgtttaaatatttcggttcgattggattcatacaagtttggtttaatttatatatttttcttttgcagcaactttagtttagatttaggtacgtatgggtaaaaatatatagaaatttttgaatccataaaatattagttcagattgatatatattcggtttgaatcggttcagttcaagtgaattacggtttgagtcgggttttttgcacaaatatgctaactagtcatatcgttttcacggtttaggttctgctagagaaaaaagccgcgacgacgacgacgactaaaacccaaactcagacgataaccccaaaataccctcgaccaaccacggtaattactcaaagccctaaaccggagttcacactacactgctccgccaacgaaaccaccgcgtcatgtccgagtaacaaatacccgacgacaacgagcttcgaagatgatgatacaaaccatcctccgaccgccacgtgtcctgattacttccgttggattcacgatgatctccgtccatggtcgaggacgggaatcacgagggaagcattggagcgagctaaaaagacggcgactttccggctagcgatcgtcggcgggaaaatttacgtcgagaaatttcaagatgcatttcagacaagagacgtgttcacaatctggggtttcttacagcttttacggaagtaccctgggaagattccagatctcgagcttatgtttgactgcgttgactggccggtcgttagagcttcggaattcgccggagctaacgcgccgtcgcctccgccgctgtttcgttactgtgggaatgaggagacgcttgatatcgtgtttcctgattggtccttctggggatggtaataaacaaaacacccgtaatttttaaaagttttctcaattacaccaatagttttgaattgatcagttaaacccaacatttgtgttgaatttgttgtagggcggaggtgaatataaagccatgggagagtttgttgaaggaactaagagaagggaatgagaggactaaatggattaacagagagccgtatgcttattggaaaggtaatccaatggtcgcagagacacgacaagatcttatgaaatgtaatgtctctgaggaacacgagtggaacgctcgtttgtatgctcaggtaataatgaacaattaacgtttttgagctatgccaaaatcattgaagaaaacagcagtgtttagctttttagtgtatcttgtaggattggatcaaagaatcaaaggaaggttacaagcaatcagacttggcaagccaatgccatcacaggtagtagtagtagcacaaaaacttttagagggacccttactttacttttggagttctaagaaataccttatgcaggtacaagatttacatagaagggtctgcgtggtcggtgagtgagaagtacattctggcttgtgactcggtgacattaatggtgaaacctcattactacgatttcttcacaagaggtatgtttccaggtcaccattactggcctgtcaaggaggacgacaaatgccgttccatcaaattcgctgttgattggggcaacttgcatatgcgaaaggtatgatattacttaaaacgttatcgaattactctggggctgtgttaataactggttctcaaactcggtataatcttataatatctacaccaacacacacacatacacatgtccatttatttcaattaacacacattaggttgtgaatcctcacaccattagttgcacttcatgaatgtttgattgaaaatcgggtataagtactcctaatgttaccctctcaccgttcttttctcttaccaggcacaagacataggtaagaaggcaagtgagtttgtgcaacaagaactcaaaatggactatgtgtacgattacatgtttcatctcttaatccaatactctaaactcctccggtttaaacccgagatccctcagaactccactgagctctgctcagaggcaatggcatgcccgagggatggaaatgaacgaaagtttatgatggaatcactcgtaaaacgcccagctgagacaggtccctgcgccatgccgcctcagtatgatccggcatcattttatcag

SEQ ID NO: 5805 - DNA, 1282 bp, Arabidopsis thaliana landsberg
agataagaagaaatgtacctctaaaccatccaagcaattaatggccttcaagaatggatcatgttctctcagtttctcgtccgaaagctcgtctatatccctccaaatagtctcaggatcccatctagagcaagatgagtcatcaagtaccattttcacagtaacaagccgaccctctgcccattgttgctcaaacttagctactccatcagttttaatcgtttcaagcgacgggctgtacacgtagttgtcaccgctctcttctctctcagcaaatttgcagaatcttgaatcacacatatcagggttcagaagatcagataatttgcagccactaacaatctcctcagcatttttcacaagctttgcaacccaattcatcttgaaaatgcgggcaagattcaaagaatgtgaaccgcagcctccatactccttaggagggcaagggatgctcccatcaccgttggcttcccactcaggaaacttgtatgaaaagtttagttttagtttgggagctccttttctatcttgtacgttttggttagtcccactaatcgtcactgaagactcttcccgtagatcttgacagcatctcaggcaaaggtcatatgagcagttcggacagtgacggtagtagtcaacaactggtatccgacacacgttgctgcaagaaacaaaacttcagtcatgtacgataatacaaagtgccaacaagaaatagttgcagtactaagtcaaaagaagaaaggcatgtaagatagatcacaagtaccagcacatctgctcatctgctttcaatcttgccctgacaagatcaatctcaacttctatagagtagaacaaactagtgttaaccgcaaaaaatgttacgagtatatataattcatcaatagtcactgtaaacaaaaactcgtctcaccacgaagcctcttctctagttcaacttccatacattgttcaagatggatctgctttatgactggtaggacagctgataatagacgataaagatactgcaacttgtccaaaacgggtatttcccggatccgaacctgcaatttttcacaaagagtcataatcatctcatggtcctaaatttcaaaccccaaaataggtagcactggtttgaatctttatgataacacgagaccacacctttattgtattatctgaacgcaggcaagatttgcaatcacacaagccacgacatgcagggcaaactttctcgacttcttcaagtgatatctccgagtaccttaaaatgcatgagacatcattagta

SEQ ID NO: 5806 - DNA, 3520 bp, Arabidopsis thaliana landsberg
gagctcttgttgagttgtgaactcattgagttgtgttgcgagctcttgttgcgacttgtgtgcgtgttgttgccctgattttgagtcttgtgtgcgttgctagttcctcccttactccgtatatctttgtgaatctcaagtgtaagggcgagaggctccaagttgtggagattcctcgcaaacgggatattgaaaggcaaagcaaaacaccgtggtattcaagttggtctttggaccgcttgagaggggttgattgcaaccctcgtccgttgggacgccacaacgtggagtaggcaagcgttggtcttggtcgaaccacgggataaaccactgtgtcatctctgtgtttgatctcttgtggtattgtgttttgttgagactcctctctagccacttggcattaactgtgctaactcttaatcaaagtttttgtggctataagtttaagtttcacaggatcacctattcacccccccccccatctaggtgctctcaattggtatcagagccgttctcttcaagaaagggactaaccgcccgaagagatggatcctaaagggaagggaatcgtgatcaacgacaaggagaaggagtccttcgtcaacgagccaaaggatgacaagtccaacgactcgagctcgggccacagacgtaaggatgggaagaagaagaagacaagacgcatcaaggagatcgtctactacgacagcgatgagtctacttcctcccaaaaggacaacgactacgagaaaaagaaaacggtcaattcgaacttttcttttgattattctcgtattcctcaaagtactaatgctcatttattatctattccacttggtaaacctcctcattttgatggagaagactacggattttggagtcacaaaatgcgtagtcacttgttctctctccatcctagcatatgggagattgtagagagtggaatgaactttgatagtacggatagtcccatgtttattaatgaacagattcataaaaatgcacaagctactactgtgttgctagcctccttgtgcagggacgagtaccataaggtgagcggcttggacaatgccaagcagatctgggacaccctcaagatctctcatgaggggaatgatgtcaccttgctcaccaaaatggagttggtggagggcgagcttggacggttagcgatgataaggggcgaggaccgacacaaacatacaatcggctcaagaccctcatcaacaaaataaggagctacgggagcacgcgatggacagaccacgacgtcgtccgactgatgctaaggtcatttaccgttcttgatcctcatttggtgaataatattcgtgaaaatcccaggtacaccaaaatgccgtccgaagaagtccttggaaaattcgtaagtgggtgaatgatgatcaaggaggcaaggtacgtggacgacaccttgaatggaccgatcaacgagccgcaacctcttgctctcaaagcaacaagaagcaaggaggcgctacctaacaatgtggcacaaattgaggcggccgaacttaatgatgaagagatggcttttcttcatcaaagagattcaagacggcgctcaagggtcgcaagggacagccaagcaagaccaaagccaaagggaagcgctcatgcttcaaatgtggtaagattggtcattttatcgctaattgtcccgataatgatagtgaccaggaaaagaagagtggaaagtgggaaaagaagaagaactacaagaaggcgaagggcgaggcacatcttggaaaggagtgggattcggattgctcctcgtccgactccgacaacgaaggactcgctgccaccgccttcaacaagtcatccctcttccccaacgagcatcacacatgcctcatggcaaaggagaagaaggtatgtactcaaaacaatacttatgcttcttcaagcgaagatgagtctagtgatgatgatgaaatagactattcatgcttattcaagggcttagatagaactaagattgataagattaatgaattaattgatgctttgaatgataagaatagattactagaaaaacaagaggaccttttatatgaagagcatgataaatttgttagtgcacaaaattctcttgctctagaagttaaaaggaatgaaatgctctcttgtgaactatctacttgtcatgaaactattgccaagttaaagagttttaatgatgatttaaatgctaaactagaagtagcgagtaaatctaattcttgtgtagaaattgttgaaacctgtaataggtgtaaagatattgacattgatgcttgtagtgatcatttagtttcaatttccaaattaaatgatgaattagctagtcttaatgcccaacttaagactagcaagaatgaatttgacaagctaaaatttgcaagggatgcctacacgattggtagacaccccttaattaaggatggacttggatacaaaagggaagccaagaacttgacaagccataaggctcccatctccgccaaggagaaagggaaggtccctatggctagtagtgtgcaaaagaaccatgcctttatgtactatgatagaagacaacctagaaatacttataggagttgtaatgcatataatgcctttgattctcatgtcatgtttgcttctagttcttcttatgtgcatgatagaaatgttggtaggagaaatgttgttcataacttgcctaggagaaatgttgttaatattcctaggaaagtaaatgaaccttctacaatatatcatgctttaaatgcttcttttgctatttgtagaaaggataggaagatagttgctagaaaattaggggcaagatgcaagggagacaaaacttgcatttgggtccctaaggatatttgtgctaaccttgcaggacccaacattagttgggtacctaagacccaagcctaaatttgccttgcaggtttatgcatccgggggttcaagctggattatcgacagcggatgcacaaaccatatgacgggggagaagaagatgttcacctcctacgtcaaaaacaaagattcccaagattcaataatattcggtgatgggaaccaaggcaaggtgaaaggtttaggcaagattgcaatatctaatgagcactctatctctaatgtgtttttagttgagtctcttggttataatttactatctgttagtcaattatgtaatatgggatataattgtctatttacaaatgtagatgtgtctgtctttagaagatgtgatggttcactagcttttaagggtgtactagacgacaaactttatttggttgattttgcaaaagaggaggccggtctagatgcatgcttaattgctaagactagcatgggctggctgtgcatcgccgcttagcacatgtggggatgaagaaccttcacaagcttctaaagggagaacacgtgataggtctaaccaatgtacatttcgaaaaagatagaccttgtgcagcttgtcaagcaggtaaacaggtgggaggagcacatcacagca

SEQ ID NO: 5807 - DNA, 4224 bp, Arabidopsis thaliana landsberg
ggtaatcggtttgctgatatttgttgaatgatgacagatgtgaatagaacaggtcctcttgttgagtatgatgagaagattcagtaatggtgaactcatgactggtgatatctgccaagtatgataaaaataatagccactcttttttacttcattgaagcttttgagctataagattaaatgtgattcgtgttacttgcggcttaaggttgtgtttgaaatgttgtagattagtgcattgagagagcttcagagactatatgatgagcttgtggattcagtagatacatgtcgtttagatcggtataatacttctgataaatcctcaaggtgattgttctgttctcttagccttgacacctttccttctctgtttaggattgagaacttgagtctcacacaactgtgtttttgtgtaatacagaagtcgttggttttggtctcggctcatgccacagacttcttactcacccgtcaaaggattatacctttatggaggtgtaggtacaggaaaaaccatgttgatggacttattctttgatcaactgtaagtttgtatgatcaaattcttatccttttttttcgagcattgcggtttcatgacaattctcttgtttcattaggccttgtacttggaagaagcagaggatacatttccatgatttcatgttgagtgttcatagccgcttgcaagtatggataattgagtttccattgtttctctattgattttagtaggaaaagctttagccttttgagatacattgtttgatttcggttcataatgtttgcagaagcacaagggtttatcagatccacttgaagttgttgcccaagagatagctcatgatgcaatcttactatgtctagatgagttcatggtatgtacactatttcatatatttattttcttgaaagtgatcatctttggatcaacacatcttgattttttcggctactgtttctgttattataggtaactgatgttgcagatgctctaatactaaaccgactctttggacatctgtttagcaatggtgttgtaagtgtcatctttacttacattatgctgctacaatcatcttaaaactgacttttgtccatgcttgctatataaaatatagattcatgttgctacatcgaatcggaatcctgataaactctatgaaggaggactccaaagagatctgttcctacctttcatttcttcattgaaggtagtctaatctactatcattagtccactttcagtacctttttaattcaaagactgcatcaagatttccattttcgcaggaacgaagtgtggttcatgagatcggttcagcggttgattaccggaaactaacttcggtattgctcttaatcccattaaaaactccctagactggcttcaaggtagagctgagttcaataactgggacacttcttcatttttgcaggctgagcaaggattctacttcattggtaaagatctttcgacccttttgaaacagaagttccgacaattgattggagacaatgttgttgcccgtccacaggtagtagaagtggtgatgggaagaaaattacaggtacagtttattataccaatctctgtgtaactccaacaacacttgtgttgtctgtatataagttcttcatcagaccaaatgctgcttcatgaacagattccattaggtgccaatggatgtgcatactttccttttgaagagctatgtgaccgacctcttggagctgcggattacttcggtttgttcagtaagatactttactttgtctctctctcatctgcaaatcttgtctctaaacagtgcttcttcttcttcttgatgttgcagagaagtttcatactcttgccttggacgaaattccagtgtttgggcttcataaccgtactgctgcatatagattcgtcacgctagtcgatgtatgcaattcctggttcttgttttgttcttataagatggcactaccaaaccatttcatcaaaatctgataatgatggtttaagaattgcaggtaatgtatgagaacagagcgaggttgttgtgtacagctgaagcaaatcctcaagaacttttggaaaagattataacaatctcagaggcgaaatcgatgggtccaagaacatcatcaagatcaagaaagaacgatgttactgagctctgcgtggataacgaattaggtttcgcaaaagacagaaccatcagtaggtaatgtaataacagactctgtgattaacaactaaaatctattagtttcattggttactcatcaagcggttatgtttattgtgtagattaacagagatgaacagcaaagaatacttggagcaccatgccataacacacaatctgtaacactcatactagacccttgatgattcttcatgggattcttcaattaaatcctataatagcttattgtattttctgtatcacaccaacagattgatccgaaccatgaaaaggaaattgtttttccattgttgtaacattgaattttcgatttactgctatattaaatctaatgaaattgcatcttttcatgtatgcatcaagaacaataacacattgcaatattaaccagattgttgctaaacatttaagtggtagaagcaatacatcaagagcaactacgatattaaactagttttggaaagaaagagagtaggagccagtgttgggatctttaaccgccttaaagttgtccacactcattccaaatcgacccaaaatcgagtttcccatctccttcagcttagctacaaacacaaatatattcagtataaatgactgttaatgaatcgatgcatatatatgaccacgctcttgatgcatgctgattgcaaaagataataaaagttcgtgatggaatactctcagaacttacttatagcttcttctttcatcttttctcgcttctcagcagcaagaggttcaagacgtcgaatccctttcctagcttgatcatttgaaggatcaagttctaagatcttcttcaggtctgcatatgagaagacagaggctcagtatggctcttccactaaacctgatctacaaccaaaagctatctatcatgtaacaagtaccagaaactaaccacctaaaactcctagcttatttttctaataaactggtttcatgagtaaacctcaaagggaaagacttttgcttgcatacaaggtaaataaatactcatgaactcacccgtgacagcatcttcgaagtgttcaagtttctcgtgtgcttcagcccttcgaaccaaggccttattgtaggcaggatttagctctaaggcttttgtgcattccttgattgtttcttcacatttaccctgacaaacatttcacagaaaatcttgagcactatactcatcttctatcggaattcaaatagaccaagaagtaatcaaaataaaggacataccaatttgaggaaacatacacctctgtttaaatagcatatggatcgaagctctatagactcaggtaactcctgaacaagctctaaagcaaaagcatactttgacaatgcttcttcataaaggccattaacgaacagtttatttccttccgctttagcctcatttgcttctgccaaagctttctccttccaaacaaaaaagacaaatttcaataactatcaacactagctttaaagcattctctactaatctcatccaaaggttcaacctttaacagcaaaattgaaactttgtcaataggtacagttgtaatgagaactagctaataaacccataaaccataaactaatttgaatgtggattcaccttgtttgatccgtcgtcgactatggcttctccttcactcattagctcaatctgctcttccttcttctccgagtgctgtggttcctcctgactcgtgacggcgtcatttttggtaccatcttcctctccttcttcatcgctaatttcacgttcgctggcagtttcgaacccatcggaatcatctccgtcgacttgtttcgtctccgtgggttgcggtgaggatgaagacgctggctttggttcgtttttgatgaggatctcgtcttcactctcacttgattcgatcagtaccatcttcaatctaaggttcttcgagagtttgcttgcacaaagatagatttcagcgcgagacttattagatcgtcgatctagctttcctcacaaatcaaatcagaatccagagcactcggtagagaagaagaaaggtca

SEQ ID NO: 5808 - DNA, 615 bp, Arabidopsis thaliana landsberg
gatgagtcaggtaaacaaaatgtctcaataattttttatgtaattagtccctgaaaacaacccaaatatcgacatataaccataccaactcctcttaattggtattgttgtcatcatgtccaccaataatagcatcttctgggatatactttttccagaaccaatgttgcttccaaactcttcccatctcttcaataggaacacctttggtctccggcaacaaaaagtaaatgaaaaccgtcatgatcgcaaccatgcttgcaaagaagtagaatagaccaaacttcatgtgacaaagcattgtcaaaaagaattgaccaatgagaaaagtgaagaacatgttgaccgagacgttgatggcttgtcccgctggtctaatttccaatggacatatctcactcggtaccaaccatcccaatggaccccatgaccatgcaaatcctgcaacgtacacacatatgaaagcaagaatccagtctgctgttgctggcgtcaatgttccggttcctgaggttccgaatcttgcaccgatgaaagaaccaacaagaagctgaaaataaataaagaacatcggatcattaagtctttttggtgattaggtatatatggaattgg

SEQ ID NO: 5809 - DNA, 1003 bp, Arabidopsis thaliana landsberg
tgacgcctctctcatatccgcagttatcaccggtcttgtcaatgtgctttccaccattgtctccatctactccgttgacaaattcggacgaagagctttgtttcttcaaggtggttttcagatgatcgtgacccaggttcgtacaaaccctaaaacaatgaaaatactctgttttctaaaacagagtatcttgctctgctttctaaaaccgaggtaggtaacaatgatttcttttgctttggtttcagatcgcggtcgggtcgatgatcggatggaaatttggattcaacggggaaggaaatttgtcaggggttgatgcggatataatcttggcattgatatgtctctatgtggcgggtttcgcgtggtcatggggaccgttgggatggttagtgccgagtgagatatgtccattggaaattagatcagcaggacaatcgttaaacgtttcggtgaacatgttctttacatttttcattggacaattcttcttgacgatgctttgccatatgaagtttggtttgttctatttcttcgcgggtatggtcttgatcatgaccattttcatttacttcttgttgccggagacaaaaggtgttccgattgaggagatggggaaagtgtggaaagagcatagatattgggggaagtatagtaataatgatgatggtgatgatgttgatgatgatgcttatttttagttgatgattatttgggaattaaggatatgttaggattaaaaacttattattgagaaaatgcttatactgaccaatgtgagaaaataaaaatgaggatataataaacaagtgtacataatttgaggatttatgaccgtacttaaaattactcgaaacttcttgaactaaaaataatataaattttttgtttagactaaaatgatcattttttacgataaagatacatgtaaagtaataattaagagtatccaaattatccgtttgaattgttaaaatatttagaattattataattttcacgg

SEQ ID NO: 5810 - DNA, 1035 bp, Arabidopsis thaliana landsberg
atgatgcgttttaattggctttatcaacaaaaatatttgtaactagattgaaagtcaacaaaaaaaagagtgcattttattcactaagtactcatactttaaatcaacaaaaatgtaaatgacatattcctataaaaatatatatccgtttggaatgctcactaaccaataacctctatcagacaaaattttatagattttcatatcgtttattttcttttagattaagtcgacattttggattccttacatataatttacatatagaaaagcacatgagtcataatatttggaatttcaactacgtcgattttttggtggacattgatcgtttaataaatttgtatctcatcattttgagtaatttatagaaccagaatgcgctcacaagttgtaatcccaaccccattacctaagaaaataagaacacaaaaaaacgcacatgaaatgttatatctcaactgaaatttgtgatcatgaaaaatattttagcatcttttcctaaacaaaatcttcttttcagttttgaaagtttcacatttttataaaactatgaacaattgatgaaacaataataagtatagcctagaacgaaatgtaaatcatattcatatattaagatactgtataccttgatgaggatgggattatcagctggtattgttacgtaaactaggtaaggtccacccaccattcgggccaccgaaaaaattgttgcaaaaaacacctccacaaaataatgattattattacgtaattctcccgccataatattataaatttattttagttaacatctctagatttagaaacaataatattcgatttcgtagccataatgtagagtgtttttacaaaacttgcaagatttgacaatagttaacgtgttggttttgtatatttattcctagaaatgatagctagctaactcattaagaacctatttttaacaatcttaattaataaccatctcttgaatttaggattatctcaaggttaaaatggttaattaaccaatttttctttcttaaggca

SEQ ID NO: 5811 - DNA, 10532 bp, Arabidopsis thaliana landsberg
  unsure (1)..(10532): unsure at all n locations
atctatcatcaagatggtactaatcagaatgtggaagaaccggtacgtaaccattctgaaaaattctacgacttgttagaaggtgctcaaaatccattgtacgatggttgtcgtgaaggccaatctcaattatcgttagcagctcgagtcatgtagaagaaggcggatcataatatgagtgaaagatgtgtggattcggtatgtcaaatgttgacagattttttaccagaaggaaaccaagctactgattcgcattacaagacagaaaaattgatgcgcaatttaggctttccttattatacaatcgatgtttgtaataacaattgtatgcttttctggaaagtagacgaaaaggaagataaatgtcggttttgtagtgctcaaagatggaagcccatggatgactaccgtcgaagaaccaaagttccatatagtcgtatgtggtatctacctattggtgaccgattgaagagaatgtatcagagccacaagactgcagctgcaatgcgttggcatgccgagcaccaatcaaaagaagaagaaatgaatcatgcttcagatgcgacggagtggagatatttccaagagctacatcccatgtttgccgaagaaccccgtaacgtttatctcggattatgtaccgatggattcaatccatttggcatgtcgcgaaatcattctttgtggcctgtgatcctgactcaatataatttaccaccgggtatgtgcatgaatacagagtacttgtttcttacaattctgaattctgggccaaatcacccgcgaggtagtctcgatgtcttcctccaacctcttattgaggagctaaaatagttatggtctaatggaatcgattcatatgatgtgtctttgaatcaaaattttaatctaaaagcaatgttgatgtggacgataagcaactttccggcgtacagcatgttatcaggatggacaacccatggtaaactgtcttgtccaattcgcatggaaagtactaactctttttatctacctaatggaaggaagatgtgctggtttgattgtcaccgaatatttctttctcatggtcatccattacggaagaacgaaaaagacttccgagaagaaaaagacgcttctaccgagtatccacctgagtctttaaccggtgagcaaatttattacgagcggttgtctggtgtaaatccaccaagaaccaaggatgttggtggcaacggtcacgaaaagaagatgccaggctatgggaaggaacataactggcacaaggaaagcatattatgggagcttccatattggaaagatctgaatctccgacattgtatcgatgtgatgcatacagagaagaattttttggataacataatgaatactcttatgagcgtgaagggtaaatcaaaggacaacataatgtcaagaatggatatagaacgattttgttctcggcctgacttacatattgatagtaagggaaaagctccatttccagcttatacattgacaaatgaagccaaaatgagtttattgcaatgtgttaaacatgcaatcaaattccctaatgtttattcgtctgatttgagtagttgtgttgatatggagaatgggaagttatcaggtatgaagagtcacgattgccatgtttttatggagcggttacttccatttatctttgcagaactcctcgaccggaacgttcaccttgcattatcaggtaaaataagaatataatttactctttatatcatatatgcacttgagatgatgcaattttttttttcaggggttggcgcgttttttagggacttatgttcgagaactttgcagaaaagtcgcgttcaaattcttaagcagaacattgttttgatcatatgcaacttagagaagatcttcccaccatcattttttgatgttatggagcacctgcctatacatctcccctacgaagcagaattgggcggtcctgtccaatataggtggatgtatccttttgagaggtttttcaaaaagttgaaaggaaaagcaaaaaataaaagatatgcggccggatcaattgttgagtcatatatcaatgacgagatttcttatttttcagagcactactttgccgataatatacaaacaaaatcaaggtaaccatgaattatcgatgtgatgcaagttttcaatgcacaaaaataaccatgaattacctcttttggatcaggttaacaagattcaatgagggtgaagttcctgtatatcatgttcctagagtacctactatatttagttctgttggtcgtccaagtggagaaatacgtgaagtatggctatcagaggaagactatcaatgcgcacatggatatgttatacggaattgtgattattttcaagtaattgagaggtatataacaaagtcatactcccattttaagttaattatataaatgtttgtttactaacccttatatgttgtttttgtctttatatagtatgttcgaagattttctttctattaaatatccaggattgaacgaaaaagaactcttcgtgaaaagaaacgaggaatatcatgtgtgggtgaaagattatgtatgtctaaatagtttataatatatatgatttgcatttatttattgttattcttatctctataatgatgtttatttctaaatttgcatacaggttacatattggaactctagtaatccttttccaacttgggttcaagagatagtcaatggacctttgcacaaagtcaaaacatggccaatgtattttacaagaggctatttgtttcatacgcagagtcatggagcaggacgtaagacttgtaactatggtgtatgtgtgaaaggtgaaaattatacggatgcatctgacgcagcagatttttacggcaacttaactgatatcatagaacttgagtatgagggggtggtcagtttgaaaatcacactttttaaatgttcgtggtatgaccctaagctcggaagaggtactcggaggagcaatagtggtgttgtcgacgttctttcatcgaggaaatacaacaaatacgaaccctttattttaggtacgtatggtatatatatatggtcatttagtttttctagttcatatacaaatatctaattctccaaatatggtgcatttacaaacagcatctcaagcggaacaagtgtgctttattccttatccatacacgaaaaaaccaaagcgggagtggctcaatgttttaaaagtaaatccaaggggaaacatattaggagaatatgaaaataaagacccgagtttattgcaaacagaaaatgatgatgctgttttaataacaacaatagaagatcttgtactcgacaatttgacaatcaatcgcaaccccataaacctcgatttagatgccggagatgctgatccagaagatgaattttgatgtaatttatcgtcttctgatgatgaagaacaacaagacgaagaacaacaagacgaagaacaatattagttttgtgtttatgatatgtacttaagttatttctagtaattatgatatgtccttaagttattttgaaatactatgcaaacatttttaaattattttgaaaaactatatttgattaagtatgttatgtttatttatatttttattaaagataattactatttttgaatatctatggcccaaaaaaacacaaggcccaaacccaattattaaaaattaaataaagcgactaatttgtgacaatttagcgactaaccattgtattgggccaaaataactcgaggcccaaatagggcgactaatttgtgacaatttagcgactataaccattctattgggccaaaataactcgaggcccaaatatggcgactaatttgtgacaatttagcgactacagaaaaattattggaccaaaaatttcgaggcccaaaattggtgactaatatgtgacaatatagcgactaatgtttaaatttcgaaaactttttaggcccaaacccattaggcccaatccctttcaatgtcaaaaccttaagttccatctctttctcttcgaaacatctgcagccttcttcttcgatttctctcttcctcttcgatttcctctgcgaaaccctagcaaatttctctcttcctcttcgattttcctcttaatctctctaccaaacatctgcagtcttcttcttcttcaatctctctcttcgatttcctctttgaaaccctaccaaatcaatctttcctcttcgtttttctcttaaatctcttcttcttcttcgatttcgtcgatttgaacctctgtctcatctagatctctccttaatatcatgtttgggcgaggaaaaaagaagcgaaccagtcctaaccttgctcagagagcctccacatccacggctggtcgacgacctcgttctcttccgtcccagtacgatttcacgccggcagcagaacggtcgcctcagctacagacgcctgcatcagaagacgccggtcctcctttacaggcaacggcagctcatgttcggaactatccgccgcctctgcagttgttccagcactctggcagtcgacaacctgaagtgcaaaggtctgcctccgtggaagtgcagaacaatcctgcgaatcaagccgcgtttactcagcaggttcctccggctcctcaacaagaccctccgccttctcagcaagaccctccgccttctgcagttcaagagtctcgggctcacagtcacccatcctctcaaggcaacaacttcgaagaatatccacctctgtcgccggatctccagaaggacacacttcaatccctaaacgatctgcttatgttgccggagagggataagttcgtcactgtcctctctcccattcctcgaccgaatacgacatggtatgatcttcttcttctcatgtttgtgatcccatgttgtgttcaatgttagtttagttgagtaatgagctttgtgagattgattagattgagaaaatgtctgaattgattctttgttgtgtctcgtgttgtgttggtctgaaagtctaaaagtctttgatattatagatgttaaggatgcatctgagaatctattcttttgtttgaagagtcttgttatgtgttttgttcttaggatctaagttaagtattttgttcttagggtttagttgggtaatgatctttgtgagattgattagattgagaaaatgtcactttttttttttttttgtgacgtgttgtgttggtctgaaagtctttgatattatagatgttactttgcagccacaatctattctgttgtttgaagagtcttgttgtgttggtcttattttgttgtttgcgagaacaagtagtttaagttgtgttttgatcttagggtttagttgggtaatgagctttgtgaaattgattagataaagaaaatgtctgaattgtttcttgtntgtcatgaatgcatttgaagagttgtgtgttattggtctttgtttaagtttagttgtagatgattctttatagccacaatatatattttgctagatatgatctgtttgtatgatactttgcagccacaatctatgttttgctagtttaggtctaatatttagatattatctgtcatataacaactgcttgtttttcttgtgtatggagatttacttgggacacaaactcgctacttgttaggaatattactcgagtgtttacaaacaaatttgatggtccctactacagctgaacatgtgtgccacaagtgagacaagagaaatacttcctcgagttttcttttaagtgttctttcagcccttcttatatatatgattacacttcttttttttttttattgacattaccttttgtatttgtagaaaacacaccattgggatcctttgataacatggactattcagtattatttcaatgagatctgtttaaggcgaatgaaaggcatggttagcaccgcaagaactagacgaaagaaaccttaatggattggaaaaaactctatggaaaacaatgactgtgtactgggacactgatgaagctcaagaaagaagtcaaatctattcaaatgcccgtctgtctgaccgtaacggtctcggtccgcacatccacttcttaggccctaaatcgtttcaacagatccaagatgaaatggttagtcactttgtacattcgttcttaatagtttttacactgcagccacattttattctaacttctctaattgtttggttacattacaagaagaggaagtgggtcatcctgtttgtcttggtgatgttttcatcaagacacacacaaaggctgatggttcttttgttgataaaaaggcggagatggttgcaaagaaataccaggagaatgtgctactgaagctgtctgagcttgaggcagaatcttctgctgtttcagatggcacatcaagaacacgggagctcacacccgaagaatatacaaccatcttccttgaggttatgtttcatttctcccaatacttctgctggcttgaatctttttttattttaatctcatctctggttctctattgctttgtagtccaccatgaaagattcaagaggaaatccgtatggagttggaagcctcaaggactcgctggtcaaaggaaagcagaagctagaagactcttcttgttatgttgcattggaagaacaggtgaaggaagctcaacgaaagattgaagaacatgttgcttattctcaaaggcgtgatgctgtgttagctgttcgtgaaactcaggtagctgcgcgtgaagcagagcagaagtgtaggctcgagcacttgtcattggtggagaagtatctcgttcaaacagatccgcacttcctggaattcatggcaagtcaatcatctagagagacaaccacagaccctaacataccatctccatctgcttcataggttgagatgtcttctcttatctcttttctgaacttaaaacatttatctcttttctgaacttggaactctctgtctccatctttcttttttgaacttaaactctatgtcattgtccttgtaatatttgtgttgcatttggtattttgttgtattaaaacatatgttgttctattaactttcgttttcgtttgtttcagttttggttttgattatcaattgccaaaaactaacaaaaatacagttacatttagatgttaaaattagtcaccaaagttcaaaaactaacgactaacaggcgaccaaatttcgattgtgcgtcaaccaaagtagtcataattaaatcacagattagtcgttaaaatgttacgactaaatagcgactactgtactttctagtgtgtttgtcgtaaactagtcgtacattagtcgttaaaatataacgattaaatgacgactactgtcagagtactgtgtgttctagtgttttagtcgtctgttagccgtaacatagtcgttaaaatataacgactaaatggcgactactgtcagagtactgtgcgttctagtgttttagtcgtctgttagtcgtaacgtagtcgtccccttttacgactcactagcgactatttgacgacgacagaatttcggtcgtaacatagtcgccaaataccgactaaattaaagactacatcttttagcgactatcgatttacaactacgagtattagtcgccaaattgtcgttatttccgttttaacgactacgtggctactatatttgtagtcggtatttgtctggtttcttgtagtgcgtggttgcgataagccggagtggatgactacaacagtttggaatgatttggttgacatgtttattgaattttgcccagatgatgtcggtttcagatcttgaatgcttttgtatctcttacttgtctttcctatgaacttaaaatatgtaatggtttaatcgtcttctctataaaattaaatcacttgttgtcacttgttaaaatttatcataaattaggcgtaactaaaacttaactcagccatatgaatagcttaactcaaccatatcaataggttaactcagccacaacattagcttaactcaaccataacattggattaactcagcaataatattagcttaactcagacataacattagattaactaggcccaaaacacagtaccatttcactaaaagctaatactgaaaaaaagacacaacactagaagcaagataaacatcaaataaactagaagccaagaagaagcctctgttctttgtttttaaggaacattaggataccaagaacaatgaaaatgataataaagccaagacacaataagcaaagtttgatcatcaatttagatgtctatttttcccttttgctccttattacttcttccttcagttctttcaccatcacctgtaacgcttctatctcgactgcaacatcggataagactgcgttgatctcattttcaatggtggacaatttgggcaaactatcgacaacctcttcgtatgttccatcttcgacccatttaaacaaatggtcttgcattttcattcacaaaccaattatcaactaaaaccaataaaaccaaaaaacaattatacttacatctttacccgtaggacaacggaagtatggttttccagggttctttactgacgttgatgtatagatgaccatgtctaatccgcaatgacactttgatagaaacccacgtccccaatggcttacgtattgagtacttgaaatagaattctcggaattactactcatttctttagctagagatggggaattcggagaagaaaaataagaagaaatcgagctcaaatcgggaagaagaaattggaattttcaaacttagggtttgattttggggatttattagattggatctttcgtttatgtcacaaacgacgtcgtattttgtcaataacggagacgtcgtatttggtcaataacggagactccttctctgtattttgtaatgtcatccgtcacgtagacatatctaggccatgtggctgttataaatcggccaaaccacgaatgtttctttctttagccatcagttggtactatcaattaattcacttattataatcactttccaactagtgatcatgaaattagcaaatgtttgtactctttataattgatccaacaccatagccatacattgttaagctctagttaacttccattcttagaagtttaatcaacatagattgtcaatggactcttagtgtaaaaaaattattctgttttgatattatagatcttgacattaatagaaccaataataatgctagtatacaaatgagcctattaataatatttggtttctcataactcggacaaaccacgaaatcttttgtcataactcagccgtatcgtattagcagggccgaccctaaggagagccaagtgaaactttggaatgtggcccccatttttttcgtaaatttataccaaacttgttttgcaaatatgccccttaaaacatttagttctaagaaaaaggcccccaaatttcaaaatagtttataataaccttaaaatatatttgtttttttgctttggcccctaaatagtcaggaccggccctgcatatttgtattctaccgccaaacagaaaaatttgaatatttcagggttagttatacgaattattttcttactaatttgaattattttgaatattaattgctggtgtgttcgtgtgaaaatagacccaattattgttcggggttccccataaaaaacactttttgtaatctcgataatgatataataaagaatattaatatgtttgtgacccagccacaaagcttttataactcagtcacttctacatttattcaccaatagccgtcgtttgattagcgctttttagcataaacgactatatagatttagtgctttactgccctactaattgaagacaagatgatggtgcagagatctcttgtccttggtgactctagtgttgatgagaaattggtttcagaagaaaatgaggtatttatctcgaccatctaaatagagcaaatcgttagccatctttctattgtatagtggtaatgtaggagctggatcgtatggaaataaggatgagaatggtgtacggtgaaaacaggaggcgcgataagggtgttcggatcgagtgtgattgtagtgcagcggttgtcgttgccacttctcgtgatcctattacaaggggaaaactttatttcggttgtctgtatgaaatatcagatgtaaacatcttttgagttatgattcttttattttatttttatttttctatccctatgatttatgtctgatttataagggtcctgttcgaggctgcggtttcaagaggtggtggactgttccattgtgtgacgagttagacaagagaaaagtggagaataatgagatgaagcatgatttgtaagcagccaagaagcgcgtcgaggctcaggtggaaaagatctttcttatggaaaagaaatttgaaacgctagagaagaagtatgagagcttgaacaagtatcaatgagcttagctaaattggctttttcaatcggacttcctcgtaatgtctgtttttgaattggacttcgctgtacaatcta

SEQ ID NO: 5812 - DNA, 544 bp, Arabidopsis thaliana landsberg
  unsure (1)..(544): unsure at all n locations
attttgtgcaatttggaaaaactattcccaccttcattctttgatgtgatggagcacttacctatacacttaccagatgaagccgagcttggcggtccaattcgatatagatggatgtatccttttgtaaggttttttaaatgtttgaaagggaaggcgaagaacaaaagatatccagcggcttcaattgttcaatcatatatgaatgatgagatatcttacttttctgaacattactttgcttcacacatnnnnnnnnnnnnnnnnnnnnngtacttcatatttagactataacattatcttaagtcaaattttgttaaattcaaacaactaaacataaattttataaatatatttaatttgcaggtcaagccggtatgatgtttggtgaagctcatgtataccctgtcccagtaccgctcatatttactcaagttggtcgtcctagtggcaaaagtattgaattttggttaaatgagagagattaccaatgcgcacatgcatatgttttgcgtaattgtgaatattttcgccccacttgaag

SEQ ID NO: 5813 - DNA, 1698 bp, Arabidopsis thaliana landsberg
ttcaaacgagggggaacacagcagggttcaaagcaaatgcacatacggaattagtcccatttttcacgaaatcaaagtggaaactcgaagtttccctaagaatcggaagctcgacgaagatccaagggaagaagaggaacaccaaacaacaaggagcaacgtagtacaatgaagtgattggattaagattgattcctttagaagtgagcaagatctgaatcaaaaccaacctcgttgcttcgaaagctacagcaccaagctgaagcataactccccaagtatcgaacttagcctcaccataagcagcaatcgcaacaccgaaagagatcgagagcatattagtcatcgtctccgatttgaacgattctttcttaagaaggactccgattgagtaaacagcgacaggcattagagctttgagcatctgaatgaaggagacggagaggtaaatgtaagcggaattggagagccagagagaaagcgagtacagagcaccgatcgggactacagatctgatgtaagtatctcgagacattgaaacaggctcgacgattttgaagactttgatgaggatgacggcgagggaagagcaaaaagccatgtggatcatggtgagtgtgatcggaaaaggccaattgtacatcttcttgtcgaggatgtatttgttgtagacgatgacggtgaagctcaggaagatccagatcgcgacgtaggtgtaggagaggaggatcttcttgatgactccatcgctaagtgcaccgccttttcccattgtgtcggaggaggaggagaacggaggaggacggtggtgcgcaggatagcgtcgtctgagggatgcaggataaaatgcgcagtttgtgtgttgtgtttttagagacttttggtgtgagagagtctgtctaatgtagcgagcgagagggttggcgtgactgtgctatggcctaaaggtgtttttttctttccaatttactaatgggcttatctataggcccactaacttatttactgtttaattaatcacttacctctttttattgactaattttgataggttggtgcagtttgtgaatattaaattcaatatgaattaaattacttgtttacattaactatttataactataaatatgcatcttttaatcttattagtagtcaatggttgttataagtcaacattactttgttaaaagagtgaaacttatctttttttccttaataattcatatagtttttgttttgggttcaaacatttggtggccattcatgttaagtttcctagtctcgcctcacattaattgcatataactatatatgtttaggtttgaatattttgacattaaatacatagctatagactgttaggtttagtgatggaaacagataataaagaattttaacttactttataagaaaaaaaaacaaattatagtaacaaactaacaacgaaacttattctttacaataatgttgtcattgtgagcatagaccgtgtgagtcacatacatttactttattctcgcgacaattggttcacttctaacttaaacgttcggcatgtaatgtctttgggctacaagtctacaaacggttgataatgtataacctagctcctatagtcctatttctagtcattaggaggatactaaatacgctttacttgtacacatacatagcatactaatgaacacccttgatcat

SEQ ID NO: 5814 - DNA, 1288 bp, Arabidopsis thaliana landsberg
catatcccacagaacgaattcgctccgaaaattgtgtaatctcaagtggaagctagacgtatctataagaacaggaaactcaacgtagatccatggaataaacaagaaggccaaacatcaaggagcaacgtaatataacgaagtaatgggattaagcttaatccctttatctcctaacaagatctgaatcaaaaccaaacgagtagcttcaaaagcaacagcaccaagctgaagaatcacaccccaaacatcaaacctagcttcaccataagcagcaatcgcaacaccaaacgaaatcgataacatgttcatcatagtatcagatttgaatccttcctttttaaacagaacaccgattgagtaaacagctacaggcatgagagctttaagcatctggataaaggagactgataggtaaatgtaagcggaattcgataaccagagtgagagagcgtacaaagcaccgatcggtacgacggatctcaggtaagtctcgcgagtcattttaactggctcgacgaatttgaaaaccttgatgatgagaaaagctagggttgaacaaaaggacatgtggatcattgtgagtgagatcgggaatggccaattgtacatcttcttgtcgaggatgtatttgttgtagacaattactgtgaagcttaagaagatccatatcgctacgtagctgtatgagagaacgatgttctttatcacgctttcgcttagtgcgccacctttccccattgcgacggattggtgttgagattcgcttctccgtacggtgctgaagcggcggatacgacggtggtgaagtggcggcgcaggatagagtttgttagttttggtgagatcgtgaataaaaaaaagtcttcacaaggaagtgatttagttgtgctcttccatgttttggtttcacgatatatttatacgtttgaaatattattattttttatcaataataaacgataataatgtgaatggagaaattaaataatagaaacgatagccacgaaatttattgagatagcaactaaaagatttattaggttatgtaaatttttctacgtacctaataaatatccaatgtgaataaaaattgttttttaagaaaactctcattctccaaattaagatattttttttacccatttatttagctggtagaataaaatcccgtgatagatatttttctgttccaatccagtccaaggtttcttttattatctaaacaatttttacattggtaccatatttggttaccccattattcagaagattcccgttgtgcttt

SEQ ID NO: 5815 - DNA, 908 bp, Arabidopsis thaliana landsberg
tgcgcacctctctctcttaatcctttatcctgcgcaccaccaccaccatcttcttctccggcgaaaacaaacccaccgccatggggaaaggtcgtgcactttccgacggagtgatcaaaaagatcatcctttcatacacctatgtcgcaatctggatcttcctcagcttcacagtcatcgtctacaacaaatacatcctcgacaagaagatgtataattggccattcccaataactctcaccatgatccacatgggtttttgctcttccttagctgtgattctcatcaaagtcttcaaagtcgtcgagcctgtttcaatgtcacgcgagacttatctcagatccgtcgtaccaatcggcgcgttgtactcactttctctctggttatcaaactctgcttacatctacctctctgtttccttcattcaaatgctcaaagccctaatgcctgtagcagtttactcaatcggggttttgttgaagaaagagactttcaaatctcagactatgactaacatgctttcgatctcgtttggtgttgctattgctgcttatggtgaagctaagtttgatggttggggtgtttttcttcagctaggtgctgttgcttttgaagccactaggttggttttgattcagatcttgcttacttctaaaggaatcaatctaaatccaatcacttctctctattacgttgctccttgttgtttggttttcctctctgttccttggatctttgtggagtttccagttcttagagatacttcgagtttccatttcgatttcgtgatctttggaaccaattctgtttgtgcgtttgctttgaatcttgctgtgttcttgctcgttgggaaaacctttgctttgactatgaatgtggctggggtggtttatgattggctcttgatt

SEQ ID NO: 5816 - DNA, 875 bp, Arabidopsis thaliana landsberg
caaaaatgatttaaaatcttaaaacttttcttaacaccaggtataaagttttaactagttatattggctggtttagagttaaattacattttgttagttcagaatttgactggtttggtcgctttaaaatttaattaatcttcgctattattctttttattttattctatcttataaccgaaaacaattataaattggtgaatcacttccgttacgtgtgagtctctctcttttagtaaactctgaaaacgttttttcaggatctcaccaaaattcacaaacttcggagaatacaccaccgtctccgccgcagaaccaccgtcgtaagagaggcaaaaacatcacgaatatgggtaaaggtggatcactaagcgaaggcgtgattaagaacataatcatctcctacacatacgtagcaatatggatcttcctaagcttcaccgtcatcgtctacaacaaatatatcctcgacaagaagatgtacgattggccattcccgatctcactcacaatgatccacatgtccttttgctcaaccctagcttttcttctcatcaaggtcttcaaatttgtcgaaccggtctcaatgtcacgtgacacttatctcagatccgtcgtcccgatcggagccttgtattcactctctctttggctctctaactcagcctacatttacctctcggtctccttcattcagatgctcaaagcgttaatgccagtcgccgtttattcaattggcgtgctcttcaagaaagagggtttcaaatctgagacgatgatgaacatgctttcgatctcatttggtgtagccattgctgcttatggcgaagctagattcgatgtttggggtgtgattctccagcttggtgctgttg

SEQ ID NO: 5817 - DNA, 2833 bp, Arabidopsis thaliana landsberg
aggcacaaagcctttttttttaaaaagattttaaagtattttattgttttttcttatggtcatttccatttatagagcccaaaaggttggaatataagttttaaaaaaggattagagaaaatgaagccaagcctataaaactaaatcatccttagtaatttaaacatccactcataaagattttgctgatgaaacgtgttgacgaagtgttttgccctatgacacgggccgagacgtcaagcaccgctgttgaattcgcgggaaaccgctagaattcaccaaaatgttgagaatcgtctttccttttgtcgatctcgaacccatgtccaaaaatcgtcgatattctttcggatcaagtgatggaagtcgcttaaaaattcttcaagtatcattatcgtcggggaagctccacctctgacgacacccatattgatgtggccggatctttgttcatgtgtgtgcataaagaagtggtatagatattacttgtcgaactaattggtgggaacatagaggatttgtgaagaaaccaaagacatcaacaatcaccaatagatggagatctaaactcgcaaggcaagagagaacttgataaaagtggtatcaaaagtcttgtccgaaatcaaaattattgatatcgtcgaagcaaaatttatagacctaattaaacagaaaaaacaaaaactgaaattaatatccgatttggattagagcatgatcgtttctaaagaaacgagaagggtaagagaaaaaaaaaaagctctcgaaagtatcctattgatttacatgatatgataagagatttataaagcaaaataaaaagctatagcctcaaaattgaaacaatcatgctgtagattcctatttttttttctcgcatcccaaataatagcacaactttatagtctttagaaggtctgtacattttttctctttttctaaaaaaagttttatatctatttctccatgaatcaaaagatctctatctaaactccctgaattgatacttcaacatttattaacccatatttttgggtttattcggttaactatactgttaaccatttataaccagagaaaaccatacatcaacgaaagaagaaaacaaaaatactctagcgagatttctctcttaggcactcttcccgagtgaccccaaagcagtaaagagtttttgaaaaaccagatctcacccacttttacttcctatacaaggcaattttacaactccggtgacctttctttgctctttctcgccgaggaaacttctcttaccatgccaccaggcatgggcggttggactatcaactcaacaggactccagaggactcaaacctcacttcggccctcccgctagagtatgtttctcaaccttgaagctctggaagaagactccaacaaccgtattctctcttctcacggtatggtttaaccttctgtccagcttctaacaatatcttaacctcgttgaactctcttggaaccttttttagcacttgaaccagcctgtatgtcatgctctatggcttagcaatgtacagttctcttactggggaagataactctcacctctaagtgaagaaccctctcgaaactttttaaaaactctgaagaaccgtctcccatcatctctcccaagtcattctgcccaagtctcatcatggccttaaggcactcttactctgcaaaaggtaaaggcatcctagagagtcctccttctcagacagagacattagacagtcctcttataacaatgaaaaggaaagatctcgagagtacatacctcatcccagaagtcgcccctctacaccatctcttagtgagcaagactcttcaaagcagtttatgccccctgctccaagacgtatcaaagccctactctggacaactcagaccttatccaggaaaactctctgaccctaattggacgactcacaaatctttctatccaaaggctatggtccctcatcccctttctctccaacagatggaacctgaaaggcaaggcaattggctcagacctaggaaaagatggcttccaattcaggtttgaccatgaagaagatctacaaaaggttctaaacaacagaccttaccattttgattactggatggttattctccaacgctgggagcctatcatatttgcctcattcccgtctcagatccccttttagattgaaatacaaggacttcctctacattactggaagccgaaaatgttgacagacatcgcagaggacattggagaccacctggaccatgaacttaccccctctgcagcaagaatctaagttatgataaacgggctacaacctattactaaagaaaccattgtggagttctctgaccgcagcgaagtcctagtcaccttggactacaaaagactgaagtctcactgtaaacactatctcaggcttactcatgcggagaaaaactgtccgggactagcccttattaaagggtctccaagggaccaagggataccctccgcctcaaagagcaaatctatccaaagctcctccaacaaaacgcaacaaaaagaaacccgagactctgtaaaatcccattaccacccctactctagacacaaaagctctcaccctgagaatttcaatgatagaaggaaagagtaccgtaatgattcctggaaaccatctacaaataagcggtctccgcgtcgacaatctccaccaagagatcagaactcatatagaggagattccaacaggtccttgagatcctccctgttcgccatcctgctagaacctctagagatcatcttacctcatctcttcagtggtgggaaaaatcaccacccaaggagcatcgt

SEQ ID NO: 5818 - DNA, 6784 bp, Arabidopsis thaliana landsberg
cacttcgattccatcttcagagagttggtatggacagaacattactcctgcattgtttctgcaaaatccattttgtgtacaattgttataattattaattaaaagtatgcacttttttttttcacccaaaaaaataaaataaaaacagataacatttatttttcttgctacacacatctacaaatctagtgatacgtgtgtagagatttggtagtaataaatgataccacattggaaaatgtaaagtaacattgatgttgtcaaaacaagaagaaagaagtcaaatgtttagagcgaaaaaataatgtcattgtcacagcattaaacatcaaaaaagaaaaagctgcataaataattattgggtgtcgttgtttattacctaactaacgtaaatagtagtactacacaataacagaggaatggtaaccaaaacagtgttaattaacgttgttaatgtggaaaccattcaaagcctgtaattgtcataagaatcaataatccaaacgctaaaaaaggcggtgcaaacgctttaaactgaatgagagaaagagagaatgtgtacatgaggagattgagaggaagatggagggcatgaaattcacgaacaaaggctttgatggatttgatggaagagagatctaattgaagaagtgtgacacgtgcgtttgcgttttgtctgagaatctctgttttggcgttttctgcagctcccatgtttcgggcaccgatcaccacatgagcacctctcttcgacagcactctcgctgtctccatccctattcctcctgtccctccttattacaataataataaatcacataccaagttttgttagcaataaataattaaaacatgttcaaaaacgtagcgatgtaaattttttgtaaatgtatgcatatgcatatgtgaacctgtgataattgcagtgagattagttgcatcaatcccttgagtaacctcttcagctgttgaagctgaaccaaatccacttggtcctcttcttcctgtgattagtgaatataatcccatttttaatagattgacctcaagaaacaatgtagaagagagagagcgagagagacaagagaggaagaagaagataggtttggagaataaaatggtactatgagagaatcatatttataacgggcaaagagtcattaatgcttatttttggtaccttctattttcatttaccttattgcgtgaatttatccatgagttatgaatacacattaaacccatccccaccaatattgaatatagatatgtacagtatgtatattagttttttcttgtgacggtcgattctcgatagtgcatgcattcgaaatctaattaagaaaaagttcgtatttttcttcgatatagaaaataaactcgctgttgtcaacttaagcatgtctatttctaaataagttgttgttaaggtctctaaacttttaagtcctttttctctaaaaaaacccttctaatattggttctaaattgccgacaatggcgagtgttttccctctcttattattcgaaaatgttactataccataaaagtttattaatctttacataatttacacattactttccccttttcaaaacgaacaaaataaatcgtttgctatcaaacatgttaatgtacgttggtagtaatgtcccctccttttttaggggtatttaatgtcctctcgcttttcgaagattaaaacaaaagaatatgattcgtgtgtatagaaaaatgaacataatctaagtaaacgttacatttggggattgatgattaatcccaatttttgtttttttttttataaaaaaacactgaaaggtattaaggtgctctaagctattgaaaaacaaaatgttgaataaaaatatagggatgaccaaattattaatgaaaggttggtgagaagccgttggttactatactgagttttcagctacttgacatcctcctttcttcacatgtttccagtgaatgtgttaccacttacccaaatccctcctaatttaggggcgagtttcatttaattaaccatctaattagtttcattttttccccaaaacttagggaggttattatgcaactaaaccgatgactatagtctaaaccaacaaaatcaaagtggtgtgggtttgtttctttcatgtagagacgaaaatacttgactttgtcatccatattcaaacctgcattggatgttcttgtcatcggtcgtttacagagtttttgaccggcagataaagaaagatatatacttatttggataaagaaacaatacagaatgtataaaattaattcatagcccgtgctcatagatatcgatgttcctttcacatcccgtttccaagttcagagaatccaactacgagatttggatctttcttttttttgccttgcaaaattgattgctgagagagcctcataatgacattgttaggtggtagatttacacaaaggtacacacacacaccactatcgagattaatgccatatttattattgttattattgtttcaacatactaattcgtgatttaaacaatcaaaacctataatgctttatgatgtaaaactgatagttgaacaaacttgtcgtggtagctgagagtatattcttttcaaagctgaacttatatttagcgattattttgtttgtttagtactctataaccggttaacattattttgtttggcatgcaacgaaacaaatctaaatagaatggaccaacctacatttgtaactgcttcagtaaaaaagaaaagaaaaaaaaaaagaaacagaagagattatattgctagatctagcacctatatattaggatagtcgaattatgtaagtagaataatgaaggcatttactctatctatcatgtttttagcggcgactggcacatgacatccggctcattggctcatttgtatggggaagtgatgtgaccatgtgagactataacgtctaacgatattgactatttatttccttatattatattactgccaaaaaaggcagctcaaaaaatactattgtgcaacggttattattccatggatcaagatatcaataattttttgttaaccacattttgtttttatcaacatatttaaatattttgtatagtaattaatgtgtcatcatttgaatacaaatctgtatatcatataataaaaaagtccacttaaccattaaaaatttcataattcgtctaaaattctacataaaatcttctggtcaggttataaagatgtctttaacactcatggtacaagtaatttgttaaatagcaaggcaagatttgttttccaaattgagataaacaaagaaaaaaaagggttgacttactaatattaatacgtgaatgtatatgtacgttgtgatacagtcacatactgtgcccatacaggcaatgcgtgtgcttcacatgtacttgtccacatctttgattatgacaatggccggagggaaaaaaatataataagttgaagtggacaatgaggatgggccactggattttatgagtccaaaaggcccattaataacttaggggtctatttagtaaaacgtaagggtttaagggcagaaaagctatattgactaaagttgaggtgtttatcgtaattctccgagaagataatatctgtttctctctctctcactctcgcggtgcgtaattccatctttgaaatctcagagcaacaaaaccctagctatatttctcgatatcggagaaaagatccggcgaagatgtcaggtggcttagatatgtcacttgatgatatcatcaaatctaatcgaaaacctactggatctcgcggccgaggaggcattggaggtggcaataacaccggtggtcgcggtggttccggttctaattccggtccgtctcgtcggtttgctaaccgcgtaggagccagaacggcgccgtattcaagggtcagcccattgattttatatctctccctttaccttctcttccttcaagaatcagagaattccttttagggtttttgtgaaataaaaaaaagctgagatctgttttcgtttcttctttgacgaataaaacagccgattcaacaacaacaagctcatgatgcgatgtggcaaaacgacgtcttcgcgactgatgcgtctgtggcggcggcttttgggcatcatcagactgctgttgttggtggtggctcgtctatcgagactggaactaagctttacatttcaaacttagactatggtgtctccaacgaagatatcaaggtttgtgctttagaagtttattatagttccagccttacttatgagaaaaattgtggttttgtttctgatcttgagatggttttgcttctaggagcttttctctgaggttggtgatcttaagcgatatgggatccactatgataggagtggaagatcaaaggtacttacttgataagctttattgtgcttcagagatttgtttattgaatcgtcttgtcatgattaaacttaatgatgctttcaggggactgctgaagttgttttctcgaggcgtggggatgcattggcagctgtcaagcgttacaacaatgttcagttggatggaaaactgatgaagatagagattgttgggactaatctttctgctccagctcttcccattcttgctacagctcagattccttttcctactaatgggatacttggcaactttaatgagaactttaatggcaatttcaatggcaacttcaatggaaacttcaggtttgtcttgtttccacactttgttcaatatggaaacttcatagtatcatttgctagggtctatcaatctattgctaagtcagttagtatcttgatgaaatacttatgttttgttcttctgttaagatggcctatgttttgttcttgagttagtatattgacgaaatgcttttttggttaggccaagtatatcctgataggtagattacacgaaccttgtactcctattaaatattttggataacctgttatgcaacagaggcagaggaagaggcggttttatggggcgtcctcgtggtggtggttttggcggtggtaatttcagaggtggcaggggagctagaggacgtggtggtcgtggcagtggtggaagaggacgtgatgaaaacgtatctgcagaggatcttgatgctgaattggacaagtaccacaaagaggcaatggaaacaaattagaaaggggagattaaacctattgcatgtctacatgtattccttcctttagtgccgatatgcttttgtattagtatgatctttagattgaatgtcaatgggtctgacattttcgagctttagcttttgttttttcttctcttggtgagcttcttagctttttgcagttgagttcagagaaacaagcattgtgtgtaccgtggaactcaaaactcttctaaaatatcaattcaaaacacaattctatctactctcttactacgtatactttgtcgtttcaaacttttgagcttgaagcaaacgagatccactatgaatttactttgtaaaaaaaataaaggaagctagtaatactaaaatattaagagagtttcacgaccaacaaaatgattacagacagggtcagagaccataacaaacctacttattaattatgattacagggtcagagaccataataaacctacttattaattaccaaagtttgaaatagtttatttgattttcaagtttcttcgctttcgagaatccgatccttttcctatcaagaagaagaaagaaaaaaacaacaaatattgtattatatagtgaaagccgttttcatcaaaaaacagctttaaagaactaacctttagatggagcggagttagtctcactaccatcctttacttggataaggttccgatcctgcaaacccagacaatgttaaagactctgttcccatggttggtctagtgttaaggaaatcaaatcacaaaccatatcataacagggaatttggttacgccaaaactctagtgatgacacaagcacccttcctgcaaaacattaacaaaaattctttttttaactaatgctttcaacagagccctttggaagtgaagattttctactctctattaacctgatcttgaccgtttctgtcccaatgaatcagtagacgccgcattggtcttctgctgcttcacttttttttccggtgttacctttgaattacataacaacaagagcattaacactcaaacaggaatatcagaggataaccatgtaagtggtggcataaggggaagtggttacctccacatcaaagtcgattttcctctttattttttcccatgacaagttttcttcagcttcttcagcttcagacctgaaatgattcataggctctacaacattgctgttactttgaagggtcttctcacttttctttgattttcctttcgacaggggatcttgaaatgccttcgataccttcactctaccttttcgctgtactgacatcagtgattctttagtagcattcttacttgttaatctttcaacatctgtaccagaaagccttttaccaaatcctttcactggtgatataacttcattattgatagccacacatacatctttttctacgtcattgctcttagcattatttaaaccttccttactatgttctgcaacattactagtcggactctggagtttacacgcatcgattttccttttgttttccgcacttttgactttcgtcccagagtaattcatgggatctactacattgttgtcacttctgaggatcttgccactcttcttggatattcct

SEQ ID NO: 5819 - DNA, 2689 bp, Arabidopsis thaliana landsberg
agaatcttgatgtgcaggatgaggaacatcaacaagaaccacctgaaagtagatctttcaaagtgctattggctagcttcccagatgattgccaagcagccgagagaacccaagacatctcaccacatctatgtttcatctgcttgctgcatttggcgaacgagcacaatctcagccttattggttctcaaaacttggatgatctaacaatacaccttgcctgaacgaaaagtgaagatagaccaactcatcactatgcctaataagtatgttgtagttcaatgtaatgacttgattgtgttgtaactttgttcaaaatccactaatcctttgttgtttggcttaaatgttttcattccatctgattgatttatctccatcagaaaacttaaatacaatagtatgaatcaaattcacagttacactgaaacttttctttcgtgcgataagaaatcaaaacctttggtgtgtccttaagcaacctcagtgccgcttttggatttaacagttgacttggtggctccatctttgtatcctttctgacgagctctctgttcccacatagaagtcagcttcttctgctccacaagtgctttttccgccttctctcttgcttcttcacaagtctccatacccgagttacacttatctgcctccttttggtaagatgatgttatcttcttggcctctagcagacccgtgtctactcgtttgtgtttctccattgatgctgcttcacgctgcttcagttcctctgttaaaagttcagcgtagttcttctctgtgtcttcgttcacctctggatcacgctttgcacaatctgcgcatcaaaagacaagatgttcttaaaagactcatttactaaaaacatagtcaagagttttcttccgggaactctatgaccggaactctttaactgatgaatccaattgacagaaactcaccagtgaatgaaccattgctgagtcctgcagcaatatgaaaacaagtaaaaagagttaggctttttattttcggtatcatccgaaaaatacacatatagtagataaagaagtttgtagatagtaaagaagcaatgatcacaaggcattgtggacaaccatatcaacctccatgaaattcattaagagtgaatcacatacatggataaagataaagatagacacattaagagtaaaccacatacactgctattagaaatcacaatgaccagaacaagtaaaccagaagctaaatcacaacacaagtcagatctcaaagactcaaacttggtgtttaaacaagaacagcagcctgcaaacttcaaatctccatgaccaaaaactatagcttcagatatacttatcaaaccaaataatcagagaaacaaaacaattcttgtagatctacacaattcttgtctatctatctgcatagagattcaaactcaaaatccctaatcaagctaaagcatgcaatctggcaactcaatcaccaactactactaaacaataccaaatatgaaaaaggtactaaacttgctctcatttgtctcagggaaaatgagtaaacttaggagccgatcaagcaagatccaataaagggcaatagtgattaccagttgggatggtgagaagaggcaacgaagagcaatcacagacgcaagcagagcaagaagtggctgaaacggctaaggcttccgtgaggtgccagtagagcggtggaccaagtatgtagccaatcatgctcagggccagcaaagctagtcccaccttcaacgctgccgtgtgcttcgccattcgagatccgctgatctgggtttttacaaaagattccaaatttgagctgttacagccagtaaggagaattggatctgagtctctctgatggagagtatggactcttgcactcagattatggtgtcggtggagattcaactgaatggttttctatacttaggtatgggaccaataaaaacaaagtgtaagttgagacttgagttaatgggtggactctttttactcggtgatgtttttgacttacagatactaattttccaactacgttgaatccagaagctgtgtagagacatatctatgactttatgtattgactattgaggatgtgtctaaggaggatcctccttatagcgttacaaaagtgctacttattagataacgttaggcgatggaattgctactttgttgcaaggaaaatatgactacaagaatctttcttctcaagaagatgagaatctttagtttgggtttattgagagtggagcaactaatgctgcaagcctgcaatggtaagcttctttttttgtctcttcttctgattaggattctgactttcaaatacaatccttcccaggagcagcgacatgttcatttgatgcaaacccaacaggtggtttcaatgtttctgtctccacagatgatttgtttggcaatgatactgatgaggtgcagaagaaacacacactcaagataggaatgaggaacagacaatgggcagctatgaaactttgtctttggatactgattgtgacaaaggtgcatttctaaatagggtatgtaaaaaaattcggaggagatcagaaggtgtagcagaaaacctgaaactctgggagagcttgacatagcaagcggcaacaagatcaaaaccaaaatgctctttgagtattcaaatcaattgtattaagttttcc

SEQ ID NO: 5820 - DNA, 2142 bp, Arabidopsis thaliana landsberg
  unsure (1)..(2142): unsure at all n locations
tgtccacatatgtctatccaaagtgtgtttaacttaagagccgatgccttactttctaaaaggatactactatgtttcactctgatgcaaacttagtgtggctagcatatcctgaaagaaactccaaattgcacactgcatgacaaaacacatgcttctgatagcaattctgattttaaaatacaagaataaccgtctttggtctctagccccaagtgtacctatcacctaaaagaaatgtttgaaagttttggcattgtccatcactagcatcatcaacggctccaatgtagctagatcactgattttccatggtgatctggtcctttgatggtgtttgatcttccttattagttcagaaaccagcatttcccggattaaatatcgaaagaaaaaaaatgtggttccgatacaagaattataagaaaatagtgagcattacaaataccaaactaaaagggtgcaaccggaagtaacacaaacatgggatttattacatacactaaactcagagaagaaaaaaggtgggatataacgaaacaagaaagaatctctgaaacctttcaggtcttggtcttattagccttttgataacaacgttaatcatcaagccttgaagagaagctccaaagcttcgaagaagagaggcgcaatctcgggagtgggagttttcactgcgcatttgagacctggttggcccaccattgcagtgagctcgatcaaaaacggtacatctcgtggatctttggctgataagtagatcacgtcttggttcccgttcttgcgctttgctataaagaacatgttgaatgctgtgagcaattcgatagttgattcgacgctcgtgatggtgatcccggggaattctttcaggacttcatttgagtccggtaacgacctccatgtctgattaaaaagcaaacaaaaacttaaaatctttgaaaacataaagatatatccaaatgaaaacccaaaccgtataaatttatctctaaccgatttggtttcacagtcgtcactattttcctaaaccagaaccgatatgaacagctcaagttttgaagtatgttacctcaaggaaggttccacgttccattctaccgtcttcaccgaaaagagcatgaagtataatcttatcggtgaagtaccacacgggctgctggttgtttttgacagcgacttgtaagagcgagcttggaggcccagcagacatgttttggaacaagaccataggtagcattgtcctggcggatgttgcgggatgcaaaggcggaannnnnnnnnnnnnnnnnnnngatattggtttcaatgattcagacctgagtttcagacgttaattagattcagatagagttacctgaagagatccagcagctgcaaggccgaatgtgtttttgttgaactgaatcatgaaaccatcaagaaccgactgcgagttgttctcgaagagcatactgtaaaatacttgtccatcttttcgggataattgagcgcttatctgcagaccttgaccacttgaagctgggacgacaacgggcagaggaggactacgatcaagttcataagatttgatgagtttcagtatgaactaggcaaccgaaattgacctaacgtaataaactagtcccaacaatagaaagtttcattaatcaagacataactcacccagattgagttatgggatcatcaaccgggacaatagcggcattatccaatcccatcaggtcacctagcagatcaggtacaggagctgggaccgctggtgctggttgtcttccggaaggctgtgggatattacctggaggagaagctgcactatcaaccggattactagatgagtatcctgcttcgcttccttccgcaaagtcctcgtcttctgttttctgaactgtcgttttcaagcgggtaacaaaagcctctgggggtttgtggtacacagaggacaaggtcgaaatatttgtaagaagctcatcaagaagtgatgggtctagctggtttgagtcgtcagaaatcacgggcttttcagctaagacaacatccttggcagcctaatcaagagaaatgatgagttcagccaaatacatctaaagagaaagctcaactgataaaaattgcttgttgcttgaataagcaatccataat

SEQ ID NO: 5821 - DNA, 305 bp, Arabidopsis thaliana landsberg
cttacacatttctttatatgtcaataaatacacgcaccagaagtcaacaactaaacccataagtgtagctttaacttacacatcaactaaaagagattagggtttaaattaattgatggtgttaatcttgagataataattgtctatgggtttaagcacatgggaagcctcctcctcaatgaactttaactgtcctttcgtaagatgcaagtaaaccacccaatctccgttcccgtcgtccaccggactcggcatcggcatcacatatccggagcttccctcccatgggaaatggtatacccaaa

SEQ ID NO: 5822 - DNA, 512 bp, Arabidopsis thaliana landsberg
tagtgtgagaacgggatttccgtataattgattcatcatccatagaatagtattttgtattgttgttgcgtcatcatctatattgaatgtatatatgttgttggcaaaagaaccaagaattccagtattataaatgtattatagattgagcaacgttagtaaagtaatccaacaaacacatcagagagataaatttgattcaaatattgacagatatatagtacattgtacggttgcataatcttgtaacgaatacaagaattcaaatacgaagtcccaagaggcaaatataatatcacataaaatggaaaacaaggaaaaaaaaaccagccggagaaattaaacacacgaattatatacccataattgaaaactaagagattagtttttttttttcaaatcttgagataatcattgtcaataggtttaagcacatgagaagcctcttcctcaatgaacctcaactgtcctttcgtaaggtgcaagtaaaccatccaatctctgtcgtccac

SEQ ID NO: 5823 - DNA, 2360 bp, Arabidopsis thaliana landsberg
gactccataggtcaagcagtctaatcaccaagaatatctcaatggagggataagttatagcttttttaatatttgttatccaaaaatttcatggccacccatactatatatacacatcatgatcctatctatgtacacaattgttatctctatcctaattcaagagtaatctttatggatcttcaaaacctttatgtactttaaaagctaaaaaacaatgtgaaataaatagttttggaatcaacaataaagaataatgaaaagtgacatagtggatcccatagctataaattaagtaatagtaacagtaatatcttccttttcccaatttcaaatcaaaccaaatcagcgactgagatttggacaaacaaacaaagaagctagctacttctttggtgcttagtaatcactaagaccaccatagtatgatcaagtttgaattcggttcagacagatagtgaactcatgtaatttacttggcttctggggtttcaggtgtcatcataagtaacaaatcttgtagatgcaagaaaaacacacacacacaaaagaacccatagttgcaataacgcaacaaagtgtatgaaaataactatgaaatacttggattatggtgaggttcagtgaataacataataatgaaacaatgcagctaaaacatgacaacactaattgacaccaattatgtcatacaatgtgttgaaaatttggctaaagctgtcttctaatttgcttattcagacagaactgaacatcaagggggaaaatgaagaagaatacaagtgctaacaacagcttattagtagagcctaccactacactcagcggaaccacaatagcaaaatttcttcttgatattaccattagagtcgtatacctgatcgatcttataattgtagtcgtacgagagttcctgaagtggaggtatattgtccagtgcaaagaacataatgtgaggtattcttatttcctcatggtcgtacaatacgtcctgtgcgtacagattcggcgagcagctatggtttataaacctccctatgttccctttctgtgctgcgtttatggtgaacggatcatcctcgtccccgagatcaaaaagatactcatctttcccggtaaggctttcagcttgtttatcctctagaagctctcctgcgtactcacagatgaagctcccgataggaatagattccagcgatctcactccccaacctcttgactccgttttgaagatctccagcttgatcttgatcccgtgctgtgagactctcatgttgcaagaaggtgggcatttgcagtgtgggccacactcatagaccaggggcttaatttcaacaatggctccatcgtaataaggtatctttccaccgtttttcacaatgcaggcacagttttttgacttggagcagccgtttgtgcaaccgcagctctttggaggaattggccggcaccaatccggatatatcattttagccgtgtagataaacggtggcggtttctcatcgtctaaattgttcacagcgcatatgggtaatgtctctttcccttctgtgatatcaacattgcaaagaccatcccggaactcagattttttcgatttcgcaacctctttccagggaagctcgggttgtccaggaatacgccgtagtttgaacttgaagacgagtttaccgtgagacccggtttcttcccagtactcttccaccagatacaatccatcgtaaacataattctttgcaacaactgatgattgtaatgtcgtatttttgatgcctcttatgacccgcacagggttctttttgtttatactgtttttcaacgcaaggtttcccgttacaagctgctggtctttgggtggttcattatttttctttttccccacatttccgccttgacccgtgtagatcaagacatcagagttatcaagcacgtcattataacctcccgaggatacaatactcgtggcaactagttccccaccgtcatctttcatatagtcgataccactttgacttggtctatgtataccaagaaggttcagctccattctatattgaaattcatcgccaacctcaacaccaggcacagttccaataatctgagtaccactataaagatttttccctttactcttgagaattttcgaagcctcgcaaaccactttgaaattgccaccatctcttttcctaagccttgcttcttcctcttgcataatttttttacaagtttcatggaaaagacgcattgtttccttaactttataccgagcactatccccactgcttgagcaactaggaagcccaccatttgataaccgaaatttactagctaatctttttttatccagggcaaccctctca

SEQ ID NO: 5824 - DNA, 572 bp, Arabidopsis thaliana landsberg
cgacaattaatatatatttaaatgatagaaattttttgtaaagcaatttcatgattgtaattggaaatttttgtattaaattttatttgtgatcaaaacttcaaattgatatttagtttttttttttttaatagttcacatatttatcatcatatatcggctccaattgctttttatttttaaagggtttatcgtctccaattgctaggaaattagaaatacgagtgcatgtgtatactttttttacagataagagaaactcatactcatagattgacaagcttatggaaccaataaacaaaatggttacgttcttattacccgaataaaaaaaaaggttacgtttcatgcaattatatgtgaaaatctttaataaaaaagggatatttaaaagattcctttttaatgggtcctaaagtcattaaaagataaagtcaagctttccaaccattttccacaaagttgatagaaactattcatgagtgcaaagcgagaaaaagagagtaatacctaaacataggatcaagcggcaggtaattacttcattttaatggagagaaaaaagaaaagtg

SEQ ID NO: 5825 - DNA, 1073 bp, Arabidopsis thaliana landsberg
tatgaagagatacacatgatagttggggatacttttagatagacatttaccatccatgagtcaaatatcagttttattcaaagacaccaaaagacgaatttcagtggctgatttacgaacctaattccatcaaaccaaacacaaaaatacaacaaataaatccaattaatgtattgaaggatcaagaacttgacccatgaacaaaatcactccactcttctcttctctcactgtgaatagaaatggatggtcagctacgaaatctcccatcaacaacatgtcctttgtcatgctggcaacagaaacggctgcagcttcagttccctcttcatccacctcaatgcaagctttgtgaaaaacatttgagacgaacaaattctcagcgacgcatagattctcgggaatggaaggcgactcaaccatctcggttagactaccatgtgtaaatggtaaagtcagccccatttccttcaaaacatctgaagctttaaactcgaaagagaacttaaactttggaatcttgaaagcttccgttaatatacgttggcgcggaatatggttatcaagaaatcggggtttggagcttatttcctcaagaagagtaggtaatccatctctatcattaggaagataaatgtacatggcgaattgacgttgatcttctacataaggaagacgcaaaactttgaaaccatcataatattctaggtattgcttcttgtaattggtcatgaaggggactttcaccatggtgccgtcaagaagatgaaaatcgtaactttttgttaactttgcatcaaattttttgctccaagctcctttgaagtacactgcattagcaagtattaacatactttcacggatagtcttgatagaatcgtctgaaagaatctctttgatgagtccattggtgtggacttcagcccatgcattcacttcattaatcacttcagcaggcttcaacataagtgaacaacaaattaccaatcacaatgaggaaattggaacattactcttaggtatctcacatctaaattaagatggaacctaaaaaaaaaaaaatgttatagacc

SEQ ID NO: 5826 - DNA, 6237 bp, Arabidopsis thaliana landsberg
  unsure (1)..(6237): unsure at all n locations
aagtttatgcctcagagatctagttgtagtatctcctgaggtgcattgcgttccaggatcttggaatggnnnnnnnnnnnnnnnnnnnnagttcgtaaccgctgggtcggacaactttcgagattaagtatggtctgtcccagtttgcctcgagcttcccagcgttttgaaagactttgcggagaacccgatctgcttcgtgaaatcttggctgctgaacgttcgaattgtagtaccgagccgtttcattcttgtaattttgtatttgcatcaaggctgaatctcttcgctcattgatcagatctaactcgtcgagcatgctttgagtattatttgactcgtgctcgggaaacaggcttctacgcagactcggtaccgtcattttcgcgggaactacacattccgttccgtagactagtacgaacggagtttctcccgtggctcgacgaggcgttgattgatgcgaacatagtattccttcgagttcgtcggcccacaaaccctttttggtgttgagtcgttttttcagactgtcgagaatcgttttgttcgccgcctcagcttggttgttcccctgggtttatcccggtgttgatttgttgagcctaattccccatttatcgcataatctttggaaacaaccgaaataaattgcgagtcgttgtctgtgacaattcgtatgagatcccgtggcgacataggatgtgcttccacacgaagttttcgacttgagcgtctttgatgctgacatatgattctgcctctatccatttagagaagtaatcagtcaggacgaggattaactttttctgttttgaggcatgcatgggacctatgtccatcgaccaatgcattaatgaatatggcgaggcgatcgacgaaaggagctcggctggttggttgatcatgggagtgtgtcttttgcattttttgcatcgtctagagaatttctcgcaatctttgatcattgtttgccacaagtagccgtggcgttttattctgatggctagggcctttcctccggaatgatttccggatgagcctccgtggatttttttcatgactttgcgagaagcttctttttccacgcaagtcattaaagacccggataatcgccacttgaagagtttctccttgaccaaaacgaaacgcgcagcttgagctttcaactttcgagcttcccacttatccaaaggcacactcccctcggatatatagcttctgagggggtctatccattcttaatcacagcccaagactgagctttcatcctaggcactttcgcctgtgggtgaagtgagacggatgcccacgcccgatccttctttgacaatgagccgtccacgtgaaggagccaagttgtatcaaacggattttcccgagcttcctttgttggtagttcaacgataaagtcggcgaagacttgagattttgcgcaggtcttgtttcgatattcgatgtcatattcactgagttcggtcgcccagtaagccaaacaaccttgctcgcttggactatgcagtatagcgcaaagtggcatggaacccatcatcacgatggattaggattggaaatagggtcgtagtttccgagccgatattacaactgctaaagctagcttctccttttgcgggtagcgagattccgcgccggtaaatgtctacgagacataaaagataggtttctgtttgctcagtcctcccgaactaaaactccgctggccatagtgtctgacacgacgacatacaaatagagtggtttcccgattacaggttttgcgaggatcagtgggctcgccagatacttcttgagttcttgaaaagcctcctcacatcgggtcgtccattcaaattttttgtttccccgaagcacatcgtagaaatccaggcatttgtcggtagaccgcgagataaattgattaagagctgcgactcttccggttaaatgctgcacttcgcgtttgttcttaggtgatgccattcccaataatgcctcgatttgcttcgggttttcctcaatgccgagttgggtgactagatatctcaagaatttgccggatcttaccctgaaacgacacttggtcggattaagcttaacgttatagaggttgagctgttgaaaacatttgcgcaaatgggctaattgttctttttcttccatggattttaccaaggtgtcatcaacgtacacttccatcgttttcctgatctgcaaggcgaagatcttaagtcccgaggtttttaagtccgaatggcatcactcggtagcaaaaaataccttgttccgtgtagaataccgttttctcttggtcctcaggattcatcattatttggttgtatccagcaaaagcgtccatgaatgataacaatgtgtttcctgaggttgactctacgaggcggtcgatgtgcgacagtgggaaactatcctacggaaaggctttgttcaggtcagtgaagtcgatgcagaatctccacttgccgttcttcttttttaccactacttgatttgtgagccaatcggggtattttgcctcggttatagagtagattctttaaagtttttctacctcggctttcacagcttccgctcgttcccgacccaattttcttctcttttgcttaataggtttaaaggttggatcaacgttgagcttgtgtgatacgattttgacgctcactccaagcaaatcctacgacaaccaggcaaaagtgctgacgttatccttgaggaaggaagtcagctcagctgttagttcttcgcctaagtctccaccaatttccacgcaccgctcggggttttcgtcttcgagacaaatagatattactgggcctcctcaatctttaattgctatgttgtttactaggcctcctcgatcatcgagacaaacacacctcaggctttgttgatttccgagcctcctcgatctttaattgctataactgctcggagattgctttttcttcagctcgacccagcttagccttttcgtgattcgcctcggctgttgattcgatgacggggtttctgagtttgtgctctaccatgaagcaaattcaggcatttttctgattcccccagatggtcttcatgcagttgcttgtgggaaatttcattcagagatggtaagtcgaggtgacgggtcggaattgatttaaccatggcatgctgataattgcattgtaaatggttggctaatccgtaacagagaaatcgacaatttttgttaactctttggctcggactggtaatttgatggtgtcgagggtcatagtggtctcaccagagaaaccaagcacaggtcgtggagtcggtacgattagggtcataccgatcttcatttctcgcggggtcgtcagaaaatgatgtccagcgtagtccctgtatcgatttaaattcgctcgacgttgaaatccccgatagtcagtgtaatgaccaagggatcattgagcggccgatccaagccgttagtatcgctctcatggaaagtgacttcgtcatctggtccgttgaacggtcgtgtcaagttacggattgagtcggtcttcctctgataagctttgattgaggctgttttgtcctgacaaaaagccgaatcgcccaaaatcgtgaagattctcccccgagcagcttctggctcgtcatcatctgcctcgcggtttccctgacctctcttgggccctttaaggatcgctgcggggctgcctgtaacgcccgtgagacgctctatgaacagacaagtctcgggcgccccgaaaacgccacattgagattgatcatcaacatccaaccgaggttcgggaaccaatcccaacccttggccggcgtattgacgaccactctcccacttagaatatcgtttaggcttgctaacctttacgatgttaagtgttgtgccaagtcggactaagtcattataagtcattactcgtaaatttgtacaagaaacccgatttatttcataagtataaattttacaacatgttaccaaacatttataagttttatggccaaggcttagtgccaaaagcacggtacataatagaaacatacttgttttacaaaaggcacaaacccactccgggtttcctattgtcccccatgccctctatcccccactatgggtttcctgcaaaatacgtaaaatcatgagtaatcttagattactcagtgagctatggattccctgcaatagacattagtttaccccaacccgaatacccaacatgaaccacgcaacagagaatgacaatgaaaggtagcttgtcgaaacaaactacaaaatcacgcaaatgcattaagactccagttttattaagttttaaacagcccgatatgctgtcttcaaacccaacaccaaacacacacactcccgtgatctcctgtgttacaaccacaaaggtatgcaactggagcatcagtaccaaacgctataccgtcttgtagacactcggccagggtagctagccccgtgtctccgagtttttcgcacttcatggcgatcaagtgacatcgttacaagaccccacgatagcacagttcactaagaaggtcagacatatcacaatcttggcacgcttatggtctttgcctcctaccacaagcaccacgtaccaagaccccaaagtttaagatattatgaaacatattgttaaatcactcatagaatcatcaatacctcaacacaacctctcaaccataaacaatagcagaagaatctaaagatcacatatgcaatccaatgtaaccattcacatgattcatataactcacaaaatcaatcaaggatgcatgagaatatgattatgaaacttaaaccattatccagaactcactcagtaatcaatggaatgcgtgtaacgattcgggcagagttttcggctttgggaccttaactttgcttaggccccaagtcagccgagccacgcgtcctaggcgcggtcaacggtcggtcaacgcatggcggggcaaacttcgcctgcggcacggccgtttttgcccaaacttgcccactggtgcccaaacttgcccgttcatgcccaaacttgcccatcttttccccttgatagtctattgtgttttgggcaattaaggttaattgtccatgcattcgggcaaatttccgaaatttggactctcgcccgtggccaagtccttaaagatcaaaagcaaaagtaaattttaaacaaatactttaaagattaaaagcaaaagtaaattttaaatccttaagaagtgtatatacctagtgggttccctcttattcagcgcacttgtttaacgtcgtggcttgacgtttgggaacccattgggttcaatagggaggagcttcaaggattgcttctcctttggcgtccttgatatcttgatatcccgccgcgcttttatgttaagttttcttctagatggagttttagaaaccttaccttgtaggaaaacttatttagtttgctttatcatatcttggatatgttctttgccttcccttctatgctccagaggaatgaagattttcatctttgagatgttaggccgtttaggcggtttggacttcagattttgggccctctgtcgagcttcacggttgccattctccaccttgttggtatcaggaccaacaagattgtcaggcagaggaattaccgggtatgagatcgcctttgagattgttggatagacgattttttgttgaccttggtgaatatggttttcttgcggttgtgatcaatcaggcacctatagttgcgagaaaagttcgtcgcaagaataatggcttgtcgatctccttgtctatatctaacacgtaaaagtctatcgcgactatgcaatcccctacgactagcagaaggtcgtggagtaatccgttgggagtcttttgggacgaatctccgaagactagattaaggttggatgtagataaatctcgcagtccgatcttctctgccacacttgcctagggtctttgcctttaggaagcttccgtaatgggtagcattcgggcttcccctttacaacgttctttggatcgcagaccacgttcttgtggggatcggtaggtgttactaaggactcggctttgccggctacaatgttgcaatatcctttaggattttcctcagtccttcctggaagtgtgccgggctgccttttgaccgactcagagttttgcactatttgagtctcgagcttcttcatatgcgtggtaagactttcaaactttccatttaactcaccgtactt

SEQ ID NO: 5827 - DNA, 674 bp, Arabidopsis thaliana landsberg
cactacatacttgaaacaagctatttcatcaatcatcacatctgcatattcagaaccattcttatttattccccacctcttcttggaaaaacatggagttaggaaaatcaattgagaaccaaaacaacgtcgtggcaagactagcaaagaaagtcattgaaacagatgtcgccaatggctccaatgttgtcttttcaccgatgtcaatcaacgttttgctcagcctaatcgccgctggttctaatcccgtcaccaaagaagaaatcctctcattcctcatgtcaccgtctacggatcaccttaacgcggtcttggccaagatcgcggacggcggcaccgagagaagtgatttgtgcttatctacggctcacggtgtctggatcgacaagtcttcttatttgaagccttcctttaaagagcttttggagaattcctacaaggcttcttgtagtcaagttgacttcgcaaccaaggtaacttttttcgttagggataaattttgcttcaattattaggggaccgaaacttagactaatccctataacatagatatataaaggtgaatgttcgtgttatttaagacgtttaatgtggttacgaaggaaacggctatatcacattctctttttttatttcttcaatttcttgtgtatatatgagatccaacttcacta

SEQ ID NO: 5828 - DNA, 2519 bp, Arabidopsis thaliana landsberg
ttattctggctttacttcttggatgtttagcttgctacgtaaattgctttctcaaaattatttacagtttttggtgcgtaatattgttcagacaatagttgctttaattggaaatttgtttgtgtttttatctaggtggtggaacttctcatacgaaagttggaaagtgaatctcacttccatcgtaaagtggacttgttctttctcgtcgactctatcacccagcattcgcacagccaaaaaggtgagctttcctcttggatagatgcaatacctgttctcaaattttcacttccttccctgaaatgctaataataccgtatttattagcatttcagggaagtaaaaaattcacaagcattgttgtattgttttttactgtatacaaagagaacacctaatatatttattatcattaaagattaaataatttccagtgcttgtgaattttgtaggtattgctggtgcttcttacgttcctactgtgcaagctgctttgccacgtcttttaggtgccgctgctcctccagggactggtgctagtgataaccgtcgtaaatgtctgaaggtatttaaactatttgcttgtttctatgttatccttacagttttgtaggctggagtcagtgacctctttgtttttttaggtcctgaagttgtggcttgaaaggaaagttttccctgaatctcttctgcgtcgttatattgatgatattagagcttctggtgatgatgcaactggtgggttttccctgcgacgtccttctagatctgagcgtgctgtagatgatcctatcagggaaatggaagggatgcttgttgatgagtatggcaggtatgctaaacgattgtcttgcttagtagtgtactctccggattatatatgttgctgatgaaaaaataacaggtaaggtctgttgccattctgtagagggtttattaacttgtttgtcgttttttctgcagcaatgcaacgtttcagctgccagggtttttttcatctcataattttgaagatgatgaagaagatgacgatcttccaacatcacaaaaagaaaaaagcacatctgcgggggaacgtgtcagtgctttagacgacctggaaatacatgatacctcgagtgataaatgccatcgagttttggaggatgtcgatcatgaacttgaaatggaagatgtatcaggccagcggaaagatgtagcaccttcctctttctgtgagaataagacaaaggagcaatcactggatgttatggaacctgttgcagaaaaatcaaccgagttcaatcctcttccagaggattctcctccgctacctcaggaatcacctccccctctccctcctctaccaccttctcccccacctccatcccctcctctcccgccatcatctctgccaccaccgcctcccgcagcgctgttcccacctcttccaccacctccgtctcagcctcctccaccaccactttcacctccaccttcaccgccgcctccacctccaccgccttcacaatcattaacaactcaacactccatagctagccatcatcagataccatttcaaccaggatttcctcccccaacatatcctttatcgcatcaaacatacccaggatctatgcagcaagaccgctctagtattttcaccgtgagttctttgatttgttatgtttcattttactcatgattcctcactatacatatgcatcttttatcatttttgtttaaaccccctggacatcatgtgcagggtgatcaaattgtccaggggcctggaaattcttcacgtggaggtcttgttgagggcgctggaaaacccgaatattttgtgcagcagtcctccagtttttcaccagcaggagtgtgcagctccagggagccttcatcatttacttcctccagacaactagaatttgggaacagcgatgtacttttcaatcctgaagcttcttcacagaaccatcggtttcagccgagcacccctctgtcccaaagacctatggttaggttgccttcagcaccgtccagtcatttttcgtatccaagccatattcaatcacaatctcagcattcttacactcatccttaccctttcccacctcaacgtgatgatgcacggcgatacagaaatgaggaaccatggcggattccttcaagtggacatagtgcagaaaatcagaatggtgcctggatacatggaagaaattcacatccaggccttcctagagtcacagacagtatgtagatgcttaaatcctaatagaccctttacctgttaaggtttattaacttgcatgattgcttgtggagttgtaatcattgtgatacttctgttgactatgattgtctagcttgtatgttaatgccatggcttagttccttgaaattgatggtcttatttgcaattctacaggtttctttcggccacctccagaacgtccaccttcagggacaatgaactatcagccttctgctgctagtaacttacaagctgtccctgcaattccaggtgagactat

SEQ ID NO: 5829 - DNA, 1563 bp, Arabidopsis thaliana landsberg
tgtatctccagctttcgctttcttgcctgatggttttctgaatccttcttagcgtgaagggtttcacttccatctaaagaattggctcctctcgagatgttaccattaggtacaacatctctatcagaaaaagaatctttggcagatgaaaggaaattgatatggcccttacagactttaatagacacatcaggagtttcccccaccttatgcattgcactcaacaacatctcagaaatagtttcaggtgataatctatttccttctgcactatttatcccctctttctcagatgtctggatgcgttttattgcagctgctattggaaaagcaatgttgctggtgtataagagttgttctgttccttcagctagtttctttcttctagcacagaaaaccttcttcactgaagcttttggtatctgcatattagacgggaattccccactccgtatgcataattgcacagcttggtcaatgtttttagacaaatcatccataactgcttcaactttcttattctcttcacttttagcagctccaagtgtttttctccttgtatctgaaacatcaccagaggaagaagcacctctttgttccctgggctgcacatctagtttgccatccaagaacctttgacaaaacattattaagaaaattcaggaagctcttcaatgaacgacttcattagagaaatctgaagatcgtgaagaatatttacacatcagaatcatagatctctcctcatatgcatgtttcaaaggtaaaacctttccgactaagccaataacatgaacaactaacaccacaaaaactttcatctattgatccaaaaagagaagcaaagtgaagctatatgcacctttctagtcttctagaaactcgctgctgctctttagtaggaacaaaatcacttgctttcaaacgtatcgtataaggagggcaacacgttttatccatctcatgtttgtaaagataagtaccagatcttctccagcctcggtcaataagagctacagaaaaataaagcaaagatacataaaagatctctattctgtcaacaaaattggttcatcacacatagagtccaataatagcaacaaaccttggtagtcataaacggtaagagtctgtgctgataaacctgcattgacattcactatgtttatcaatcatttattcattggaactttaagatcataaacaaaatcaattcttatcaagcataggagcaattcgagaagattctactctaatcgatcgattcaacaacctaatccgtaagaaaagcaaaattaaacgaaccgtgagagatactggaccgagctggggatttacagtagccgcaagtgcttctacggcggccatgatcatcgattacgctttctccgttgcttccgccgtcgtggctactactcgcatcgtttttcaaagacataatcgccgattattcattcagaagaattttgataagctctttccgtttggagaaccagaaacaatcttccttcacatttgacttttgaaattcaaaattaaaacattgttgctgacatgttatgc

SEQ ID NO: 5830 - DNA, 2071 bp, Arabidopsis thaliana landsberg
  unsure (1)..(2071): unsure at all n locations
cctatattctctgtatcgtatcctccatatgtcttcatttccctctctctttcaagtccttgtatttaagaaagccatgaatccgattatctatttctaaccctgggccgaccagaaaactttttggacgacccaaacttcaagggttctaataaattcatcaccggaaaaagatacatataaaataaaaatctctcaccactgctgattcaaatggtgaatcttgggagctacgttttcgtctttgtcgcgttgtctctcaccgtggtggttccatcggttcaagcccacatcgccgaatatgatgaatactggacgcagcgtcaaaccaacgcattgcgagaaactttggaatcttatgacccgaacccagagaacgtcacggaccactttaactaccatgccgccttgtgggttctctaaaatttaacctagttagggtttttgatttgttatcaaaacctaacttcttccggaagaaactaatgttttcttgttttctttctcagagctatggagacgacagggatagtaaacgaaacaaggagggatctccgtcaggtcggacgcggtaagaaaaaaactagacgtggaggaaggtttgaatccctaaacgcgatcgataaatgctggcgaggcgacaaaaactgggacaaaaacaggaaaaaactagcagattgtgtncttgtatttgtcctgaaaacaaccggaggcaaaaacggaccgatctatgtagtcactgacccatccgacaacgatctactaaaaccaaaaccagggactataaggcacgccgtgacaagggaccgaccactctggatcatcttcgcgagaagcatgatcataaaactgcaacaagaactgatcataacgaatgataaaacaatcgacggtcggggagcgaaaatttatatcactgggggtgcaggtttaacgttgcagttcgtcaggaatgtgataatacataatattcatatcaaacagattaaaaggggagctggtgggttgattatagactccgagcaacattttgggcttcggacagtgagtgatggcgatgggattaatatttttggagcaacgaatgtttggatcgatcatgtctcaatgacggattgttctgatgggatgattgatgcgatcatgggatcgactgcaattactatctccaattcccattttaccgaccacgacgaggtaaataaggctacaaataaatcatagaagtatctgtggtccaaacaatacacactggatacaaacttcgaatgcagaaactattgaggtctaaggtctctcttaatgcaggtgatgctatttgggggtacaaacaaggatgtgatcgacaagaaaatgcagataacagttgcgtttaaccattttggtaagagattgaagcaaagaatgcctagagtcagatttggtttggtccatgttgtgaacaatgactacactcactgggaaatgtatgcaattggtggaaacatgaaccctaccattataagtcaaggcaatcgtttcattgctcctcctattgaagattccaagcaggtaaaaactacgaaaactttctctaatcaacaaatcactacagctacacttgagagacataattgagagaaatttggaatgcaggttacaaagagagagtacacaccttatcctgaatggaaatcatggaactggcaatcagagaaagattatttcttgaatggagcttactttgtgcaatcaggaaaggcgaacgcgtggagcgcaaccccaaaaaatccaatccctagaaagtttgcaatccggccacagccaggaacaaaggtcagaagacttaccaaggatgctggtacgcttggctgcaaacctggcaagtcctgctgagaaaagcttgtgcgtgtgcgttcatgtgttatggtaacaaacaaaaaaaaaagacaaaaagaattgtatgtgttgtggatggtgtttgtaacaaattgtgcataatgcagtatattattagaaaaaatataggtttcattttttattggatgaaaaaaaattgaaggaaaaagaaagcacattcaatttatttttc

SEQ ID NO: 5831 - DNA, 799 bp, Arabidopsis thaliana landsberg
ggttccgccttgtggcttcggctctttccaccaacaatatagaattgatggccgcctaattgccgtcggggttgtagacattcttcctaaatgtttgtcaagtgtatacttattctgggatccagactatgcattcttatcgctcggaaaatattctgccattcaagaaattaattgggttatagagaaccaagctcgctgcccttctcttcagtattactatcttggttattatatacattcctgcagcaagatgagatataaagcagcctatcgtccatctgagcttctatgtcctctccgtttccagtaagttacaaccaaactgagtcgtatatttttttactctatgccttagtttatcattgatctcctctcatatgaagttctggtacttgtaaaaagatatttatgtcctcttcttagacatgtcattgaagtgaagagactggtaaatgtaagtttttaacactcggagttgtgtttccaggtgggttccatttgaagtagcaaggccgatgcttgataaaaagccatatgtcatattgtccgatattgctatttcacataatcaatgttctttactagctggtgcttctgaaactctcgtggaaccagcagcaagtgaacatgaagacatggaacaaggggagacgaatgataactttatgggctgcagtgatgaggatgaagatgaggatgatgatgatgatgatgatgatgaggaaatgtatgggactgaatcaaggactctcatattgagtcaaaacctggatccaaagatttcgacattacaaca

SEQ ID NO: 5832 - DNA, 921 bp, Arabidopsis thaliana landsberg
tcttatacaccagcaacattgcttttccaataggagctgttttaaatcacacacagacattggagaaaggggtaggcgtagaagaaaacagattatcaccagaggctgtttctgagaagttgttgagtgcaatgagtaaggtgggagagtttactggtttttctgttaaggtctccaagggtcatatcaacttcctttcagctacccaagttacttcctcagatagaaatgaaggtgaagaaagcctttgtgctacaacaataaagtcttcttcgaacaagcttcatgcaagaaagcggaagctggagatgcacttaaaaaggtcgagttttgatccaggggaatatgaattatacaaacggtatcagataaaagtgcataatgataagccggagagtatctcagaaacttcatacaaaaggtttttggtagacactccgctcattgaagttccttcttcaggtcatgatgatgaagaaaaggttcctccttgtggctttggttctttccatcaacaataccgagttgatgaccgtctaattgctgttggggtgattgacattcttcctaaatgtttgtctagtaaatacctgttctgggatccggatttcgcatccttgtctcttggaaactactcagccctgcaagaaatcgattgggtaaaacagaaccaagctcattgctctactcttgagtattactatcttggctattacatacattcctgtaacaagatgagatataaagcagcctatcgcccgtctgagcttctatgccctctccggtaccagtaagttccttaaaccacaaaactaagatcaaattcttgttagttgtggagagcatataactgattcccttgtaatttgttctcagatgggttccattcgaagtagccaagcctctgcttgataaaaaagc

SEQ ID NO: 5833 - DNA, 3455 bp, Arabidopsis thaliana landsberg
aaatggccacataagaagttgatgtttaaaatggccacaatttgaaacttgactaataaagttaacggatgataacggacgttagaagttccgttaatgactgataacggcatgtctattttggcctggtcaacgaaagatcatgttttaaaaattagtcaacgtttatttcatgttttaaacgaccacatacgaagttgatgtatgaaatgaccattttttgaaagttaggagattaaatgacatttttcccgtaaatttttggatatattatatcaacaaaataatttcctcaaaagtatggagagttgacatgttcggacatcgtgggattggggaaaccggaaaacaaagtcaaagcaaccagagcattgcattaagatctctctgtctttttgtgtctttgcgtatttaatttttgtttttccaaattcattcaataaatatacatctaaatttacttaactagattaacaaacagatataaaaatattactacctttattcttaatatcttatccatttttttcttaagtgtaattataagtcttccaattgtgatttcaattcatgatctcctctttctacaaagtcttaaaagaaaaaaaaattgctatgaattgatatacacaacaacatgtccaaacttagctaaccatttgctaacaagaacattgttttataatgattttaaatgccactattttgcattacttgagagagttggggaatcaaacaaatgttgaataaagaaacaaattaataatgtaacccaaatacaatcgttaatgagcgaagctgctgaaagagaagacgccgaaaacgaagttgaccagaacctaccaaacgatcaaatcgatcggacaaagaggaagaagaagaagacaaaacccgaacaaaagagaaaaggcaccaaagaataaaacttttttgttaatggagatttgaggaagacgaagaagagattgaaacattgagaataatggtggagggttggcgaaatgggtttcgcgatgctacgaattcgaaacctctcttcgtgacgatctacgcgactgtgatcattggcgttctcgtctcttccttctatgtattctccgccatttactctcccaccaatggctcctcctcctttctctcttttcctcctctttccagtaacctctctctctatctcactcacactctttgcttatatctgcttcacattgctttagagattagatttgcgttctgagtttgatttcgtaaacgaattaatgtctaatcattaggtgagattttgggaggttaggctctttaattcattggttctgattctaatccgagctcaccgttgaccttaaatctcagtattcgttagaaaaatcacttctttattgtttaaaactttggatttgctataatctgagatgggttttgactttcgatcactttagttgatctgaagctcagcttttgaatctgatcaagtgataaactaatgtatttggatctgcttgaggtgtctgaaagttttgatttttcataagtctagtgttactctcccacactacaaaacagttcagtcaattggattttacgtttcatggtatttattagttgagcttgcttgagtatacattaatcttataaacagtggaagcttaaatgttgtttcttttctaattgtagcttctggccgaattcatagtctcccacaagaaaatgcaaccttagagttaccagttgctccaccaccaccaccacaagcactgccaccgccagttctggaggaggctcaaggcaattccttgggtaaaatttgggtgtctcctcctagagataagaagatgccaccgcttgagacctttaaactgaccaaagaattgtttggggaaagagtgaaggacaatgttattatagtgacctttgggaactatgcttttatggatttcattttgacttgggttaaacacttgactgatttagatctctccaatattcttgttggtgagttgtcacttctaatatctatttctgattgtccatttcactggctttctgtaagttagtaactttatgttatggggctttataggtgcgatggatacaaagttattagaggctttgtactggaaaggcgttccagtttttgacatgggaagccatatgagcacagtggatgtcgggtggggttctccaacattccacaaaatgggaagagaaaaagttattctcatagattctgtcttgccttttggttacgagctacttatgtgtgacactgacatggtgtggcttaaggtgctaattcgacagattattatcactgttattcatcacgttatcttccttaatagactttcttctgataatttatatgtgacagaaccctatgccttatttggctcgattcccagatgctgatgttttgacttcaagcgatcaagttgtgcctaccgtcatagatgacagtttggacatatggcaacaaggtagatgttagctatagatatgcattttcccctgttcccatttgaattcgtttatcactctggcaaaagtgttttgagtttattattatcagcagctaatctgttcacatggctactaactgttttctctaccgttcttttcttggactttgaaagttggtgctgcctacaacataggaatttttcattggcggccgacagaatctgcgaaaaagttggcaaaagaatggaaagaaattctcttagctgacgataaggtttgggatcaaaatgggttcaatgagattgttaggagacagctaggtccatctgtggaaggggatagtggacttttctatgcttatgatggaaatctcaaggttggaattttgccagctagcatattttgcagtggtcatacttattttgttcaggtacctttcttcatgcttcctgtttttgtgttttattatcatcctcttttcttttgtgttcagaaatgacctaacaggtaacttctattttcgatggaaggctatgtatcaacaactcaggctagaaccatatgccgtgcatacaacattccagtatgcaggtaccgaaggaaaacgccacaggcttcgagaggggatggttttctatgacccaccagaatattatgattcaccaggtaatattctttctgttaagattcttcaacattaatcttgttaatggggaaagccaaaatcaacattgtaaactccaacacaatgcaggaggtttcattgcgtttaaaccatcgattccaaaaagcttgttacttgacgggaagcataccattgaatcgcattttatcctcgttaatcaccaagtaacaactactaacctaacatgatccctcagaactatatgctaacttgaccacctttctaattttacatccacctttggtccactttacagatgaaacagatcagatcagctctagccattgcatctcttcttaatcgtacactg

SEQ ID NO: 5834 - DNA, 2135 bp, Arabidopsis thaliana landsberg
tgaacaaaacgtatatatgaaaatccgaaaacagaacaattcgaggtaaaatcaccttgtcaaatcttatgacagtgacgaataatcggatatctgattcagtcagagtgtttccacaaagaaaccgttgttttctgagtatgtcttcgcatcggtccaatgcttcatacaatcgtttcacttcctgcaaagagagacaaataattaaaatgttggaatcaaattttaattacaatattgataagaaaatcgcaaagttacgttaccacatcataagtttcttgatttgtagcaaacccacatttataaacaccgttgtttatcccatcgtgaatccattcgttagtctcatcgattatggctcggaggttgggtggataaagatcgacagaagggttttcggaaacatgattgaactcggtgttgaacattcggagtatctcagagctctcattgttaactatagtcttaagcttcttatcccaaagaacctaccaaaaacaaagaaaccaacaatatctctaaatatccgaaaatgtttagtgacgtaacaaaataagacttaagattagaccacaccatgattaaaagaacttacaggaaccgtatatttgcccgtgtagttggagctagcgatatcataaagttctcttacgcttttcgcaccattgatatgatcacgttcagctccaagaacctctgtatctgaatctggaaaaacccatcccatatgctcgtcgttttctttggtatttctccaaagtggttgaacagactaatgaacaaactgatcagattatgttctgtaaaaatcgaaactaaatgtgtcgtctttactaaccgaaaagcttatagctttgtcaagtcctttgagtttcaagattgcaagacatctagaagcccatggacaagcataagagatataaagatggtatcttcctgattctgctggaaactgagagtcaggatcttttgaaacaaagtttcggaacgatgttgcggttctagcaaaattcggattttcgttttccattggtgtagccattgttgatgtacactggagagtaaaaaaacacacacaaagcttataatattaaaacatcattgtgaaactatagattacccaattaaatctgcagggtacaacctaaccagaaacacacacaaaaacttaagtgatcaagaatgaataaagtaaatatgcacctaacacaaaaatgaatgcaagatacgatttcgatcagaaattgaccaggatgatgtagcgagcgagtcttcaactgctttcttagatggtacgtaattgataaaggtgaaaatatttgagtcaatattggcgaaccaaagaagcttcttggattagaagaaaagtcttttgacaaatgttatttctaaaaaacaaaatgttgtttctttggacaaatgtttcgaacagagaaccttgaagtcaaccataccaacatattaaacaattgaccatgggacttttcgaaaccactttgaatgcaaagatgattaaagtactccaagaaacagagattaatacgacttttcaagcatatgagacaatccaactctgtacaagacattataattaacaccataagatttttaacatcgtaaaccataatgataatgttcatgctctcactgacatcagatacatgtttagaaatgataacttggcatctgcgagaaagcattgtggatgtaagatatatcatgaagatacgatctatcggttgattggtcatgtctcatagtttcttcaggattgaaaccttaccacggtaagatcttcaagaacaggacaccctgagatgagattcttcacaagaccatggtttccgtataaaattatattttcaagatgcttcatcttgagacaaggtagagaaacacaaaactccggattctacatcccttcttatagaagctttaaagacaccaatgtcctgctcttataaattttcataggtattccatctataacatacctaggactaggattttgtgtctcaacagctagatgttgaatcccgctatcaacggctgtgatgatcattcttcatcttgaactgttaaactcaagaaatctttcagtgaagttcttaatagcatatctgtagaactca

SEQ ID NO: 5835 - DNA, 1393 bp, Arabidopsis thaliana landsberg
acaccattgttaatcccggtgaaaacccattcattagtctcgtcgatcgcgtctctaagatgagaaggataaaggtcaagtgacgggttttttgcaatacaattgaactcagtgttgaacatccggattatctctgaactctcattgttaactacagtcttaagcttcttatcccaaagaatctaacataataacaaaaataaatatttaagaaacaggacaagataatttaaagagttcaccaaagagatcaaaacttacaggaacagtgtacttcccttcatagtttgggctagcaatctcgtagagttctctcacacttttggcaccattaagatagtcaggctcagctccagggagctcggtatccgaatccgggaaaacccatcctctatgatcatcagtttccttggttcttccccaaatggcatgaaccgactaatcaaatcaaataaaacagaaatgcttcaggttaacaaagtcttctaattcgatatgagcaatgaatttgtactaaccgagaaggtgatggcttcatcaagtcctttgatctttaagtaagaaagacatctacaagcccatggacaagcataagatatgtaaagatggtatcttcctgattcagctggaaactgagaatcaggatcttgtgaaacaaagttgcggaatgttgatgctgttcttacaaaagctccagattctgatgtctcatcaaccccagacctagccattttgctactaataaaaaatcaaacacgaaaattcacatgacaaacgaaaagaataaaaatttcagaatgcacaatttttctttttcacctcaatagagtgagtaaagttgaaaactttgagagatttcttatagatggtcacttgtcacataatcaatctcaattttctctaggtaaaggatcacaggaaacgaatcaaagcatcaaaaagttcagaaatttcgagtagggttttacttaattatctcattagagctagaaaaaggttaaaataaaatgttcataattcatagccttcaaatatgattttcaacatttatggatcattgggccaaaatcaaacccagaactcagaaaatgtctaacaagatcatgattcatgcagagaagaagataagagacaaaacctgttgacgacgatgttatgtatttggcgtcgaatgtcgctgttttgtggcgataaggttaaagaagaaaaagtgagctttaaggaaaaatggtaatgagggatgtcatcttatagtgaaagagaaggaatccgaaaaaggactttgctttgtcttcactgctctgtcacgcctagcgagttaactcagactaacgagttgactcagctgggttctgtggggaaagcgtgacaacttttggaccggtttgtatgt

SEQ ID NO: 5836 - DNA, 750 bp, Arabidopsis thaliana landsberg
tttcaaagaactgcatcgacattccgtaacttcgtttcaaaagattccaattctcagtttccagctgaatctggtagataccatctttacatatcgtatgcttgtccatgggcttctagatgcctttcatacttaaagatcaaaggacttgacgatgcaataagcttctcggtgcgtagactcaaccctttaacactgcttattgttatgtagaatcataccatttcctgattgtattgatcgaattgttctttgtttgatttccatcagtctgtaaaacccatttggggaagaaccaaagaaaccgatgaacatatgggatgggtctttccaggttcagataccgaagttccaggagctgatcctgaccatcttaatggtgctaagagtgtaagagaactctatgagattgctagcccaaactacaccgggaagtatactgttcctgtaagtcttttggcttctcaatgtcttttaagtctctttcagtcggaagtagttactagttagtcatgagttttggtttttatgttaggttctgtgggataagaagctcaaaactgttgttaacaacgagagtgcagaaataatccggatgttcaacactgagttcaatcatattgcgggaaatcctgatcttgatctttacccttcccatctccaagctaaaatcgatgaaactaatgaatggatttacaatgggataaataatggtgtctatagatgcgggtttgcaaagaaacaaggacc

SEQ ID NO: 5837 - DNA, 561 bp, Arabidopsis thaliana landsberg
tggttcctctttttgtattaagatctcggtaggaagctctcctaatctggcaccatgtatatatatgattaccctaacataaaagatccatcacgtttcccttgtttctcaagcaatctctgaaaatgccaatttgaggaaaactctcttttctatatcctagattacggagaaaattttccgactttgttgactgtatgctttgtcatactaacatcagaagttggctatgcaatagttctcgggcgtcagtatgatctgctaaaagcggcgtccaaaaaattaacacaaatatcctcgaatttgatatgtaaccaccaaccggcacaaaaaaccaccataaaagcaatatgttgatgatgagttggaggccaattgaaggagaatcacaaggttgtttatactatatcaacaaaaaaggttttttaagaacaaccatgatcaatgacatatttttctacatgagagtttcgatcaattcgaaagattggcgaggtaacagatagatcgatgcctataattttcatatgttttaccggggatttcatcagtaaaaaaaga

SEQ ID NO: 5838 - DNA, 1129 bp, Arabidopsis thaliana landsberg
ttcttacgcttggctgaattttctattctctttaaatattattaaatcacgtaagttacactttttagtttagtaagctactctaaacgttttactcaaatatacttacatttaattctcattcatcattgatggtatttagtttctacattataatctttatctatacatcacataattttttttgtattttgttatatttaattctcattcataaatgtattaattttaaagacaccgcactactataatattaattctttttattatatattttttgtataggggaagatatccaaaaccttggtttgtagtgaggttatatgtggaaaaagatcgtcactagcgtagagattatccgccatagcttctattggtgcaagcatgactatgtctatcaacttattgctggtcttgtaaattgtaatgaagcatttccttatgttttgagcttagcttgtagctaactcttctgtaatggctagcctctgtgtgcttcatttgaaattctctgttcccaaaaatcaagcctaatacgtcttctgccctctatttaatatgcaatcataataaggtctttagtttaacagcaaagagataaaaggaacaacggttgtttcaaatctctctatgtttcattaatcgtttcgtaccatacagtataagaaaactctctttatccattcctatctcaaacaactaagtgcaaagctgctctgttctattttttccattctatacaaggcaagaatcctttctcgctttctctctatgtttcatcaatcaacggaaactgtacaaaaccaaagctacaggtagatctggaggagagttgtagaaccagtagatatttcgtgtacagtaatgtctggatccatgtaaactacttcagccattgattgcaaaatgtagtctttctcgtaatctggtgttagctcgtcaatggcatcacggatgtctctgacagtttggtttgatctaaaaggaatatttaccgatcgcgtattggccaagaggatagtcaatgtaatagtagtccccccagctcgaggccccacaattatcctgtcttggtaggcaacaggatcagggaatgtcttcatgcttgagtcttcctcaatacccttac

SEQ ID NO: 5839 - DNA, 3741 bp, Arabidopsis thaliana landsberg
catgatgcaaagcatagagtctcttctccgagttcaggctgctcaagagcagtacatagagtcttagctcatcttctacctcctcatgtttcatcacatctggtacgcctcttcacatcattatccacttcaaccttatcacaccatggagctacaatcagtttcttttggctcaaagcttccacaaattcatcccaagtttcaaccttttgagtacattcttcaacctttctctttgccacatcatagaggttactctggattttctctagcaagtccttaacttgttcaatcaaatcccctctcttgacatccatcttagctccattgtcacgctgtcactatcctcacctgatcattggccaaatctctaggtccagtttcaattctcaaaggaacacccgttagttcttgatccgcatacttccatccgcaagaatagttgtcgcgtatatctgcttcagcacggattccagccccaagcaaggtggattcaacagcttcacaagcatcacaaagttcttgataatcagcagcgcctttgatgggaacatggattacaacaacttgaacaggtgccactttaggagggaatactaaacctttgtcatctccatgagtcatacacgcggctgtagatgttcaaacatcaagcacctcctcatcagcctcttctttggtagcaaaatcagtgtgtccttcttgccaaaggaactcacggctcctgataaatggggtagggtcgctaaactcccatctaacaacgtaacattagcccactggttaaccttcaaagggaggtccctgtgtcctcttatccaccagctcttgtaacccaagcaacctctggagcaaacccttgagtgtggtctttctccttctcaagagaatcacgtgttacaaacatcgggaaatagtattcatccactttcatcttctcaatctcagcgttgaagaacgttcgtataacgttccaaatattcatcgctgatgcctgatggcttgagaatgtagcatccctttacagactcgtagtattcaaccaattcaccaaatctacaagcctcggaataccacttcccaaaatcttcatctttctttgcagtgattccaagacgagtttctttcaccatctctttcactttcctagaggcttctcgaggaattgcttgacttgtcacacaaccttagagcgtaagccagaaaaataattcagaacaatacaaataaaccccagctattgtgagaagatataataattctttatgggccagtcggtgaatatagttgggcccaaatcatcggatgtggatcttgttttgatttcaacgctttcgtttttttttgtttctgttttccttgattgaggaagcaatctatgcaaagaggtccaaaacactttagcattgaggaagaagaagaagaaagcttcatttttccaggtaataagtcctttgactttcgtcattcacaattgctcatctctatagtttctatgaatgaattgtttgcttacttatacaccatcaagcaggggatacagttgaagcggcatggcaagagtcttcgaatcggattcgggttctggttgttccaatgtactgagtcttgacttaatcagagaatcgttgattaggcaagaagacaccatcgtcttcagcttgatcgagagagctaagtttccactcaattctcctgctttcgaggaatctcgttgtctagattctggaagtttctcttctctcactgagtttttcgtcagagagacagaaatcatccaagctaaggtttgcttcccattttaaaaactgatccttttgctaaaattagatacagagatatcaatgcttcgtttgattcggttttggtatagcattgttttagattgttccatgaaattagcagaaagtaagctacaagtcaacttgattgaggttttaataagcctggattcttgaattagcatgccttttgtttgctatgtgtctcctccattgcaaaagatgataacttggctttgcctgtataatctcattgtgtgataacttcttgttttgatttgagtgcgaatctgccaataaaaggctccgactttatcatatgtatacgagatttccttatgaaaacctcattatatgtggagattggaaatggaggactattgttttctatttttataatgtctgaaagtcttatttcattaatatattcatctcattggtttatattcttaagtttctggatattgagcctatatgtttgttcattggtttacttgaaaaccttatgtgtatgtgtatattatataggtaggaagatatgaatacccggaagagaatcctttcttccttgagaacattcctcactcggtttttcctacgcacaaatatccatcggtatgtatgtagtaaagtcttgagcatttttcttagaactctgaatgctttagtctaacagtacttttcttttctcttgattaggctttgcaccctaaggctctatctgttaacattaacaaacaaatctgggatatttactttaaagaattgcttcctttgtttgtcaaacctggcgatgatggcaactatccatcaactgctgctagtgatctcgcctgtttacaagtaaggagatgattgagtatacataacaaaatcagctctacttttggctaatgatgtctgatctgatatgtttgatcttgtgtaaggctctttcgagaaggattcactacggtaaatttgtagctgaggtcaaattcagagatgctccacaagattacgagcctgcgattcgcgctcaggtaaacttagtgtcacattgtggattctgtttcactgtggttttaaaatgatatgattcacaccataatcgtttgattttcgactgtaggatagagaggctttgatgaagctgttgacgtttgagaaagtagaagaaatggttaagaagagagtgcagaagaaagcagaaacgtttggacaagaagtaaaattcaactctggctatggcgatgagagtaagaagaagtataaagtggatccattgcttgcctctcgcatctacggggaatggcttatccctctcactaagctcgttgaggttgagtatcttctacgtcgtctcgattgaatattatttgtatccaaatctggccctgttaaagtgggccttaagtttataagtgggcctgttgatatttgtcaggatatgatagaataattgaatgaagcaacacagtcatcactattttaaattttgtaagatattttaaggaaaagaaaaaagtcgccagtatttcgctatcgaaaatcgtttatttatatatttgatgattatccattagagaacccttcaaaaaactctccactcaactctctctggtcagctgtctcttccccattctctagggttttcaagctcaacctcaagctccactacgatctcttcttcttctctaatctcaggtctgaatctctccttcttcactatctctgatgctttttactgaatctgattgaggaaactttccattttaggatttgttgatcaaatacactcggtttaagaattaggatcattctcttttcgatctagtttcattagactcgttcttttagctcttgattttatagatctcgttttgaggaactgattatttggttgttgacagttgaaagatgcaaggtgtgattcgatccttcgtctccggtggaaatgttgtgaaaggctctgtgctgc

SEQ ID NO: 5840 - DNA, 657 bp, Arabidopsis thaliana landsberg
gtggagctactggggaagaagttactaagctctatgcttttatgatgtcatgaccaaattggtactcatatctctctacttattacattggaatgaattgagaaaatccattaataaacatgttgcattttcacaaaagttacatactctgttttttacattttgtaatgaaatatgaaacaccaaattctcaccttgagagagggtaaggatgagttcgagagctgtgagtgattctagaaggttctggaatacgttcagagactatataagcagtgtctttccaccaagaagcttctgtctctttcaaatgaagtctttgtttagcatcatccaatgcaatctctaactcctttatctcctcttgttgtcttgtctccatgagctcgtatagtcttctctccagctcatacggacacactccttgttgttcctccactagtcctggacacacatgtcccaatcttaatccttctgcatcttcactaacctcctggttatgaccaatctgaagaagctcaaactcagcttcaagttcagcttcaagctgatccatctcacctccagaatcattctctagcttatatacgtaatgtgacaacgacccttcaccttcaacactcatagatgtctgtatgatctgtggagagtaatagt

SEQ ID NO: 5841 - DNA, 416 bp, Arabidopsis thaliana landsberg
ggatggacctaacggccatggcagctatggtcgatggcctccatcagacaccttgaacagattcaatgacttgttacagttttgagattgaacgatacactctgttgatcttcctcgatggtcaccgcgagagtacgagttgcctgcagattctctttattgtgaaggggcagactgagccatgaacaatatggagatcagatgatatatttctagacagaaactaaccataacatgaaaagtaaaaggatagaccttctatgatctatgaagcgtccctgagacttccagtgaaatactgctgcagtgcatctcaactgaacgtttattaagtcatccgacggttttattctgtttggtgaaccttcttaaccacaccgcgaacagtggacacgcagatgttctcacttactgga

SEQ ID NO: 5842 - DNA, 3701 bp, Arabidopsis thaliana landsberg
  unsure (1)..(3701): unsure at all n locations
ctctctcttcttctcttagttgacattttgaggagcacctattcatttgtttgtttcgatcaatatgactttgcagcctaatcttcaagcaaaagaaatggagctttctttggtaggacttcaaaattcaggaaagacatcacttgttaatgttgttgcagtaagtatactatgcttccattttgataatctctttaacacttatatgatggtcgttggggatataatgatgtctttttacttgtttagactggtgaatacagtgaagacatgattcctacggtaattgttacactgcatctttgatcaaatacggttttcgatccaaaacctgtttttttttttggaacaacatgaagagattcgtctttgtgggtttatcaggtcgggtttaacatgaggaaagtgacaaaagaaaatgttgcaatcagactatgggatcttggtggtcaaccaagattccgctgcatgtgggaacgttactgtcgcgctgtttctgccattgtgtaaggatcttcgactcgggtttctcttcactctgtatctcccacaattttggtctcatgttgattccatttccaggtatgtagttgatgctgcagatcctgacaacctaagtgtgtcgaaaagtgaactccatgatttgttgagcaagacttcgcttaatggtatccctcttctcgttcttgggaacaagattgacatacatggagctctttccaaagaagccttgacagaagaaatgtatagctctttattcatctgaacactccaaaaacagcactaaaggcatctcatttagctcgatctgattatgcttcttgccttgtttttgttgcagggggcttagttcggttacaaatagagaagtctgctgtctcatgatatcctgcaagaaccctaccaccattgatcagctcactgattggcttgtaaatcactcaaaatcaaagaactaaacttcaacaagaacatcatatgttctctcttcttgatcttcttactcgtcctctgttgtctggttaatgatgatgacgagtcttgaactaatttcgcgtgaaacaagagtttgtctttatttgtcttctgtctcacctgctggtctggtctggtctagtttgctcaagaggttgttttctattcttaaggctttgcaacaaaaacataagtgtctcaatttttcaacttctaaaaatccaaggaaacggaaataagctctgtatacaaatcaaaggccttatttatatcttttcaaaccagtttcaaaatggttcacgagaaacctgtgaagttactaacaaaaccagatcaacagaagcaagagaaggaacaggttttacataatcatctgagttagaagacactgttactgactaaaaacactgcggcgattgtaaaatgttgatttcgatgcaagatcgaaacttgacataacatgaagaattgaagatatatcaaccgatacaacatcaatgattttcttaattcttaccgagtttggctatgcattctatacttcacagctttcatcgccgcttttgcaaaaatatgggcagcttcagcttcggcttctgctttatctgcctctcttgctgcttcttcagcttctgccattgcaaattctgcttctgccacagctcttgcagctgctgcagcagcttctttttctgtcatacccattatcataacttctccacctacttgggatttagtaagatttttgacgccattctcctccggtttcggagtgttttccttgtttccttccaacaagagttgaggagacctttgtccttctccttcagccatataattctgagaaatcctgtatttgtgctttttctgaaaggtgagaacaaacgcaagaaaaccattgttaagtcagtgctaaatttgtgacatttgcaagaggaaatttcgatcaaagtatctctctttataccttaactaatgttccaacatttgtcaaatacttcagccttgaagtcacaagccgtttcatatccggttgcatcttgaaattctcctgaaaatttacagcaacactaagaccttgatgattgtatatagatgcagtaagcaatgcttaactatttacagacacaacgaataaacacagaaggaaaacttcattgtacctctatatacatcaagatcgactttccgtcaggaccaaatggtctcttcaagctggtaatagcctccaatataatcttatccacactacaacaaacacattaaaacaagcctattatattcctcactattcccatattccccattcacagcatcaagaattcatacaaatacaagaagagagaccaaaccttgtagaaggtcttggaggttcacaagaacctgcaggaggagatggtgcatcaatctgttgtcctcctacatcaccattagctaaagacacaatggtaatagctgtagcgttatcgtcttgcctactacccgacaaaggagttcttttaagagcaagcttagccttcttcctagatccccataaagctgttacacttatatttctccatttgtcctgtagacaacaacaatagtataagtttcgaacttttctataatctctcttcactttaaagttgttgatgtttttaccttgagatccacattagaacgagacttcagaattgtgctatacacaggatctgagagaatggtacgccattttccagttccatgtttaagtactccagctttaagagctgtttcttcttctggtgtccacttcagctttggagctcccattcacacaattttatcacaaaattcaaaaattctatagaaacacacacacacacacacacaacaaacacttctaatgtctcgacttcaattctctgtgaacagatgaaaacatcacaaagatcaatactttataatgaaatccccaagtttttcaattgcattagtaattcaatagaaacgccagagattacgaagacacgcacgagaaaaagattaaagctttcgatcagggaaatggggaaattaacaaggagaagaagaggaagaagaagacatgcctgagaaagctgaagggaatgagagaggaagctatggagagtgtcatggatcaaagtttgaaatctaaaaattgtggcatgagacagaggaagagaagacacaaaaatttgacctttaatctttcgattcacctacgcatgttggaggatgaagtatgtatcgattttgaggtgctttactgggagccctttattatcttcatttttacaaattcgtcttaaactttataattgcaaaaatacacccatttgatctattagggattaatttatgaaattaaattaactatgcgagtaaaagcaaagtagaaattagagtaaacaagagattcaagaaaaatgatttttgagagtaaacttgacaattacaagagattttttagtaatataataagtttagggttttcgaaaatagaattacggattttttgtttggtcatcgagcttcctatttttcggatgggaatatgtttaatattctttaccgtattatttcttaagatttgagttaatctttccttatcttcatggaggtcgatgccgagctcatcgactnttagttcttgggctgatttcataatttagtcatatcattttggtgtattcttggtttaaatcgagttaatccgtgggtgctaaaccactctccaacat

SEQ ID NO: 5843 - DNA, 7645 bp, Arabidopsis thaliana landsberg
tattgtacatgtctgtaagcctctccctacgacagaggttttcagagcagtaacaaacaacttacacatgagagttaacattgcacagtctgagattatactcgctagattcttttcaagtcttgaagaacaacatgtgcagcgtttcttccaggtgcacccataactccgcctccaggatgagctccgctgccacacaagtagagacctttcaaagggcttctgtaatttgacctgtttcacacagtccaacaaagttttgaatttcataatcataaatcgtaaagactgttttgagtacttcggagtcacgtaccatcctttcacagggcgcatcaggaagagagagtctaatcccatggcaccgtgaaagatgtttccgcctgcagaatacaaatgggcagtcatgtcaatatggtttggccatgtcgcatgtacttgggatctttctccaagtacttcactttatatacctgttagaccaatttcccgttccaggtccggaggagtcaacatgtcgtagctaatgatggatgagctaaacccgggtgcatattcatcaatcagtttgaaacacctttgtgcaaaggcttcctgatttttacacaagcaaaagcaaatccagatgggtttggcatgtcttgtagtgtaaaggaatgtttagccaagcgtgtataacaaactaactcggtaagtaggatcttcccagcttccatctgagggcttgtaaggagtgtactggatgaacaagttgattacatgcttccctacatacaaaatcacattcagagttcaaatcctaaacaagcaaaagggggagaatgtgtacctgggggagaaatggtgttctctagtgtggatggaatagttattttcgatcactggtcttctcgatggtaagccattttcagaatcattgacatgctgagtgaacctctgccatgctgacagagagaagatagaacagagccattgatcacttttatttgtattattatttgttctttgagatacatataatgaggaacaaattagcacgaatgattcctctctgcaccaatgtgtttagcgtcaaaatgctctggacctggacctgaatgatttgtgttgcagcactggaactgtggtaacttgtcaacagccaagtttattttggtagttgcctgttcacaacaattaaacaacaaatcaccagataattagctagatggtgtaattaaaaaaaaaaccaattccgcctatagagaaatctatcttctcttgatccagagagtgagggacttaaacgacatggaatccttacagagctgtaatctgagttcttaatagcactgacgaaattttcaggaagaacattggtcggaaccaactcctgttatccaagacagaaagaacaaacgtaaatttgttagcaaacaacaaaattttaactgacatatactgggagtttggaacttatgatttaaaaagatttaccacataagttctgtaaggggtcgcattggacaatatagccgatgactccacccgtgtaccatcagcaagcaaaaccttataccaggtaatgtcatatcagtttgattcacgttttcacttcatccacaaatcattgaagacaaactaacccctttcacgatgctagagtcttcagttagtatttcagaaacctggaaaatatgaatgtactaagctgctctgatttctgatgagagaaatgatactagaactccactgttctgaatatcgtaggaaagagggataacctcaaaatgatctagaatttaatacctctgcgtttgtgaaaatctcagcaccagcttcctttgcagcattggctatagccatggagacagagcccatcccaccttcaacgtaactgcatattattttcttaccagttactcacgatagccaggccttgttttattaaacagatagtcttgtgctcttcatttacaccttacagagatgcatgtttactaatatctggtaagatagttcttcaattgcttatgcatcaacacttatgtaaaacatacacagctatttctacattcccaaaatatcaagaggaaaatacaaattaacaatcaagatacgtacgaccaaatgcctttctctccatctgtttctcccatcacatgatgtaggagaacatatccacttcccggagtatggacactggcctgtgaattaatgttcagatcactacattaatcccccaatatagaacgagtaagatattaagaaagtcaattaccgtagatccaatcacagcatctgttgcaagactcgccttcaggacatcagactacaagcataaggccaacacaaaaacgtgtgtcaatacaacatcagactacttgctaatgctagttgtataaccaatatgtgttaagataagaaaagcacctcaaaccagttgttcaaaacttttgaagctggtgccaataaaagatccataaaagcccttcacaatataaaaacaaagagcatgtaaacaaaacagtgaaagataacaaaacaaatcagcttaattgtttttgaaaaaggagatcatacaccatatctttatgccccaaagaaactgcttgccggagacaacgagcccagaaagcagatttgtacattttgttgctcaacttatcattaaaagaagaggcactttgcagagattcaggtggagttgaatccaaaagaggatccatgaatccacaaaacctctctagctgcttctcgtatctgtaaagcaaaaaaaaaaaaaaaaacttatttgatttgaatatcacattccgagaattagctaaaaaaacaaataaccttgggtaagcatcagcatcatgtttagagaactttgaaatctcagaatgattaagatcttgatcaggtccaagcagaagataacgtccatctaaacaaggtgtaaacgatgaaggacttctcttcaaaagcttaagtccatgtctacctaactccaattctctttggaatccaaaaatcaaagttatcaaacaatccaggaacgatcagaacaaaatcggaagaaggttaatcaaacacacctaatgatacaaggacgaagtaagccctgaaggtaactgcagcgtgagaatttgaatccaggaacgatctcctccgtcactgccgcgccaccgatgacatgacggcgctcgagaacagcgacggagagacctccgcgtgctaggtaagctgcggctgttaatccgttgtggccacctccgatcaccaccgcgtcccatttcttcttcggtaatgtactgaagctccggcgccacattgtagtcttcactggtcagtcaaagtctgtgtgactgtgtgtcacaagttctactctgatacttttgttccaatagtttttaagtatttacaaaatagtcctagtaattgtacgattcacaaaaataggccccaagctatttatggtcgcaaccccttttaaaaacttatttgctttatcacctatagtttttgatcatttataaaagagtccaaatagtttgtaaggccttatagtcttcaatgcttatatttaatttgcatggattggttcatcatttaataacacctgaattgaatagacatgacaaacatttttgcaaactttatttaggaaatgaatcctgacaacgcgattgctaacacgaaacaatccgaccattctgatttggctgtttcgtggtgaaacggtaaaccacaacaccgattctagaactttcttgaggaacatcagagtggataacgtcaacatcgaagagctttcgagcttttttgaagaagacagattctttcttccatctccttagatgcgccatcaggaaaattaacctcttcccctctagctgcatcaaacgcagcgttttgaggagaggctcgtagagatggtcatgatacaccacgtccgaagccagaatcaagtcaacgttctgacctagaacctccacgtcatcagcttctccccatcgtagtggtgccacgttgactttcccgccgaatctctcaacaatttcagcgtttgcttcggcgttgaagttgagattatctaagacgtgtgggagatccgtcaccgtgacgttagcagagagagtgattgccgcagcgatcccgacgaggccggttccagatccgagctcgagtatgttcaacggcgatggttttttcagcgacaagagtgtggcggtgagtggactcttgctagggtcacgtcggtagttatcaagcaacgtgacgaaagtagaagccgctggccagagctgaaaggagagaccttgtgacgtcagctcacgaatcacgactgttgactcgatggagctgatgttatacttctggagctccagtgcaccgtcacgcagaggagtaggaggtaaactctcaccgtcgagaccattctcgcctatgaggagcattttagcttcgtatgtgtcgttttcctcatcgtcgtctcgcagaggaagagtaatcattccactttttttgcggcgccgatgttgtcgctcgcttgttcactttccatgtttactgaactagggacctttaggttaagttacacgtggaggcttattattcgttgataacaactgtgaccatgagtctgtaagcctctgtctaagacagaggtgtttcatagcaatagcaaaggccaattccctcacgaatacggaatacatcaatgtgcagaaagtgaagacaaaacaaattgatgtttttggaatatttatacatttgatgtgcatgaatgcatcattaaatcactggtgacttctgtacagatcgatgctccctagttgtagtctcgaggtcgaattcacgtctcgtacacttaaaaaccggaacctgcaacatacacattagatatgattatgacccataagaaaaacaagaaaagcaaatgggactgtcttatgataagactcttatcaaactcaattcaaaacacatttgtgttctatcagggaaaagttatttaacatacctgaaaagatttgcttggaatccaggtgtagttattttgtaggatttgcgttggaaccgttcctcgaatacctgactagtttgcttgtctaggacacaccatgtcgaaccaccatcgttacttccttcaagaatcctggtggaggcaacaaacagtgttaaagcattgattgtgtatgtctagacttgaataataggaatcagacattaccaatctttggggtctctctctggggcatcattagcagacatgagttcgtatgctatgagttggtgcatctggttgtagagtgttttgtacacgatccaacagcctgtgcgaggagagattcgcattataacatgtaacaaatatcatagttttggatcaggctatatttcataccttttgcaccatttggttcttcccatttggactcttggattccatcaaaagctgcggttgcctgaggcagtgagtgaggcatgatatttaggaataaccaaaacaagtttgattaaatggtaagatgagacttgtaataggatactacttacaatgccagaaggaagctcttcaccacttgcgaggacagaaccagagcataccctgttctgtttaacaagtggaaaagacagtgaatctttgtttaagttttggtatttgctgaggtcagcaacaagttcccttaacgcgtccaatgcaactggcaatgctatagcagttttagtgagtttcccgtctacggatattgtgacacttttaccgtttgtgtctctctcgctctttaaagaaagagcgagaagcaaatcgcctagtgcgggaagaaactgctccgggaatgaacttgagttatctgaatctaaagtcaatcgagccttccttgttttgtaaggcgcattcttcagatccactaggacttgcttgatcatcttaagtacctcatttgttcttgctacaggtaagccgtcctcaacgaactgagtaaggataggtagaaacgagtcataaatgttggtcacatggtcatcaacgcatttgcgaactgggcaagaggaagagctgacagatgagttttcgtctgaaccaaattctgatctcataatacgccattccctgtccccactttgccttccgggtaaagaaactgaggcattatctgcggaatgcagatttctctctagttcttcctgctcatttctgtctcgtaattcaagcttagatagagattcaaacattaagctacgtcgtcgttcccttgtcagggttcgaagaccatcttgcaaagatgattcagttgtgagagttcttctagataaaacctacagtggaaaacaacagcaagaccatgagtgattaatagaagtcactgtttttggtgtcgagaaacaaaacagtcactgttttcgtgtagcattacctcatgccatttctttgtatatcgcttggtaacatcacaaaccccgtccttagaaatcgcaatgacataattcaattttttattccatctagaaggcagagattttgttagaatatggcactatggcagtccattatggggattgttcgatgagaaacatggaaagaggaagtaactggtacgcaagaaatcttaccctttctcatataacatgggtttatcatacactccttcacaagggtcaagatggatccacctgcagaaaaaaacaacggcacaaattactcggtataatgaaagttcctacagaggaaatcaatagacatttgtttggcagatgaagtttacctctttaacgagtgagagtagcattctgtccacacgtgatctgtgaagtccattatctgtaaatgaataaaaatattacatatacacattacaaatataaaagcaaaagcaaaagcaaaacttttgtgggaagagataatgttagttagcagaataccaaacgagaatcatagccaaacgtgcggcagtatagcgtaaagcagttcgcccactctccgcaacgacctttctttgtttctacgagctgcacaaacagggaagaaaaatggaacctgtcaatgaagtcaagaacatataccttccaatgtacaagctatttagttacctttagcggatcgttgtaccgagggaatcgagtagttgttggacacatggtacagctgtataagttatagtgaaatactaagtgaaactaaagtttaacaagagaaaataaataaagcactgtaggaattgagtaattcttgctctcaatccaatacactctataaaacgcgaatgatttagcttttacagtcctacaattctctcggaataaaggccgtgatttcagaataaaccatacaaactacagtacaaagtaattcacgtaccgatatatttcaactcgatttgctccataagcaagctccgaggtaagtgggtttcccatcccctggcctatggttttgttaccacaaaagtcacaaggaggttcattgacccatctgcattaccgcccaagtcaataacatggaaaagaggttctttaaaactactgtgccactatatatattcatacaacaaaatatgctgcatagagagaacaaaccaatgagaagactatcttcaattctaaatctcatcaaggatttcaataatgtattcaataatttagatttggctcaaaatatgaaccaaatctttat

SEQ ID NO: 5844 - DNA, 583 bp, Arabidopsis thaliana landsberg
taatacttcttgtaggcacgggctggtgttcgagaggttcactttcttccattcaatcccactgacaagaggacggctcttacatatattgacagtgatggtaaaatgcatagggtcagcaaaggtgcacctgagcaagtaagctgtctgttcccgtttatgttctattcaaaatattttggtgtagagcatagtcttattagcttctattgtcgatgtctcagatcctaaatcttgcacacaatagagcagagattgagcggagagtacatgctgtaatagacaagttcgctgaacggggtttgcgatctcttgccgtggcataccaggtaactggagaccagctcctcaagtttctcgtgatctattagtgtaagttgatacaagattcaaggttgtatgagtttggccttctacacgaagttccggaagggacgaaagaaagtgctggaggcccttggcaatttatgggtctcatgcctttttttgacccaccttagcatgacagtgccgagacaattagaagggctttaaatcttggggtgaatgctaaaatgatcacaggtgagtttttttgtttcta

SEQ ID NO: 5845 - DNA, 718 bp, Arabidopsis thaliana landsberg
ttgagagtaaatgcaacactcactgtataatttttcattctctggaagatagcacggctggttaagacagcgctgatgataacactaagaccaggttcagtaagaacgatatctgaagcactacgtgctgcatcagttgcatcagcaactgcaatgccaatatcagcctttttaagagcaggcgcatcatttactccatcacctgtcattccacagatatgcttcctcgcttgtagtcgcttaactatctcatatttatgctctgcaaaccgttttcatgactaatttggttaaaattctgagttggaactacgctggataaagttttcagagaaacagaagcaaacaaattttaccaggaaaaacgccagcaaagccgtcggccttttctataagatcatcgatgggtaaggcaccaatagactcatccttgtgctgtccaagcaaagcagatgaggggtacatgttggttcccattcctaaacggcggccagtctcttttcctatagccaactgatcccctgtagaaagccacaaacatttagaaaagaaaaatgaattcggacaagaagagaggcaaaacaacatcattgatgaagaatcaaaagactgtcaagattaagatgtgtcaattagaataaggatacgatttcaatatcaggaaaatgaagaaaaaaatagattaaagcataaaagactaggttctttatatggacgg

SEQ ID NO: 5846 - DNA, 361 bp, Arabidopsis thaliana landsberg
cgacaggagtcctgaccctataagatagatacatggtatgtatcttatgcctccattattaatcaaaagctacagaatgaacatgtggcaatctgtttacttgacgggctatgaatattagccataagaactgtaactaaaattacctgtcaagtaaatctgaacacaattcttcgaacttggcacgtgtgagggtggtttctatgtgtttaggtccatcagctgtggccgtgataaaaggtaagctgggtacagaattcacattaatcagaagccagatgcttgtgaaagtactaagtcaaaaaatttagactggaaaaattaactgtacctcatatttgtctgagtcagtgaagaaagc

SEQ ID NO: 5847 - DNA, 449 bp, Arabidopsis thaliana landsberg
tactctcttctctgttaagaggtttattggtagaagaatgaatgaagttgctgaagagtctaagcaggtttcttatattgttattaaagatgagaatggtaatgttaagcttgattgtcctgctattggtaaacaatttgctgctgaggagatttctgctcaggtttgtgttgattttttcttaaagttttcattttgagttttgggtgaatggagctttgatatgtggttgtgttgtaggttttgaggaagcttgtggatgatgcttcgagatttttgaatgataaagtaactaaagctgtcatcactgtgcctgcttacttcaatgattcacaaaggacggctactaaagatgctggtcgtattgctggattggaagttcttaggattattaatgagcctactgctgcttctttggcttatgggtttgagaggaaaagcaatgaaac

SEQ ID NO: 5848 - DNA, 1697 bp, Arabidopsis thaliana landsberg
agcttatgggaaagaggaaacttttcttttccgaatgttccacctatggcagacttgttatatgaggtggaagttattgggtttgatgaaacaaaggaggtaagttatttcctataccatcatcttgtttccttaccaagacgactccacatccaagctttatcccaacctccttgcttacctctctgacttagatgatgtattgaacagggaaaagctcgcagtgatatgactgtagaggaaaggattggtgcagcagacagaagaaaaatggatgggaattctctttttaaggaggagaaactggaggaagccatgcaacagtatgaaatggttatgcatctctctctatctctatctctctttctaacaattacggtcaaagtttaggttttcaggcatacttagtgagtctgctcgaggctcttgtgtcttctttcggcttttgattagtcatggttttgctgtttcaggccatagcatacatgggggacgattttatgtttcagctgtatgggaagtaccaggatatggctttagcagttaaaaacccatgccatcttaacatagcagcttgcctcatcaaactaaaacgatacgatgaagcaattggtcactgcaacattgtaagactcatcaaaccattcatttgaagaaaatcattaaagttcatactcggtttcccgaaatctaatcaaactcaaaaccttatcaggtgttgacagaagaagagaaaaacccaaaagcactgttcagaagagggaaagcaaaggcagagctaggacagatggattcagcacgtgatgatttccgaaaggcacaaaagtatgctcctgacgacaaggcgattagaagagagctacgagcacttgcagagcaagagaaagccttgtaccaaaagcagaaagaaatgtacaaaggaatattcaaagggaaagatgaaggtggtgctaagtcaaagagccttttttggttgatagtgttatggcaatggtttgtttcccttttctcccgtatctttcgacgccacagagttaaagcagattaacgtatgaagaagggtaacaattcaactctaaaagaccaacgtgaaagatctacccccatttcttattagtgagaattttgaaaaatattttatataagaaaaaaaaatagtctctattgttttcgattataaattagtaactttatattttgatccaaaaaaataaatttttaacaaaattcgaacgtaaaatctacttccttcaacagaaatggcggtcttcctagtttttgtctttgaccaaagactttcaaattccagctgctagttgcattaaatgatcttagtattattaattaattaagaaacttctcaacaattaacaaacactaatcagtaatcatcattctctttagttgaaaaaaatagtcaacgtttgattaagtcaacctttttcgtctttgaatccatcttcttccccacagagcaacgacgaaacataaaaaacagagacccttcctctggggaatctaaggaagcttcaaaatgaagctaaagatttctctaatcgctccgattcttcttctcttctcattcttcttcgccggggaatctaagagcaagactagctgtcctttagctctagcttcgtactatctcgagaacggaacacactctccgtcataaccaaaacctcaattcttcaatc

SEQ ID NO: 5849 - DNA, 1058 bp, Arabidopsis thaliana landsberg
ggaccccagaataccaattaaaaccacgtaaagttcttttcctcttcgaaacttgtcctgatttttgccaaacaagtaataagagagcagcactgagctatgttgaaatattttgactacttcaatcttggggataacttttcaaaagtaaaatggttaaaatcaactgaagcaatatagctagttcaattagttatgctaattacagaatatacttaacatgatgtttctgggctgagcgcaacaagtatagactcagagacagatgctcttttaaacaaggtaacttcttacttacttactatctgttttagtttaaaccataaaagttggggagaaatcttacctgttttttcgatgcacaattttgaggtcaaaggttgcaaacttctcctcttgggccttaatttgtctaacttgctcttggacagccactgcctcttcatcatcaagtgctgtcgcattgtcatcctctattgcactactatcattactatcatattctttatcagcatgctttctttcttcacaagcataatttgacagagaagagggagatgagtttagagattttatggacgttgcattattatctttcacagaactatgagaacttgatgaatcactactttttcgtctccaagttgcaaccatatcatccatagctgttgaagcactcaaacgttcggtgttcctatctctggttaccgtttcgtgattgcctgaccataatgatttactagattccgcatgcattgactgcccatctttttgggacgaaccaaacgaaaaaccaccatcagtttgaatcttcacatgaaaacttccgattgaatcattatctgcaatgtaatctggaccatcatttttacttgcttgttgtttattcttgcttggggcatcaatatgtttcttatctgactcggagtaaagtctgttaaacctggatgctacaggatcatgatcacgggagtactcaaaatctccctcactgctaccttcagccaaactgtcacgtacttcactgccaaaatcagctgcatcactatctataccca

SEQ ID NO: 5850 - DNA, 2237 bp, Arabidopsis thaliana landsberg
aaaaagggtatgttatgggaactacttctgaaaactttttgttagtttaagattcttgaaaaagccccgatgtgtgtttcaaagctatgtaagctcagagtttgaagcaggaccagttagttgtctacgtcttccatggctcagtggactcataggactcaaaggcaatcttgtatccttgtttgctttgttgctgctgcttcttccaaatggacttagtggtgatgatactttaggtgttgatctcggttttataggcgatgatcctggagaccttaaacctgcaattgaaaaggatgattaatctatttggtttgatccatcagagagctttagttctatgtggtttggcttatctgacctgagattgaatttcttctgtttttgatggtgtcaccacttttctttaaagctgatgtctttttgattggagcttctgagtagactgatcttgtatctgagtattcagatattgcatctaagcataatgacttagtatacattggcattgttgttggtggatcttcaactactgaaacactttcagaaacagattcccctgcatctgaattctcttctttgttaaagtttggactcatcttctctttctctgcaatcctgtatgagtaaagctggaatggtatttgtgtcactgatcctgcgtgagaacctgactccattgagaactttttcaagaatcttgcttctaaatcccagcaatcaactagagggttttggatttgaaggtgaccgtggtccggattcaccactaggaacttcttgatgtagcggaggatccggcaaatcgaagagaatgttggacgctgactcggttctgaatgccaacaccgtttgattagactaacaaggtattttggtgaagggaatgggaagagaggtctctctcccgttcttatgttcttagccattttatcgccttgaagatggtcatcttcaaatggaactttaccggttataagctcaaaacacaccatagcaaagctatagacatcagctttatgtgtaaactttgatcttggagctgtacctttgagatcttgttccatctctgctagaacttcaggtgcataccatattacaggatcaggtgtggttggtctagaggaagcccgagaaaaagactgattcttaactgaggttaaaccgaaacccgagattttcgcgtggaagtaaccttcggtgtgacttctctctttcaaaagaatgttcattggattcaaatctccatggaaaatctcatttgaatgaagatactccatccctctcgcgatttgaagcattatatcgataacaacgggaacagagaaaagatatcttcttctaggtccacaattctccttcatgtagcttttcaaatctttgtgcattaactccataacaagagaacattctttcctttcttcatcatagaatccacaaaggtactgaagtatattcgaatgacaaagcgataacagagaagaaatctctgcattcaacggctcaagatcaccgaaaaaatgtctcaacacaaaactatcccctaaccattgaatctccttgtactgaccaccaccacctaatctcctcctcacttggtaatccttagaaccaacaagtatcgaactggggaagagcttaccattaaactgttctagtcccgttagtttcttcaacagaaaatcagctaaacgcttctcagtcttgccaatctcatcgctcttggacttcctcttctcttgcaatgcctcaacgagattccacctatcttctctccacgaatgctcgaaccgtaagcaaatatccctcggtaccaaatactgtttcccaaacctccactgaaacagcttgggatcattccactccctatcatactttcttgaaaacacaactctcctcctctccatctcagaagggtcaagacccgaaatctcacccgcggtctcgatggcttcgatcacagccgaaaagtaacaaagcagattatgtatatgaaactcaacacaatctttgttctgatgaaagttgataactttaccccaccaatctttattagacatacaattccgaacatacatttcgccttctttaaaaactcgataaagctctctcaaaggctgttcaagagctctccatttagtatgcttctcttcaagcttcaagttgtgtctgatctcttcggctacggtgttgaaacccaaactgaaaatatctaacaacaaacaacattgtctttg

SEQ ID NO: 5851 - DNA, 582 bp, Arabidopsis thaliana landsberg
  unsure (1)..(582): unsure at all n locations
acacgctgactctgttctgagtgccccatcgtttgatcagactaacgaggtattttggtgaagggaaagggaaaagaggtctctctcccattctaatattgatagccattggttcaccttgaagatgactatcttcaaatggaactttacctgttataagctcaaaacacaccattgcaaagctatacacatcagctttatgcgtcaacttagatttcggagttttaccattcaggtcttgttccatctctgctagaacttcaggtgcataccatattacaggatcaggagtgcctggtttcgaggaagactgcgctttaacgactgaagataaaccgaatccacaaatcttcgcatggaagtaaccttcggtgtgactcctctctttcagatgaatgttcattgggtttaaatctccatggaagatatcatttccatgaagatactccatcccccttgcaatttgcaacatgatatcaatcaccacagggatcgagaacaaatatcttcttctggtccacaattttcttcatgtagctctgcaatctttgggcatcactncatacccaaaaacattttttc

SEQ ID NO: 5852 - DNA, 3764 bp, Arabidopsis thaliana landsberg
  unsure (1)..(3764): unsure at all n locations
aatgtagagagagagcaaatatgtgagaggtaagattctcttctcttcttttcttcttctcttgttgttgtaattttacaataaaccaagcaaatatatatagaggggagaaagcaggagtcttagtgagcaagtgactttgtgagcaagagtcttggtgagcaagacttatccaagatggataatcattcacatttctaacactcccccttgagtatccatcagttatgataagttacgtactgcctcgttaaaaaccttatcatggaaaaaaccattggaataaaaaccatgacaagggaaaaaaaagtacagtgacgtgaactccccctcgaagagaattcacaggtctcgtagatgacgcattccaatgctctgaacatactttctaaatgtagaagtgggaaacgcctttgtgaatagatctgttgcattgtcacttaaacgaatgtattgaacgtcgacttccttattattctcgagttcttgagtgtaagagaaaaatcttggaggtatatgctttgttctgtcgctcttgatatagccttcttttatttgagcaacacaagcaacattatcttcatataatcttgttagctcctttttgatgattaattcacttgcttcttgaatatggttagtcatggatctaagccaaacacattctctacacgcttcatgaagagcaattatctctgcgtagtttaatgaagtggcgactatagtttgcttttgagaaagccacgagattgcagttcctccaatggtaaaaacatatccggtttgtgatctaaacttatgagggtccgatagataccctgcatctgcaaaaccaactagaccaaactcgaagtttctaagataatataatcatacatccatagtaccttgaaaataacggaagatgtgttttgtcccattccaatgtcttcgagtaagagatcaattgtactttgcaaggaaattagtagtaaaagcaatatttggtcttgtataatttgcaagatacataagtccaccaataacactcatgtaaggtatttcgggaccaagtaaatcttcgtcatcctcacaaggtctaaatagatccttttcaacatttaaagatctattgacaattggagtatttaaataatttgctttatccatattaaatcgcttaaaaatctttttgaattgatgcacaaaaataccttctaggaaatgctcaatttggagtccgagacaaaattttgtcttttcaagatctttcatttcaaactcttctttcatatgtttttgtgcatcatcaatctcttttgggcttccaattatatttaggtcatcaacataaacagcaatgatcacaaatggatttcttaataaagacgcaagggcagatttcattattaacataccctttcttaagtagatatcacttaaatgagtgtaccacatgcgtccagattgttttaatccgtaaagtgatcactgtaagtttaccacatatatatctttagacttttatttgtgtaatgcctcaagaacttttaattcttccaggatttccatatatatatcattatcaagaaatccatataaataagttgtcactacatccataaggtacatatttagattattggataccgaaagagtcattaagtacatgaatgtagttgcatccatgaccgaaggatatgtttcttcatattcaactcctggcctttgagagaaaccttgtgcaccaagtcgggctttatatcgtttgatctcatctttctcatttcttttccgcatgaatacccacttgtgcccaacaaaaaaacatctcagaagctgtgaaaataagtccaaagacatttcttttgtgaagggagtgcaactcaatttgattggcatttttctatttctcctaatctggccttttttggcattcacataatgtctttggatctagatcatcattctcatgatcgatctctttagataaagaaaatgagaatatttcattttcatcatcaatatcatttctatctcatatgattccatcatggggattgttaatggaaatctcatagttttctctatcgtcacgaggacttggttcttcttgaagaaatttttcatttacttctcgtattttctttatcttttgggatagttatcttttgagccaataggcatcacatgctttaattgaaccttaggttcattaattttgctcccatctaattccagctctctagagttagccgtgaaaacggttgacgatcagtcaactcgggaggcgaatcctatcgcccctgccatcattccaccacctttctccttggaagacctcaaagccattctcacaaccgtgaccaaggacctgtccaactctgtcacagagacaaaccgtcggctcgacgagttagcaaaagggatctcccaacgtccgaactctgaagtaacaccgccaagaatgattcaaccgcgcggtcttatcttcgacctcacagatgcacaatccaatagggtcaactccaggttcccagggtcgcttcatcccgccaaccaagacggcagaccgcctatgtctcacccaatggcatctggtcatatctccaggtccccaactttagatcatgctggacagataaacgatatctacctaaagctcagagagatcggatcccaagtccataagggtgtcagttcggccccggaaatcgagcgaatgatcgaagaaacccaaaagactcctttcactaattgggttacacacacacggattcctcaagtgaagctctgaattccaatttacgggggcgaaagcgatcccaagcaatacatgacctccttcatgatcacagtcgccaaagctcacttctcggacgagaagagagatgttggttgttgccagctcttcaccgaagctctcgttggaaacgctttaacttggttctccagatttgaggcgaactcgattgacaacttcatccaattttcaactgctttcttaaagcaataccgagtgttcattccaccaggagcttctagctccgacctttggagtatgactcaagaaaacggcgaaccattgaacgcctatctaggttgattcaaggaaatactctccaaagtcaccatcacggatgaagctgcgatgaccgctttcaggaagggactgttccaagggtcccaactgaggaaatatttggcgattagagaaccgctagatcttgatgacgctctacatacagcatcacgatacgccttccttgaagaggaagacgccaagctggcagggaagtcccaaccacccaaagccaaggaaaaagcgcgggaggtctacaaggagccgcctcaacactatgacccaaaagcgaataaacgaggaacggtttttgccgcaatagtctcggacgatcaacctcaacagcccgggaaaccaaagaactcgaagaattcatactttcgtttccatcagttcggaggacattccacggaagagtgcaaacatcttctgaacatcctcctcgaaaagtacaagtctggagaagtagaggcggtctactatcctaagaatgggaagaataaatgcaaggacgatttcaaacaggctcaaggcgaaccggtgaatgaggggcaatacttgttaaagcatcaaccgaaccaagaagaagatcacacggaagaggctaggattccggagaacaaactccccgcccccccaaaaagatggaggggacagcaaccccaacgagctccaaaccatnctcgtggaagaatttccatga

SEQ ID NO: 5853 - DNA, 1978 bp, Arabidopsis thaliana landsberg
  unsure (1)..(1978): unsure at all n locations
tcaaggagtttgcattccataaatgttctgcttttggttcttaacaacacttgctgagtatagataaattttgtagatcgttgctttcatatgaccaaaaatcttactgagttctgtgacttctcgaaatttgaaacttcagatgtgtgcttctcggtgtgagctgtggtgccaatatagcagactatgtagcccgcaaagnnnnnnnnnnnnnnnnnnnnnnnnntcctgtcaaggttgtggctcaagtcctaatgtacccgttcttcatcggtagcgtacccacacagtctgagatcaaacaggcaaattcctacttctacgacaaacctatgtgcattctcgcatggaagcttttcttaccagaagaagaattcagcctagaccaccaggcagcgaacccgctcgttccaggccgaagtccaccgctcaagttcatgccacctacactaaccattgtcgcagagcatgactggatgagagaccgagccattgcttactcagaagagctaagaaaggtcaacgtagatgctcccgtgctagagtacaaagacgcggttcacgagtttgcaaccctcgacatgcttcttaggactccgcaagctcaggcttgtgcagaagatattgcaatctgggccaagaaatacatctctcttcgtggccacgagttctcatactagtgttcaccaaaatctccaggtagcaaaaagaggtgaaccgaaagtagaccggcttttttcgggttttgctgttcctccatgaagcggaaagagctgaaccgagagtaaaccgggttttgttgtttctaccaggaagtaaaaaaaaaggcaagcaaagcaagaggttctttttctctctgcgagtagagttagtgtagagtggtgtttactttgtgagatgggctagggaaagactctggttccctcggggtatttcctgtacattaaactatatacgtgtttctcttttctggtataaattagttgagagttatttcgtttaaaaactgtaatatctattaatccgtcgaccaaaaaatagaaatctattaatatcattattcaacgaaaacattagtttaaaatatttatcaagaaaatgaataatacatgcaagatagcattaatagtaaaagaaataaatatttttacatagaaaaaataaatttggtatcttgccaatataatttgataacgtcgcctgcttttagatttcttgcatctctaagattattccaccctcttccgatataataaccattaccgtcctttccaaggtttaccaaatatgaattgttattgtcttgtgcgtcttgttatgttctcaaccttatctttaggcaaaatcaaacgattcctataactaacatcgctatctgttagtgttttttgtatcatcatagttggattcattttacaaaaacttaaggtgtcttaggaatataattaagatttgtttccaaaaactaaaatatttgaggagtttgaacagtataacgcatatatatatatacttctaggccaaagtaatgttccttagtggaaaaaaacaaaagttccttagtggattgccttagatatttatttcaatagtattaattgtattaaacacaactctctaaatttagtacatgttatggatatattttgtaagttagcatattattaatcctctaaatttacaagtttatatgttaaactagtcacatattatgctgaattgtatttacaaaaccttatttttagtgctttttttgaaaagtcttcccaagccaaatctattataatatctaagtacataaaatcttttaatatcagaaaaaactcattttccaagccacataaaaatgttcattatatctttgacatctaagatttatttgatttttaccctaaatctcattatttttgacattaatatatatcaatttaaaaatcactattaataaccaaaaaatctagttaaaataagttgcatt

SEQ ID NO: 5854 - DNA, 950 bp, Arabidopsis thaliana landsberg
catggccgaaactgaattaaactcttttcaggtttaggaaaatttacaaaatttaaacgtttatcttgtttattaagaactggacttggagaagtaatgattaacaatctaatatgatgtttcattaaactcgtttctattggctctgattggtaacatgcattaatgatatagtggcgttttttaatgcgattatacagaaaaattcttaatcaaaaatatctgtagttgcatatgcaatccaattaacaacttagcccctaaactcgtagttgcatatgcaatccaatttccggttaacacaaagccaatggtttaaaatcctttaagtttaacatcgaatcaatcgatcgtagaaacttaaaggattttgaagatggaatactaaggagttaggactatcaaggataaatatcaaacaaaattcaagttaagatttggtacacagatcaatcttttcggtctgcatttggtttggttgggttaatcaaaatggacgttactcgatacgatgatatacaacagaagcttgaactctaaatagaagagacaaatcacatgatacgatgattgcaacgatgatatcaatcttttcggtctgcatgtgttcttttgctttgtctcccgtaaaaacacgggttacttttggttgaccttttttgccacatggagtttcaaaacactagtatgagaactcgtggccatggagagagatgtatttcttggcccacattgcaatgtcttctggacaagcctgagcttgtcgagtcctacgaaacatgttgagggtagcaaactcgcgaaccgcatctttggacactagcacggtcgcacgggattatctacattaactttccttagctcttttgagtgagcactggctcgggctctgatccagacatgggcttgcacaataatgaatgggctagcctggaatgagcgggtttgct

SEQ ID NO: 5855 - DNA, 4151 bp, Arabidopsis thaliana landsberg
ctctacgggccggcatgctcttttgcagcttctgtctgatctgcaaccgatgaggaaggagaggaaatccgctgaagcaacgattcgatgccatcagtgaacaactccgttacatagtaaatatcagatggttttggggctggccgatcatatttgttagcaagacaccatcgcgtgatcaactcattgatcaaatggttgggtgtcaaacaaactcgatagaggacttgtttggctgtgggacatgtaaggtcatggttcagccactctgtgatatatctcttttcatacgtctgaaaacaacaagtaaagagcaaaatcagcacaaccaccatatctctgtgtatacgcatttatgtgtctttatctatatgaatcatgatactgggcatttcatattcataagtatcgaaatcaaaacacaagcatggaaattaaaagatagtgagaactaaaatcgagaaagaatcacaagaaatcgaacctgcccagaaaatatgatcacaggatcgatcatgatcgtcttcgagagtgtacacttgaactctttcggaacttcaaccgaagaactatcagattcccgcttccgcttcttcgattctactatcttcaggcgattcaggattctaatcgcctcatcaattgatttcactgtctcaacgcgttctttgactcctccgtcgtttaagttctccctcagtaccttcttcaactcccgcctcagagtcagagtttcagcgtttgtttccgtcgtcgaatccgccattttcagccggagatttctcgagaaacgtagagaactcaaagcaaaaaccctagaaacttcgagaattgggagagaaatttagagagaatcagagaagccaagaaaatactgttatgtaaatcagttattcttcttcctctgcttctttgatttaattcatttttgttttaattttatgtattccacctgtgtatataggatgacacgtcataccatctttctgggcatttaatttttaagtttagctgactaatcagtaatcactttgattggtcaagcaaattcagattcattgatagtataattcgtaaattctttgactttaatgctaatgctatgatcaaattcagaatttcgttaaaagtttggtccaaaggggtaaagtcagatgatgtcacttacaattgtaatgagcagggtttgatgatgaaactgcatctggttgtggctcatcagtatcatgcaattcttcactgatctttatttatcgaaccagatgaaatcattctctatcttgctggagattgagcctgatgaattcagaaaaggcagcttgcagtgacgtgtgatacaatctggaatagtgtcaatgtagttgttcttgaaataaaatggtcgaggaagatcagggttttgaatgtttctcatctccatcaccagattatgacagaaccgagagctctccaatatctctacaggaaagctcacaacattcttgcaccccaaaaagtctagtgattcggtctgttccagcgtagagatcccagaagagatgcttgttagcttcatgcagctgttcatcaatagtttattgcgctttgagagtttatcgatccacaaagggactttttcgatctttgtcctgctcaaatccaaccattctatagtttttggaagacatggaaacgtcttgaggttcttgcagcctgacatgtccaatgctgccagacatggccaagacgcgactgttgtgggaacttcttctattgcagtttctgacagagagagaaatccaatcttcgaagatatttctggaaaactctccaatcgtgaacatctatcaagattgaggatgctaagggactctaagtccatattgcaggggataatctctagctttgagcaatacttcatgtcaagaacgaccaatttgttaaggttcttgatagaggaaggtaacatcaccaaacgtccacaataactgagacagagttcctcaatatttacggcttctgaaagatcaggaatctcttttagattttcagacttacttaaatccatctgctttagacttctaagaggctaaaagaacccacatgaaacaaagaaagaaaaacaatcagataataatcttatgcaatttgagaaaggtgagctattaaaattaacttacttgtgttccttcccacagcttctcaagctggctctcccttatgtttatcacaacaagaaactctggacgaaaactcaaaggcattgatgtcatggggaatgcatcccaatgcagcagcctaagtttacggggtaaataatccaagcctcgaggtaaatgaagctcaggttgatctttactcgaagaggacttgtagaatcttagaaacaacagattatgcatcccaccaaaagctctttcattcagaaaccactcattgatcttagatatgtccaaagatatgcccaaaacagctccagtaccctgaagcacaaaaataccaattgcaagtattgtttatgtgcaagtgtagtgaacttacaaatgaaagtaacgtagcaaaacatttgacttacagtgttatcagcaagtacatcataaatctctgaagcatccatcaagaattgacgtttgccaggctcggcaatagattgttcgcaaacaatttctcgacccaattgttctagcaaattgtgcatcctaatagtacgattgcatctcgatatgtgtatgagagacctactggtaaggacttgaagcccaaatgtgacatccaagccagaacttgcaagtatttgcttcacataatcaacgttctcaccattgaataaacaagcaatatgaaggaatatgaccttatccttgtcatgtataccatcataaccgactcgtaaaacatttctaatatcctcattaagactggttctgagtcgaggcaatgctgatttttgctcatctttgctcatccctcgcagagaggaccccaaaacctttagagctaggggaagatagccagcaagctttgttatttcagtaacaagctcgatacaaccatctggtgcagaactctctccaaatgcatattggcagaaaatctgaagagaatcacttctagatggaaaacccaactcatatatgcaagtgatcccatgcgctctcaatagctgtttgttttccgtggtcacaatgatcctacttccagaaccaaaccactgagattgtttcactaaggcatcaagttgttctagtttatcaacatcatcaagaacaacaagaactttcagatcctgcaatctttcttttaccaaacctaaatcatgtatcttcatatgcttatgatcaataacttcagacagaaactgttcttgcaaacgcaactggaagccataggcatcgagctccgaggtcctagaacttcccttaacattctccataaaaatagtgtgttggaagttttcagatagccggttgaataaagctctggcaattgttgtcttgccaatacctgcaggaccccaaatccccaccattttcacttcagttgattccagacataacaaagaatccagctctctcatatgattgtcgattccaaccagattgtaggaatctcgtgataatgtagaattcaattcatatgaaatgctcatagcaatcttgtcaatcagatctgcttcattgtccctatcaataagaaaagattactcccaccaaatcatcaaagaaacttatagcagaggcacatcaataactaataacggaatcagaacaactaaccagttttgagaagactcgccggctatattagctatatagaccaaagcttctctccatttctgcttcacttcctcatctggttgtctttcacatgcttcctcaaacgcctttccaaattctcccgttcgtttcctcacatcagatggatccacctcagggaaaaccggcatgatcatctggcttactttctttatctccaccaactcattcaaacactactttgaagatgcataggtccgcgacaacactacaaccgcaatcctagattctctgatagctcgtacaagctcagaactgatcatttggcttctcttgatatcattatctatgaaagtaccgattcccttacgccggaactccttgagaaggtggctgagaaaggctctgcggacatct

SEQ ID NO: 5856 - DNA, 672 bp, Arabidopsis thaliana landsberg
  unsure (1)..(672): unsure at all n locations
atgatgacatttgttgatgaccttgtgtctgtggacaacctttttgaagaccatctcacctcagagcctaacaacgagtacatccaaagtgtcgatattgtcgcttttaacaagatttagacacatgagaaagatgtcgagtttttcagttttggtgtcagtcttgttgtgtttcgctaaagtctcttcttcaagttccaaggccaactttggagttgaagcacattaacttcacttcacttggtcttaattaaaagctatttgtaagttcttgtctaagataaattgcctgggcttggtaacgtgtggaaagaattgcggttaaaaggcctaatatgtgaccacattgaaataccaaacccttatttactgcttaccctcttctaggctataacagaagaaagcacatgatggtgtgatattcagaagcattttggtagctccatgttaaatatgtggggaggatataaaatataaggaaatttgaaagatccattttgagcaaacaagcaagaaacacttgataaaaccagtaaccacaaactcatatcatccatcacctctctctctctcctttcatttatctttattctagaagaagagcattttatcaccttttaagcgaangaggcacatactgtctagacaaactaaacagatctttaccctcaa

SEQ ID NO: 5857 - DNA, 4998 bp, Arabidopsis thaliana landsberg
gacatactcgactttgatctcacttttagatttactaaattgaattgcatgtttgttttgttttcttaacacaaaaaaaataaaataaaaaaatgggaagtggtttgaagtgcttgatgggctgctgggtccgtactggaaagcagcggggctcgcatttaattgcaccttcttgttattcggatcagtcatccagctcatcgcttgtgctaggtacttcttcctctcttttttattgctttttaccaatctttttaatagtatattgatatagagggacaaatacatatatctaaatgatatcatcaattgattcatgtgtgtgtgttgttgggatgatgcagcaatatatattacataaacgataggttagacaagaggacatggacttatatatttggggcttgttgtgccacgaccgttttcataccatcttttcacaattaccgtatttggtctttcctcggccttggcatgaccacctacaccgcttggtacctcaccatcgcctctcttctccatggtcaggtatgtcctcatcaaaatcaaatgatttaaatgaagaaaaaacaatgtgacttaaaccggttgtaacttactggtttgtaggcggagggtgtgacacattccggtccgaccaagcttgtgttgtactttaccggagccaccaacatcctctataccttcggtggacacgctgtgaccgtgtaagtatttttaatatttctcatggattttcaattaattgtataatccacaacaattggaaaagtgatgcattcctaacaaactaattatagttggatataagttataatttcttctccatatacagcatttgttgtgttgcaatttgcaaatattaaaaaaaaaatgaattttccctgaagatttatgtttccttcttcttttttaaagactcatctcttttagcttctatatgtgcagcttttgccggttactttaggttctgtcctaaacgcacaaacagacaaaatcattattacggaataaataaagacaaatttaccagaaaaattctatttacctttttaacacacactagctactagctactgaactcaattcctaacattctttttattttagtaaattttactcacaaatatctatctcatcttcgagagtacgactacgtaacgtaaccacagtggtcggacccggacggccaatctctggtcggacccataaatccactgtaaaagacttttatgccatttccttttacattttatctataaaaaaagttataaaattttcagggaaataatgcatgcgatgtggaaaccaaggaagtttaagagcatctacttgatggcaactctgtacgtcttcacattaacgcttccgtcagcctccgccgtctactgggctttcggcgaccaacttctcaaccactcaaacgctttctctctcctccctaaaacgcgtttccgtgacaccgccgttatcctcatgctcatccatcaggttcctatcatcctaactctcactatgttacatgtctcacaataattacactatgccattaatgattggtccaagttacatgctattatttatacggtaccggtccatactaagaacattattctctttcgcaatgaaattaatactataagagcatccttattgatggtctcttaatacaattcttatgttaagagacatgtcttataactaacaaatgactcttatttttgttagttataagacatatctcttaacataagagttgtcttaagagactatcaataatgatggtctaaggaatcttgttatagtttatgacatgtatatatacgtctaactagttaattaacatttttcgccctattaacatatagggcgaatgatatatgtatgaatacaaatgttatcggattatatattctttctcaaaattttgtttcgaatttatagtttataacgttcgggtttgcgtgtacaccattgtacttcgtatgggaaaaagcgatcggaatgcaccacacaaagagcttatgtctaagagcgctggtgaggctacctgtggtggttccgatatggtttttggcaatcatctttccctttttcgggccaataaactcggcagttggagccttacttgttaccttcaccgtctatatcatccctgccttagcccacatgctcacgtaccgcaccgcctctgcccgccgggtacctacattcttctctcgctcacattaccattcctactaaagattttatgaattcagtagatgacttacatttatttcatttagatagatagttttgtaaaaaaaaaatattggaggagagagataaagatataacatacgttgagttattatgagctggcttataagacttttgcatttaatcccatatcaatgaggtaggtccatagtatataatgtgtccattattatcacttggctagttttataaatgtctataacatatattctcgtcgatgattaaaataagtagattagttcatgcaatgatatgatacgacgtattgatttgcctttttttctttaaacgtgatggcgtggcagaacgcggcggagaaaccaccgttttttatccctagctgggctgcagtttacgtgataaacgctttcatagtggtttgggtcctagttctcgggttcgggtttggcggatgggccagcatgaccaacttcatcaggcaaattgatacttttggcctctttgccaaatgctaccaatgcaaaccacctccagctccgatagccgccggagctcaccaccgccgttagttaacgtaagcgacgtgtgatagtgtgattgaacccttttttctttaattctgtatgaaagaaaatatctgtaattcagtgatttagtgaatctatgctataaaatttcgttgaagtcacgtacgtgattagggagctggtgctgttttgtgttgtcacgtgccagtcttcagttttatgacagactaataggtcttcctaactggtagaaaacaactgggtgaggacaaaatggttttcattttaatcaatcagccaatctgtcatatttgactccgagaggacaatacaaagattttgtataaccattttaatcaatccaactttcgaactaatgtaaatcctagaagcctatataggcccaatatagacccgaccaaaatagtgggcttgatgtcttattgtgaaggtttctttgcttcgtgtttaattttagtgaaaattaagatggttttagttattattttcttaaggttcggtgataaactcaacggctagtcagatggttcgggtaagactttccatttttctgtgacgtctttggttttgccacgtgtattctcagttgctgttaaacccaaccaaaattagtggggcttaatgtcttattgtgtacctgaaggttttgcttcttatttacaacaaagttatctacagtgtgtgtgattaatggaacaaattcaaacaatagactatgatgatacagaactaatttcacagattatgcaatgctctgaaaccagtttccacatggcacttccttgttcaatttcgtatttcctgctaaacttattccacagatgcaaaccataaccattcctctgcatataaagaagcttggttttgacccatttcgaatctttctctgttttaggcactttgaacaacttcttaatctcgagccagtttaccgaatagaacacagatggccgcatgacggtgaagttatagccacttgatccttctacagctctagccactcgtgaaacaaggtatggtccgttgtatccccatatgtttccgttgaaagttatagcgaactcttccatgaatttgagtaacagaggatggttcttgtcgaatattagtaccgcgttgtttagtcttgtccaatttgtcgatgaaggatcaagtgtttgtgcaccaatcacgtttctaagacctttgaagctttttagaataatcatgtctgtgtctaagtacacacctccatatttgtacatgtaagcaagcctcacgagatttgagagattctgagctaaagaaatctttccgggatctcttttaccgctctttatttcgtcgagccacaactctcccgcggttcctttgagcagaaaaggcaaatctggtgtgactgcaagaactttgtaaccacgatcaataaacggcttcaaagttgcataaccttgaggagaatccatggttgcggataagatcatcaagcaaccatacggatgagacttaaagacactttcaatagctaaaacctctctattgccaaagaaatctgctggtgatatccatgtcatgacgaagttgacttcgcatccatcaccgacaaactcatttaccctcttttgaaacttgtcagacaagttatctccactgaaaacttcgataacttggagcttctcgtttacttgtgtctgttgtttgagcagatcacttctttcaccttctctctcagaactcagaggtaagtgtggaatcactctcttgatctctatcttcactcctgagaaatctctatgcggttgcatcgagaaattagaaattagagtaaacgtggtaaccacgatcagagttacaaagctgatagcgaaggcggtgaaaagtgatgatgatcctgattggtttagtcgtctgttatcaatcaccaccgtgaatctcttttctatatcatgacgatccataataaacacagaactgaaatgttctgaagttggaaaccagaaaagaaaaggagatttagattgataagaaagaaaccacttttgagtttctctgtgtctgttttatttcttgtttaacttgttttgaccacgttcttgtctttgggggctgtctagttttgaaaagttaaagaactcagacatagacatttttgacgtattaccgaaataattaatattgatgaaacgaataatgggaaaataagtaatttcaaatttctaacaacacatatatttaaagttttaaaagg

SEQ ID NO: 5858 - DNA, 1754 bp, Arabidopsis thaliana landsberg
aagtcattggtgtcgtcgtctgtctttcccatattagggtcttcttcttccttttacttctttttttacgtttgaagcttcttctcttttcttcttttcttctcattgaagctttctttgttgcaggatttaatttaggattcacaattccaacacatacaaattgtttaaaaaatacaatagtcataaagtcataatacgttaaacattgaaaatgtgaagtataatatttggctttctcttcttgttttttcacaagttaagaagtgtctgaaaaatagtcatggcttcttctcaaaaggtttctgattgggccttatgaggtattgagaaaagagaagtagcccattaaggtattgagaaaaagagaagtagcccattaggtcttgagcaaaaaaagaagttgagtcgagcaagcaagagtccctgactcagtcctcttttctcagctgtccagaaagtttaaaccctaaattcgaaaatggaaacacgaaatcgaaccatacatctcactgatgcgatatggacggagattctagcgaggttaccactgagaatcatcgctagattcaaatcggtaagcaaaacatggaaaacaacaatcgaatcagtctatttccgccgtctctttgtgtctgtgcaccgaaaatcctcaacctcgtggtcgctaatgtggtacggacaaaaaaatctcgtaggtttccatggatgcgagacatggggtcttccaaagtctctatctttttacatcccatcgtctctttgtattatcgagggttcctcccatggattggttttgatttcagaaaatgatgatgattgttgctttgtgggtaatccagttttacaacagtggatcaaaatccctccacctccagttcactcttcagtgtttggtttggtgtctcgcctcgacgatgatggctttgttttgggcttcaaagtcgttaagttagctgaagtaatagtgacgaataactatgtctcgtgttctttgagtgtgtttgtgtattcctctgagactgggatttggacttgtaagactattcactgcccttatcaaatcaccaactttggttctttcactttggatggtaccatttactttgaccatcttagtgaacctggagtgctcgtagcttatgatttctattctgaaatctccgatcagtttcgggttatacctctcccggatcatccgaatcacggcttcaatagcgacttcaaaggtgctttgactacgtcccaaggatttgtcatgtatatcagaacattagctcaatcttcgtctaatgttttcaaggcttggaggttgaacaatgattcaacttggcaacttttgtggaaaatcggcctcccgtcacttatcggtgattatgtacctatggcaatgcatccatttgatagtgacattgtccatctttggagtcaagatcatcgtcatgtggtatcatgtaacttgcggactcagaagaatagaatcctcggagctgaagataatgatgaagatcataaagattgttacttgaaccagcctgtttgtgaggactctatggatgagatatgcggctgtaaagcttctgtcaggttactacaacttgttctcccacggtggatggaatcagtgccttgtcctccccaagttgagatgatgaatacagcttcggtaatctcttacgttacttcaatgcacgagacaatgataaggaattggcttcatcaatgatttcaatatctgcttttttttcttttct

SEQ ID NO: 5859 - DNA, 1057 bp, Arabidopsis thaliana landsberg
aaaccacgaagcttggctacgagagtgtttgcatagagtgagattgctttttcaagaataagaccaaccacaccaccaatccatcctaaaggaaccatgactgttcctgaatatcccaacacgtatgcgctgtttatacttgttgtcagaacgaacgctgcctgaaaccatgaatctgtatattccacaaaacttactaattagctttccccaatatgcgatcatatcagcttctaaacagttccgcttaatattgcaaacatgcataaagaagaagcaaatggaattcttaggtcacatttctttctttcttgtaaatgattttcatagtttaaagaaaaaatagtaataaagaaactgaaattgagcactaatccaacgttaattaaatagataaattgagaaatcttaagcagtaaaattaatataacaaaacacaaagagggagaaaacgaatgacaaaccgctgctaatctgatgagcagtgtcagggatttcgatatcaacaccttccccgacattgtttatgcgattcttagagttcatgacctctccaaatggttattgtgtctctgtagctaagagactttccctatataatagatggtcggtaacaacgggacagactatggtgagaaatcaagtccaactagaagtggcggagagatttttaaaagcttttagaaatcagaagttgttgaacagtttctttcattatatacgaattacgaagcaagcacaattaaaatgtggtgaatgaagaaatttctttggaattgagtggttcagatctagacacaatcatttactgcaaaattgggataatatatgaacaaattgtacaaatgatagtgttagacttatcacaaaacaatccaaaacaaaaaaaacatcaactctgaaatgtatgtggctgtgaatttggaaagacacttaaatgtttctttagaccgttgaagtgttgttgggaaatgagtgtacgcagcttgatccttaaagattttttggacatttctgccgtcttgttgttaggctgaataagactagatacgaaaac

SEQ ID NO: 5860 - DNA, 753 bp, Arabidopsis thaliana landsberg
ccttcaacagatcacgagatacaaggatcaccactaagcaaactttttaccatcactggtgcagccgctacactagttttcgtattcaacacagggatgcttccagaaattcaggtgatttcttttttttcgagatttttagcttcatgttttaggcttcaaaggtttagtgtgtgtattttactacactgcttgacaatccttcttatctacactgctttttccgtaatgatattgataggcaacagtaaagcaaccagtagtaaaaaacatgatgaaggctctatactttcaattcacggtgggtgttttaccgatgtttgcggttgtattcatcgggtattgggcttacggatcctcgacctcgccctatctactaaacaacgttaatggtccactttgggttaaagcccttgctaacatctccgctatccttcaatccgttatctcgttgcacgtaagtttctcttcgagaaaagaattatgtgttagtcaatccgttcttactcaatttttgtagatttttgcaagtccaacatatgagtacatggacaccaagtttgggatcaaaggaaacccattggcattaaagaacttgttgtttaggatcatggcaagaggcgggtacatagcagttagtacgcttctctcagcactcttgccgttccttggggacttcatgagcctcgctggtgcagtgagcacattcccccttacattcattctagccaaccacatgtactataaggctaa

SEQ ID NO: 5861 - DNA, 931 bp, Arabidopsis thaliana landsberg
ttttcttgaaaaaaactcatttattattggggggtttgtgctctttttttcattaagcttttcttgagaaataatacacagacagagaatggaaagggtcgtttagctttgtttgtcttctttgttagattgaatgatactttgttacttgcttttaccctataagctgctgaaatatgacacatcaaagaattgaactgatgttactttccaaatcatgttgtctccgatgatgtttgcggtgccctatagtggaaaatgttgtctttgatgattcaagaatgtgaacattcaataactttaagtttcttgatcagtttttgtcttccccaaagttttaagctatgaaaactctgtttttttttttgttttctgttactctgaatttacattgagatgaaaaatgagtggctgaggaatatagaaataattgacaaataatatatactctgttttagtgttgcatgtgtgtgaaagcttaagtgttgaagaacttgtacagattcatggtttcaggtagcttttgttctaacgaccggtataaacagtgcctatgtgttgggatattccgggacagtcatggttcctttgggttggattggtggtgtggttggtctcattcttgctaccgcaatctctctttacgcaaacactcttatcgccaaacttcatgagtttggtggcaaaacacacattcgttacagagatcttgcaggcttcatctatggtaaattctccatcactctctcgcaatatcaaaatacatttcaagttttacattttaacgagaattgtatttgcttgattgattcaggtaaaaagatgtatcgtgttacatggggattgcaatatgtcaatctaatcatgaataaattgtggcttcatcatacttgctggttcggccttaaaggtccaataaacgaaacaaatg

SEQ ID NO: 5862 - DNA, 4458 bp, Arabidopsis thaliana landsberg
aatgcaagttcaatgtacaatatttttagtcaactgtgagattctcttttgataattttaaaatttttgacaaaaaaaacacgatttgtatccttaaagtcttgcttcgttattaaaatttaatcgtaatgtgttaacaacttaacatcatgaggaaaaaaggattcattgatataaactatccattacaaaagagctgagatctttaaaattttaacttcagatcaattctgagatcaacaacacatgagaacatggataagaagacaagttatttaggagatggaagtttcaggttttctagcctgaataaccggagattcatcaatggaaagattagagagattctaggctgtgactctgtgacgcccttttgctattctccgagctatgactctccgtccacctttggttgccttcctgctcatatttagacatttagtagccgtatgagtaaccagaattggtcattcaaacaccatgtacagatgtagaatcttgttcctactttctattagtgctaaacaacgaattcctctaacgtgaatgagaatgagcaatgattagaagaattaaaagagctttagaatttactagattttgttgagaaatacaagtgaacccctatttttggactaaactaagaggttgaacacaaagtgacataccgagcaaagaatccatggttccgtttacgccttatagtgcttggttggaatgtcctcttaggaaacagaagcaatggctcacttgaaggatcaactacattaccaaatacaaagacattagacaggcaccaacgagcagcaaaaatatacaactttgcagagactaaaagcctcaaggccaatgaacaatacaaggctgaactctcctttaggacacataacactcttgaactatatcaaactcaaagcacaacacagccagattcttaaccctcctataagttgagacataagttaaataaatgtgcttcccaatactttataattcgctatgatctccattcaagaacagaacactatcagcaaaatggccggtaacaggactcgataaacgacctaaacattgttactactgtgtaagcacatagcaagcaagcaaagtttctgatttcatcaaccattgacacacaatccacaaaagaaacagaacacctctcaacatttgattgatactcgagcatctagtgactgcattgcatacactataaatcatattcataagccaagaaaatccagcttcaggagagtgtgaacaaattactaatctagctactgacagatacaatcaaaatagagtcaaagagtgaaagtaccttctggcaagaagaattcgagtgaaggaagaccagaagggtaaagaaatccacgttcgttgagttcctggagcgaagcagtgtcgttagggcgcgaaatgagtgagctctgtagattcgacaacgacgggaaaaaatacggcgggatttcttgtccctgaggagctatgtattgaaaagaagatctgagattgttctgcacgatattcgttgtcggcttcgttagaaaccgattcatcaacgaagctcctgacctgattagggttttggccgccatttttcctcccttctccgagattgcgaaaagcgtcacacagttctctcttcgaaaatgtacgagaaagacgaggatacatgggctttgggccacaggcccaattttaataaattaacagtggcatttttcgtaatttatcagaatcttagcaagagaaaattggcattaaattttcatgtaacagaacaaaaatgaacaagagtgtaatctacaaaatctacattgtccatggtctctaacattgtgtagatcatctggctcgaagggtgagacaaatcagcgacggcgaaggaatgagtttggttaccgattacgatccagctcaaggctggttctttcttaacccctcgatctctcatcagttctctcacctcctctgctgaagaattgactccagaatcgttgtaaatgttgtggagcaatacgtatgagccagaggcctcgggttcaagttccatcagtctctccgcaacgcgtttcccaattacgctgtctttgtaaactctacaagaactcagtaatgctctccacgtcactggatggtcttgaaaaccagagctcaaaatcagattctcagcatctgataatcttcccgtgcgacctaaaagatcgacgaggcaagtgaaatgtttctcgtttgggttaatcctgtaatcgttcttcatgcattggaaatactttagtccatgtgtgactaatcctccgtggcaacaagctattagaacaccgagaaaggcttgctggttcggtttaataccgtgggttttcatcgattcagagatgtttaaggcttcgttagcagaaccgtgttgagcaaggcttgagatcatatcagagtatgttgcaacgtctgggttttggacctcgataaatacttgattagcaagcggcatgttacctgactttgcatacatagaaatgcttgacgtcttaacactggtgaaagcatcaattccgctctgtatggcataaccctgaatctgctctcctgagcttaatgcagcaaaatcagcacaagcactcatcataagggaaactgtatactcttctggtcttatatgggatgaaaaaagttgtcggaacagatcaaatgcgctttcaagctgctcgttttggacatggcaatctatcatcgatgtccatgaggcgatatcttgctttgatgttgaagcaaagcattgcattccatcttcagttgaacccattaacgcatacagctcgattagagcgctcccaataaactcatcagactgaaaattgttcttacagatgagagcgtgaatctgccttccatattccaaggttttcgctgcactacaagctttgagcacaactgaaaatgtcgatggcgagggttccaaaccccgtctttgcatatccatgaagagcttaaaggcttcactagaagcttcatcggttatttcatccatttggagaaacccagatatcattgcgttatacgtaaccacattcttcgaaggcatcaaactgaaaagctttatcgcctctttcaaacttccgtttttggcatacatgtcaagcaatgcagtacggacaactatatcaaactccattcctagttttgctgtataacagtgaattgccatacctttttctataaatccttcgttcaggttaatacaacaagcctttagcacactccccagagcatacgtagtcagatttaggccgtctctatgcattttagccaacagatttagcggttcttccgctgcgccaacccgaacataaccggaaatcaaagaattccatgaaacttgatccctttcatcgcatctatcaaataaagacatagcttggtcaagctttccacacttactatacatgtcaatcaacacattgatcaaaaacacttgctgagatagaccattcacaacaaccaacccgtgcaacaattcccctaaatcaagatcacacctttctccacaaaagcccaatgcaccggcatacgtgaacttatcgagcttcaaattagcttctctagcttcaagaaacaattccatggcctgttcataaaatcccatctgagtgtacccagaaatcaaagaattaaaagaaataatgtttcgttcaggcattctgtcgaacaactggcgtgcaaaacccaattcccggcacttgcaatacatgttcagaagattgttgagcaagtacagacacgggttcaaggaggacttgatcatgtgtccatgagcgagctttcccagtaccacggagcctgattttgcagctgtctgaaaaagtatcttgtaaccttcggaatctaaagccgtgttctttggttggcataacgaagacaaaaacctgtaacccaatccaactcgtttggtgataagagtaaccagagaatcttgagcaatgttgttgaaaaaagtctttgctcggaactgtaacaacatgttctcccatcacataacgaaactaacggcttttgtctgtaacacaacggtctctctggagatcataaacgctttgctccgttctttttccaaactgggcctctatatagcctttagttaatagttttgggccccgtgtatattttgtatcgtatttgcgatgtgttggtatatacatttgacgttgaaaccacctatatatatatatgcatagttgaccatcttttgatttaagaaaattcttcacaaaagatttgtttattgagtctaatttgtcttaggaaaatcttggtattataacatgaatttcgtgttaatttaaatcaaagctcatataagcaagcaaaccaaagatctttaaattgtggtcaacgggaattgaatcggacggtggaaagtccacgtgttagtaaatcgagccgatcacaccgtccaaactt

SEQ ID NO: 5863 - DNA, 2085 bp, Arabidopsis thaliana landsberg
gagtgagctatgcaatcggctagcattgttggccagaagtagccttgctttttgattatgagggagagggtacgtccactacagtggctaccatattatccttcgtgcatgcttttcatgaggtcttttgttttttgcccgtaggtacacactatatagggacctgcgacgctgcgtttcataagtctcccttccatgatgcagtaccttgcactctgggctttgagttttctggccttccacttgtcgggaggtgtgatccctcgttcgatgtaatcgatgattgagatactccagtggcacgttggtacggggcaggttgttcgggggtttcgagctatggctcttcctccgctgcacttgcctctgcggctgctgcgagagctctagctgccgcggtggtgcttcgggttactcgcgtgaagttgcaagttgtcgaaggtttccatcccagcatgtttgaccgttaggtcgatgctcgggtgttctattccttcgacctggataattcttttgacgaaaggatctgaggtagaagtgagagctgccaaggcgtctcccaactcgtcaccagccagttccaggttagttcaaacgattcgaactgttgggtcaaggttttgaccagttcgagtaacgcttccatgcactcgtctttagcttcatattccccgtggaactggctggtgacgagttgggagtcgctatgggcgtgtatatcgcggatccccattccttgagctagcttaatgccaacaatgaagtcttcgtactcagactcgttgtttgatgcgttgaatccgaatcggaacgattattcgataactgcctcggtgggggaggtgagttgtattcctactctggatgcctgtcggttggaggagccatcgacgtggaggagccacttcttattagagttggttccatccaggtccgctaacgggagctcgattacaaagtcggctaggacctgtgctttcaagctggttctggtgcgatattctatatcgtactcgcttagttatatggcccattttgcaagtcaaccagattgagttggactgtgtagaatggttctgattggttgagacgtcatcactacgatggggtgtgattgaaaatatggtctcggttttcgacgcgacatgactacggccagtgccagtttttccattgctggataacgggtctcaacgtctatcaatgttttactaacgttatagatcggtttatgtccttcgtgatcttctctcaccaggacgctgcttatcgcggttcaggagactgccgtgtacaggtacaatggttccccttctttggggttttgcgagtatgggtagttcggaccggtatgctttcaattgtttgaaggcctggtcgcagtcatcattccaatcgaactttttatcctttcggaggagctgatagaaagggacgcatttgtcggcagacctggatatgaacctgttgagggcggcgatacagccggtcagtcgttggacctcccgtgccgtttttggcgatggcatttcgatgaaggctgcaatctgcttaggattggcctcgatgcctctttcggttactaggtatccgaggaattcccctgatggaactccgaaagagcatttctcggggtttaccttcatttcgaatttgtttaggattttgaagcattctcttaattacgggacgtggtctttttcgcgagctgacttgaccagcatatcgtcgatatagacctccatcattttacctagctggtcggcaaacattctattcaccaatctttggtaagtagctccagcgtttttttaaccaaagggcattactttataacagtaggtgcctcagtcagttataaaagctgttttttcttggtcatctggggcgcataagtatttggttgtacccggagaatgcacccatgaaggacaatagttcgtgtcccgtagtggcttcaaccagtcggtcgatatgtgggagtgggaaactgtctttaggacatgccttattcaggtccgtaaagtcgatgaaaactctccacttcccgtttttcttttagcgacaaccgggttggcgagccag

SEQ ID NO: 5864 - DNA, 1147 bp, Arabidopsis thaliana landsberg
accttcttgaagattgaccaacttcaaaaacacgacgagtaccagctgtgactgttgttcccaccgaagacgtgaattagaatccgtggagacttgttagccttgacagagcccctgataagaagttcccctaacatgttggttaagtccttctcttggagtaggaaaatgaggatgggttgcaacaaactctccatgattcaacggtggggtagcaattcttggaggagggttcacaggaactagaaaggaagactcagtcatttgagactgagaattcatagtcgatataagcctttcatcatagaatacagttctttcccttccataattaggtaatcttggtcgataaggacaataggtcctgtgatgtgtaactcaaaaacagctactgcgtatcctcctcaacctctcatattaaaacctgattagagcagtctccccataatcaaaagtgatcctttggaagaaccttagtctatcagtgattccaatcctcactcggactcgaatataagcaatttgagtagtggttgcatcatggaagtccaaagtgatgatctcaccaagttcatgagcaatctccaaagatgtctcctcacaaacatagggaagaggaattcctcgcatctgcacccaaaggtcgatgatagtcacaaaatttaaggcatgagcagactcctatctatgattgctaataatgaagaagaagaagaagacaatgatcctggatccttttctcagatggtaatatttgtttcgtttttgaacagatcttattctatgaaatgagtttcttgtatagagtaatacttaaatgatgttttgtgtatcttgtagattgtaaaatcagaggtgtgcccttttggatgcttaggtcaacggtatccttttgagtaagattttcactaaatatggttacattaatactttaatgctgtaaaacttgtggcaaaatttgcactttaacatcctgctctctcgaaacatcgtaggggtctatgtctttatgtagagtgttctttctacgttactgagtactttgctcgtgaattctctgagagttcacattcaagtagccaagaggaaacatacacagaagaagtctctactcctaatggttcacctgtgatactaccaccattca

SEQ ID NO: 5865 - DNA, 1097 bp, Arabidopsis thaliana landsberg
tctaagattcagttgcatatatgaggcgcaaattctaaaacaaggaccaagtcggtgcatgcttaaatgggctggtctcaaaatggaccggtttggccaatcacaaattcacaaccaccaaattcactaaacatgacaatgaacttcaaaatgaatgcttcaaagataaaaaagtaacaaataaccataaccaccatatatatattcgaatcccaaactgagttcttacaagattctttctggtctattgagtaaataccaaaataccaaaaaagattgtacattgacccccccaaaaaatattcgaaatactcgggttaatttttccggtatagatagtttcttatgccaaaatatggctactttctgggtcaaccttaaacaaaagaaagaaaaaatagaaaaaagcaaaagatcagacctgacattgattagtcctgtgccctaatgagatgatacgatatgtttcttcctccattgtacactgtactgactgctactaccttcatacccccctaatctagatccatacccacttcttcattctctttcacagcttcactttcctcattctctttcaaagcttcactttcctcattctctttcacggcttcaccttgctcattctctttcacagcttcacttttctcatccgcctctgcgttctctgaagagaatgcacaaggagttgcagcagggtctagttccagaaaaccttccggtgcgttatcagcttctttccctgtaagaatgtaatgaggcacctgatgggagaatcttaacatttcttccttggcaatcttcctcacaccaagtttctctgtgcatctgcggaaaactaccctgaacccttcagttttgagtaagagagccaccgttagactctgatcgtcttctgtatagtcatcaagaacttccaccatctcatacttgtgtttaacttcatcaggggtattcttgtcccattcaggggaccaatttcgatacaatgcccaaacttgtccctttttgggaagaatatggaggagtcctcttgcacctttggtaaaatcgacactgtgagaaaaggcatttagtgtatctgtagattcatatct

SEQ ID NO: 5866 - DNA, 4077 bp, Arabidopsis thaliana landsberg
cttttaatttcttagagatcttcagtaaggacttggtgtttttttattggaggggtttagaggttcgtttttttttcggtccgaaggagaatttttccgatttccttttggcgttatttttgttttttggagtttttgatcatcgtctatttttctttttcttttttggatatgatcaataatattttatatttttgtgtgtttcaaatatgttgaattttggttgttgtgtggttacttcaatttttacagaaatctacagagaaataggcagtggcggaactagaacttgcagctctaggggtcaaaatgtataaaggaatgatcataggggtcaatttatgtatttcattggtgttaatttaaaaactgtagcaaaaaaataactaaatttcataattccatggaggtcatatgaagaagataaacgaatgctaagatctattgaactcggtagaactaaggaaatttgaatataacaaagctggattgagtttaatttcaaatatgttaattttgcatcaataataatccaaaaaccaaccaactaacgaaaaccggactagtcactacaacagttcaaactaaattcttcacaaaacatctcttcaaagtttgaaaaccttaatagtcacgtcttttgaaagtcgtaaattgaaccatatatttatatagtttggctctaaacgataggttacaaaagtcttcagcttagaaatgatgtgttttctacacttttctcttcttttttttcttttcatctcacatgaatcaaaaagagaaagcttaattacattaaaggttgatgtgatatttactttctaaatatttgctagaagaaattataatgataacattaaattaagttatagtcatttctatttcggttgtctcccactttctgctatgcttttacaacaacagttcaagatttggaatcgttttctttctccaccaatcgtagtaatacttctttttgtgtttgttgaaattttgcaagattctctcttcctctggttaatacacataacttacttggtaagcttggctgcattttcttttcaagcttttaatcaaagactcactagaaattgcaaaggcaaacataaaattatgtgatcaaactcctactgtgagtttttggttacaaacaaaagttaaaaacaaaagcttgatatttaaaagataaactcaacacatatgcatttgattggcgcacagaagacaattcaagacttgggaaaacagtgagccatcaaaatcgtcagataattcagggaatatattgaatgtggagatgtggtaatcacactattgcacacaaagagtggcaaacaagcggcgcccttggtttggtatagtaagagacaattgttttggactgtttgtgttgccatattcacaaaaatactattgagctatgtatgttaaacattatggtcaatgagtagtagtgaacattcaagttttttttttttttccacttcaagtttttcatcttattattatttttcgttgtgatgcagtagtacggcccatcttcagcagtagtatatcaaagccgaaacagatgacaaattgtttaacatgcacttggattattattgagagttgaaatacaaaggcccgttacaagcccaaacgaaggtacataaaagaaaagcagaaaatgaaaacgaaatcgatagggataagtttttccaacagacggaaacacaaactacaccaggtgaaatagatcacctcccaagtgcttgagacacgaaccaaccacttattatcagatcacaaaaagcttagaagcttccaccacgaagacgaagaaccaagtgaagagtcgactccttctggatgttgtaatctgcaagtgtgcgaccatcctcaagctgtttaccagcgaagatgagtctctgttggtctggtgggatcccttccttgtcctgaatcttagccttgacattatcgatggtgtctgagctttcaacctccagagtaatggtctttccggtaagggtcttcacaaagatctgcataccaccacggagacgaagcacaagatgaagtgtcgactccttttggatgttgtaatctgcaagggtgcgtccatcttcgagctgcttaccggcaaagataagcctctgctgatccggaggaattccctctttatcctggatcttagctttgacattgtcaatggtgtctgaactctccacctccaagggtgatggtctttccggggagagtcttcacaaaaatctgcatacctccacgcatacgcaagaccaagtgaagtgtggactccttctgaatgttgtagtcagccaaagttctgccatcttcaagttgtttaccggcgaagatcaatctctgctgatccggtgggataccctctttgtcttggatcttggctttcacgttatcaatggtgtcagaactctccacctccaaagtaatggtttttcccgtcaacgtcttcacgaagatttgcataccaccacggagcctgagaacaagatgaagtgttgactccttctggatgttgtagtcagcaagagttctgccatcctccaactgctttccggcgaagatcaacctctgctggtccggaggaataccctccttatcttggatcttggccttgacgttgtcaatggtgtcagagctctccacctcaagagtaatcgtctttcccgttagggttttaacgaaaatctgcataccaccacggagcctgagaaccaagtggagggtggattccttctggatattgtaatccgccaacgtgcggccatcctccaactgctttccggcgaagataagcctctgctgatccggaggaataccttccttatcctggatcttggccttaacgttgtcgatggtgtcagagctttccacctcgagggtgatagtctttccggtgagagtcttaacgaagatctgcataccaccacggagcctgagaaccaagtggagggtggattccttctggatattgtaatcagccaacgtacggccatcctctagctgttttccggcgaaaataagcctctgctgatccggaggaatgccttccttatcctggatcttggccttaacgttgtcgatggtgtcagagctttccacctcgagggtgatagtctttccggtgagagtcttaacaaagatctgcatctgtaattcacaaaaaactgagattaatcgcttggataatctcaaatccgattaaaaaagctaccaccagatctgaatataaatcacatatcggatcaaattcaaagaatcgacgcctaaatatacaaatctgtaaaatctacgaaccctagttcagaatatagatgagatctagcgatgaaactcagatatttatctccgatcaaagattaaccgaatcaaactcaaagaacagggacgaaattgcgatcgaatggaaaataatcgaagaaactgaataagaacccagaaatttaccttgatcccgattgagagatttgagagaacgatttcagagtttgagaaatttggaatctgaatttgtgaagaagaataggtcttaggttattaatatataagaaaaaaagacgaggacgagtcggtcacgagaaagctaaggcggtgaagcaataaccaaccaaagcttgacacgtaacttttacacgaaacgattttttggctaattgccttatttgataaacacgatccgtgtgcccgcggctgcaaccaattttaacgccgtttattactaaccacaatctctatcttcccggttattagagccagatgttgagacttaacgatcgtaccaataaaaccgggttcaataatatatgtaacccggtttgatccgataggatcatattgaaccgttacccatggcacttaataaggttttaattaaagatcagcagattataaatttgagattttgaaatataatgctttcgttgttttggccagactagaagcattaatacaattgtttaattcactttaaatgtgaacatgatttgaggatatctctgttttattgtttttggaacaaattgttgagtataaaaaaaaatgagaaatttttta

SEQ ID NO: 5867 - DNA, 1874 bp, Arabidopsis thaliana landsberg
ttgggtgttgttgagatcgtcacaacaactcagaagatgaattacttcaagaacttgagaagatgtgtaaagctcttgaggttttgcctctacctcaaactactctatagatcccgcaacgcttacctcacatgtttagacccatacaaccagtaaacctcatgcttgaatgtatctttcactggatggctttctctgtttgctcattattcaattcctcacatttgtccagtttgttttttggttttctttagagtccaacaacatcttctgcatacgtttgtactttgattgttctacatctttctttctgcatcatgtctcctcctgtcagtcattcagccataatcttctttgattaatgtctgtgataacagtgagaagttttgtttatgtgccacaacagtctaaagacgctgctgttttgcaggccgtcgatctaaggagttcaagtaacttgaacactccaagctctgaggtgcattaactggattcttagttcattcagctcctagaaacaacgatatgcattgctaaggtcatactccatgtttcagtttctgcaggtctatagtgatttctactgtgctgcattacctgaaataaaagatttcctggccacaatctgcagatcatatgattttcctctagctttgtcatgggcgccgtgtgctcggcaagggaaagttggttcccgacattctgatgagaacttctctgagtgtgtttcaacaatcgattctgcttgttctgtccccgacgaacagagcaaaagtttttgggaggcatgctctgaacaccatctgctccagggggaaggcattgttgggaaagcatttgaagccaccaaactcttttttgtgcccgaagtggccacatttagcaagactaactacccccttgcacaccacgccaagatatctggactacatgctgctttagcagttccattaaagagcaaatctggtttggttgagtttgtgttggaatttttctttccgaaagcatgccttgacactgaagcgcaacaggaaatgctcaagtcactatgtgtgacactgcagcaagatttcaggagttcaaatcttttcatcaaagacctagagttagaagtcgtattacctgtaagagagacaatgctcttctcagaaaacctgctatgtggagcagaaaccgtagagtcgttgacagaaattcaaatgcaagaatcctcatggatcgcccacatgataaaggcaaacgagaagggtaaagatgtatcactttcttgggagtaccagaaagaagatcctaaagagctctcatctggccgggagaacagtcagcttgatccagtccccaataatgttcctttagaagctgagcaattacagcaagcatcaactccaggactcagagtcgacatcggtccaagcacagaatcagcttcgactggtgggggaaatatgttacacagtaggagaccatgcatctaaaaaagagcagtatcacaattgttcattggcttggaggtttttcgacaatacatggctggaagcctaatggatgcagccaagagcattggtggtaaaagaatgttgatcactgcaggtgacatagccccattctttatcaattttgattgttattgtttcttgggaaaagcataaccattacgttcattagtcaaagtccaaaacattccaaatggatatgttgaacaaaaattcatgcctcaggatatgtgaaaacttcatgggcaataatcatcaaaatccatgcaaaaagaggtcagtctttcattatatctatgtggtagtaaaaaaatcatcgtgctctacaaaccttttcatcatggcaattgatctgtctctcagacagtgaacaaacaaggt

SEQ ID NO: 5868 - DNA, 3729 bp, Arabidopsis thaliana landsberg
cattgatgcttactattaaggagaaagatctacactctgtgaaatccggtacatgtaacgctagttgcatcaggttttatctcgctaagcttttgagactttctggatatgatgcagctgtatgttcagctagatggcaaggtggtggcaaagttcctggtggtatgttttcgcttctaagaaccgtcttatacaagtgtttctggacatagaattctgagagaatgatatgttttgtttgtttgcaggagataatgagtatatagatatcatattgagtgatactgaagttggtcaagatgatcgtttgattgttgatattgatttcagaagtcattttgagatcgctagagctgtggattcttaccaacggataatggaatcacttcctgtggtttatgtaggaactgttgcaagattaaaccagttccttcaagtaatggttgatgcagcgaaattctccttaaagcagaattcaatgccgttacctccatggagatctttgaactacctgcgatccaaatggcattcacctcacaaaaggcatctcggtcctatcgatcaacaaggtcctggaatgttctcaccgggattacatggacagtgtgctgagaatttaaagaggcttcagtttgctctccaggttgaacaagaggccgagagattcatgaagaagaagagcggttttagccgcaggaacaaacccgagataatgagaattcaaggggctcgtgctccttaaagagattgtacagatgttttttggaggcatcaagaggccaaagaattttgctctgttgagtcgttttcgagtgtaatatttttgcggctgcgtctttttttctttttaatatggattcatttggggttacaataacagccaaggttaggctttatacaaagaagataatatacgaaaggtaccgcaatttttgccgctgttgtatgattcgacattgggagagattgttctaataagcatgtttctgtttggggttcttttccccgtgttattgagtgttgtaataacaatttaccaggaaaatatgattaacaaatcactgttatgatcaatgtttcttataattattcataccaatgtggtatacgtatgttatgacctctcatttcagatcactattgcacagttacgccagaaatgcaattagttaattgtggtcgatggactaattatcggactaatggtccgattagtccgtatctggttaagtcacataaacaagttaaatctgccttctaaattctaagatctacggtcatatccaatcatccacaattttgtattcatccaaaaataaaaagccaatgatatatttctttctttctttcaataaatccatgatgaactaataataaatgtatttgatgcatatgacatgttatccaaacttatattccattttattcttaatttagtatatgatcttcccattaaattccattttattcttaattaggtataagatcttcccattaaattccattttattcttaattaagtataagatctacctctcttagtgatgtaaacttaataaaattgtgtaccatttgttgccgcccggttcttctatattagtttatattacatcaaatttgattacaatataaaaggcaacgttcatgcttatcatctacattaatttcactagatttttaaagaaaaattgtagagacatggagaatctacattagtagtataaatacacgcttattcttagcctagtcttactacacaaaacaaaacaaaacaaagcaatggccaaaacgattcggtctttcattctccctttcctcctcatagtcgccggcgtgatctttcaactctcagccgtgacttccgccattggtatcaactatggaacactagggaaccttcaacctccacaacaagtggttgacttcatcaagacaaagaccacttttgacagtgtcaagatctatgatgctaatcccgacatcctccgagccttcgcgggctctgaaatcaacatcaccatcatggtccctaacggtaacattcctgccatggtcaacgttgcaaatgctcgtcaatgggtcgctgccaatgtcttaccgtttcagcagcagatcaagttcaaatacgtttgtgtcggaaacgagattcttgctagtaacgacaataacttgatatcaaatcttgtaccagcgatgcaaagtcttaacgaagctttaaaagcttccaatctcacttatatcaaggttagtttcaagtcatgatgataaaaaaaaaaaaaaaacttgcgtttacgaaaacactaatactaatacatgaatgttttttttttttgtttttttacatatgaatcatatttcataaatgttttttgaatacgttgttatttgatactactatcaacaaaatgtaattaatccaccattatttggcttcaggtgacaactccacatgcatttaccataagctataaccgtaatacaccaagtgagagcagatttactaacgatcaaaaagatatttttacaaagatcttggaatttcatcgtcaggctaagtccccattcatgatcaacgcctacacttttttcacgatggacacgaacaatgtcaattacgcaatatttggtccatcaaatgcaataacggataccaatacacaacaaacctacaccaacatgtttgacgcagtcatggatgcaacatattctgctatgaaagctcttggctatggcgacgtagatatcgcggtaggggagaccggttggcccacggcttgtgacgcttcatggtgctcacctcaaaacgctgaaaactacaacctcaatatcatcaagcgtgcacaagttatagggacacctctaatgcccaaccgccacatcgatatcttcatatttgcattgttcaatgaagatggaaaacccggtccaacacgtgagagaaattgggggatatttaaaccggacttttcaccgatgtatgatgttggagttctaaaaggcggtggaagcccgcttccgtttccaccgataaacaacaatggaaaatggtgtgtgggaaaaccagaagcgacgttaatgcaactacaagcaaatattgattgggtatgcagccatggtattgattgtacaccaatctcacctggtggcatatgttttgacaacaacaacatgacgactcggtcctcgtttattatgaacgcttattaccaaagcaagggatgcgttgatgttgtctgtgattttagcggtactggcatcgttaccagtactaacccaagcactagcacatgccctataccgataggggaaggtggcggcggcaatggcgcaaaaagcaaaagtgcaaattggtgtatggcgaaacaagaagtgacagagacacaactacaagctaatattgattgggtgtgtagccaaggtattgattgtaaaccaatatcacctggtggcatatgttttgataacaacaacatgaagactcgatccacgttcataatgaacgcttattacgagagcaaaggatactccaaagacgcttgtgacttccgtggtagtggcatcgtcactactaccaacccaagcactagcacatgcgttgtaccagcatcagtaacgctcttgatttttaaaaagcaactacagaaactgaaaaaaatcaataaaacaagatcctttatttcatataagaacaatcattttcgtgttttatgtggatccttaatttcatat

SEQ ID NO: 5869 - DNA, 4343 bp, Arabidopsis thaliana landsberg
gtttaagaatacctactagatgaaaagtaaaaggatagattcgttgtcgatattacagatattaaagatgaactcttgactgctacttaatgtttaaataacgagttaagaatattacataagtcatggcaacaaataaactaataagttatccgaacgttagtgtgttagttgacaaatcaaaacaatgaagtgaggaataccaactccagtcctctcctttcgataaagccgactctttttactcaaatctatattctaatccaacacttttgttttggtataatctccaaatagcttttttggtctcataatgagatccttctcacttcccactaatatatatatacacacacacatatactaacacattacacacacttagagaaagcagagcagagcatagagaaaaacataacaatggaggttgagaagacagagaagaacattgcagaggatgatgagtctaagatcatctacagaggatggaaagtcatgcccttcatcattggtatttattcatccatattctttcttatattttttctttttttttttttttttggataaaaacttttgtttgcttacaagtataaagtcctcatgttttttcataagttccttgttcgtttcaaaattatgatttttgtttacttacactcataatcttgaaacgaacaaaaaactgatggaaaaacatgaggactttatacttgtaaataaataaaaatatttattagaaataaataaacaaaaatataagaatatttattaatttcgtgctcttttagtatgtttttattattatttatgaaacatttgattcattgacaaaaaaaacatttgattcataaaattaaaacataggactttttttatggatctgtttctttcatgttttttatttttatttattataacatttttggtcttgaaacgaacaagaaactgatagagaaaacagaggattttatgaacagagtaacttaatgctctgtttcttaatttggtaggaaatgagacatttgaaaaattggggattgttggaagttcatcgaatctggttatatacttaacgacggttttcaacatgaagagcatcacggctgcgaaagtcgtcaacatctacggtggcacaagcaactttggcaccatcgtcgctgctttcctctgtgactcctactttggccgctacaagaccctatctttcgccatgatcgcttgctttctcgtaaattctaaaacctcttcatcacaattttcagtttgaaaaaaaactagctgattatgtctgaaagtttcaatcgtttgttgtgtttgatgcaaagggttcggtggcaatggatctaacggctgtgattcatcccctgcatccagctcaatgcgctaaggaaataggaagcgtgtgcaatgggccatccatcggacaaatcatgtttctcgccggagcaatggttttgctggtgatcggagccggtgggattaggccatgcaatcttccatttggtgctgatcagttcgatccgaagacaaaagaagggaaacgagggattgagagtttcttcaattggtatttcttcaccttcacgtttgctcagatggtgtcgttaaccctcatcgtctatgttcagtcaaacgtgagctggagcattggtttagccatcccagctattctaatgctacttggttgcatcatattcttcgctggttctaagctctatgtcaaggttaaagctagtggcagtcccattcacagcataactcgtgtcattgttgtcgcgatcaagaagaggcggttaaagcccgttgggcctaacgagctttacaactacatcgccagtgatttcaagaactcgaaattgggccatacagagcagttcaggtactaataacctcactacttctcttagtttcttgtggaacaacttagaaacattttagggttttcttaatttgcaggtttcttgacaaatcggcaatccaaacacaagacgacaagctgaacaaagatgggtcgccggtggatgcatggaaactctgcagtatgcaacaagtggaggaagttaaatgcgtgatccgggtgcttccggtttggctctcggccgccttattctacctagcttacattcaacaaacaacctacacaatctttcagtctcttcaatccgatagacgccttggtccaggaagtttccagatcccggccggttcttataccgtcttcttaatgcttggaatgacgatattcatacctatctatgaccgcgtccttgtacctttccttagaaagtatacaggcagagacggcggtatcacacaactgcagagagttggagcaggactgtttctatgcatcacaagtatgatggtgtctgcaattgtagaacaatacagaagaaaggtagctctcacaaaaccgacgctagggttggccccaagaaaaggcgcaatctcttcgatgtccggtatgtggttgattcctcagctagtgctaatgggtatcgcggacgccctcgctggagttggacaaatggagttttactacaaacagtttccagagaacatgcgaagttttgctggttctctgtattattgtggaatcggattggcgagttacctcagcacctttttgttatcggcggtacacgataccacagagggattttcaggaggaagttggcttccggaagattaaacaagggaagattggagtatttctacttcttggttgctggtatgatgactctaaacttggcctatttcttgttggtctcacattggtaccgttacaaagatgttgtggccaaggacaaggacatggacaagacttctgctgagtttgataaggtgtcagtgtaataaagatctttcctttgactctttggtttaggggctttgagacaataaaaatacaacctttgaacaaaacattacatacaaaatacaatgtaaaatgtttatatatgtaaagaaccatagcttccgtaaaattcccatccctcaaagaacaagcccggaaaattcccaatttatgaaatggggaaaaaacggagcattgctctgtttttggtgataacgaataaatttaaacaggaacagtttgtccagtgagagcgtcatggagatgcaatgacccatctttcatcaagttaatgcttaagcttttgaacctctctcttgaatattgtctcgatgcctttctccagtcagttccagctttcatcatcgtcacaaactcatcatagtttatacgtccgtcctgtaaaaagcaaacaagcccaacaatccgactcagaagcagagggatatatcttttctcttgacaagctttattgttaggccttaaaggaggatttttttggatatttgaaagaaccttgtcagtgtcaacttcacgcatgatgtcgcttagaacactggcgtctggctcgcctaactcatccgctaaagcttcccgtagctcatcaagttcaatgtatgtacttccatctttgtcgaaaaacataaaagctagtttgaaaagttcatcattctctatcttctgcaagtgaattatcacagctacaaactctccataatccagaaacccatttccatcgacatccgcgtgcgcgtcaaagccatacagatttcagctatgtttatcagagaagaacactgaattggtctttaatcagataagggcaatgcttaaattaccacttccatcaacattttgatctctggttcaccaagttgtgaaccgaccttctgaagcccagctttgagttccgggtaagttattttaccatccttgtcatcatccatcagtgagaacatgttctttatcacttcaacctcttgaatagacaagtgctccgcaattacctggaagcattaacagggatgataatgatcaaaaccaaatatagacacacacaacagactctctacaaacttcagcagaaaagtaaaaggcaaaaaaaaaacacttacacgaagaactttctttttgaatctgttcatcatagagaactgcttcaacctagatctgactatatctcctaaaggaacattgggagctttctttgcattctgtatccatgggtgagctgaaaggtgagaaaaagaaaatcattagtaatagagtggattaaggtaactacgaccattaaagaaaacagaaacacaagaacttcacctaacacttgctgagcagttaaccgcttagtcggatcaggatccaacatctgcttcacaaggctcttggcactctctgatatctgaggccaagggtctctcttaaaatcaagaactccccgcaagatcgcaagagcaacaccttgttcagtctctgtcaatag

SEQ ID NO: 5870 - DNA, 1338 bp, Arabidopsis thaliana landsberg
gcactacatcacagaattttgtgcatgcttttccatagtcttgtcattcaaatgtttgaacttgttaagaattttattatgttgagttctcgcctgtgatggtttggtgttattatacaactttcggactgtatttgctaatgatataaagttgacagacatttgtaggaacaccattttggatggcaccagaagtgattcagaactccgaagggtataatgagaaggtatctcgtccatctgctgtagcttttgttgttcttctagtttacccaatcttctgtgtataccctggctttacttgttttctagccctttctaatcttgtcggtttctgcttctggtcttttccaggcagatatatggtctcttggaataacaatgatagagatggcaaaaggagaacctccccttgctgaccttcatcctatgagagtgctttttatcattccccgggaaagccctcctcaggtttcatattctaaatattgttttggcacgagaaaggcttgttagatagttggaatgcattgtttgagacgaacctaatactgccatatgtcttgattgcgaagccacctttcagagctagatatttaacttgtttatatcctccgcagttagatgagcatttttcacgtcctttgaagaatttgtttcgttctgcttgaaaaaggctccggctaaggtacttgtacttgtagtgcaatctctgatctttattgtcagcagtgacatgccaaaatctctcaaacaactcttccttatactttcagagaccaaatgccaaagaacttctcaaacatagatttataaagaatgctaggaaaagcccgaaactacttgaaagaataaggtgtgatctttgttctcccaacagtgttggtttgtggtttcagtttatttactccgcttatttgactgtgtgacattaactatgcgtttttttatttattgtttcctcagttgattcatttattccgatctgctttatgccaaacgaaaatacagaacaggatgattctaatactgttcttttcttttgtttgaagagagcggccaaaataccaagtaaaagaggacgaagagattccaacaaacggtccaaaagctccggctgaatcatctgggactgttagagtggctaaagatgagagaggccagggaacttctggaactaggttggataaatggttggataaatggcctattcttgggatttcttctctctttcttgtccgtcaaatcttaagactttgggctacagtttcaggtaaaactgtagaatgagggtgggatttagcatggggttcgaaggtgctgactgtcgacttaaac

SEQ ID NO: 5871 - DNA, 834 bp, Arabidopsis thaliana landsberg
  unsure (1)..(834): unsure at all n locations
ctgaagccctaaaaattcatatatcaaactcatgaaaaattgtttcatgtttcaattttttcatcattcgaacaaaccttgagagtaagaatttgcnnnnnnnnnnnnnnnnngcgttggaactaaactccttgtttgcttgtttcattttgttctctgcattgtcgggtgtggtcttggcaaaaacacagaccgccatatcgtgcaattctttcaccgaagcttcttttgaactgtcatcgaatttatgttttgtgtcagaataagtttgtaatcaacaataagatgataaaacatgtgttctttaaagctccatgtaccttcccaaaagttcaatcagcttggcaacaaaagcttcacaagaaccaggcttttcacgttccatcatcacaagggatctcgacactgtacgcacagtagattctttagaatcgtcaccaagagcctacacatgattaagacattcaaatcattccaactcatttttttcatatatgcaagtaaaaaagatgagaatgtagttatatagctggattacttcttttagggacggtatgagcaacactgacaatgatgcaggcaatgattcccatatggagtcatcttcttcatcactcacttgttctgaccttggaactactttttgtttactagacttatcgccggaatttctgcataaattgtagcttcgtgttagaaacaaccatgctacattctctgactatgagaagctagaatctagattcaccttgaatagtcagaatcatctgccatttgctcccttcttctgttaaccttcccatcattattggtatttcccattccaagtctttg

SEQ ID NO: 5872 - DNA, 1929 bp, Arabidopsis thaliana landsberg
aatgccataaaaatcctaaactttactttgacattttgaaaaatgaccaactttcgttgaccaagccgttttgaacatgggttgtagatatttaggttttgaaaatgcacccatagggtttggtatctctccctgttttaatgttccaatgatttatgaagttgtatctgaaacccaatttttcgctttgtatctgcttattagataacatgagggttttaaatctaactagctccctcgttaatttatactggttcaaagttttgtaattcttagtgagactctagctatgtagatacttgatactttgacaatgaaaacacaattttgttcatttagaactctttttaaaagcttattcatttagaatcatatctttagagagctcaattctttgacaagtctttctaaatcaacactagagcttcctcctacttcagttgcagctcgtgccttctatcccatctccttagcccgagcacgcgcctcgcctccactctcacccattgtgtcagcgataatccgacccatctcatacgggtcaggcacagtcttacccccttcacatacactaaccgccacacccatatgctccactaccaacctcgcatctacaaactggtctgcttccattggccatgccaagatcattgttccgctagccatcgcttccagcaccgagttccatccacaatggattaagaacccgccaaccgccacatgactcaacatagccacttgaggagcccaccctctcacaatcattcctcgacctgcgacccgatcctcaaacccatccggtatcgggtctttcttaaccacccatacgaatcgggtcatactcttctcgagaccaagagccagatcatcacactgctctttggttaacaccttttgacttccgaagcagatgtagagcactgaatcatctggacatccatctagccaactcaacaatgcctttgcgtctacattggatacggaatcttccttacttaacccgactgaagaaagcggaccaacaccgaaaacgcggttctcactcactttctgcttcacatactccatgtaatcctcttccagacactcacaagtattgaaaatacaaccataactcgaaaaattcatggtactgtctttaacactttcaagatcttgcgataatggagactgagggattaaagacgggagatgctctgttttgaaaacaggggagcgaggaagatccgataaacagacaggctcagttgattcaaagagatgaggcttgtcagagacaaaatggagaatcgaagctaagaatgctccagaactgaagaaagcaaagcgaggaataccaagatctttggtccatccaaggaagaaatcagaaatgagagcgaccggtggatttggatgagaacttaaccagttgacgataggctctcgaagctgacgaagagaagccatgatcaagggatttccgtaaccacctagatctttaacgttttcaaccccggaagggattaaaggatggtgagggaaaggtaaagtgacgacggaaacagcggatggatgagcggagagaagaggagagaggtaaggaaggtttttaggagtgacgatgatggagactgtgaggccacgaagacagagttgatgggttaagtcgagaagaggaagcaagtggccttgtgctggatatggaaacaccatgatgtgaggttttaaactgccacgtatagtttccggtcgcggctgcggcattgctctgttcatttctcggttgttgtttacgctcggtggtgatattatagaatgatgtgtgtgttaatgtacgatgatatgtgcattggcattttatatgtctagattttttgttgaccaaaaaaaaaacacgagtctaattttttttatctttttttgaagtgtgttatatacttaaattga

SEQ ID NO: 5873 - DNA, 2581 bp, Arabidopsis thaliana landsberg
gggtacttcttcagccttctctctaattaggctctcattgacctatggaaataatagtcaatgaaatattagaaagaaataaattcatatttgctcatatttgctcaaggaattataggaaatactaacctcagttgttccgagtacatggttgatttgctcaagggtaaaccctttcatctcggtcctcttgaaactcaccttgcacatccttggacaaccggcatgtgaaccctctttttcttctatgaatcttttcctaagtgatggaatggcctcaaatgctaaaaactacacaaaacacatgcaatttaattgttagcttcaattacgaaaatgtaacaaggataaaacaaaagtcttacctcaagcggcacacagaatccgggaacaggccatggtgcctgagtgttcgggacgacaccgttaaaatgatccaatgtgtgtgaggtcgatttggcaatgcactcaaatgaatatctcccccatggaaatgtcttacaaaacgtaagatcacttgcagccctcacacagaaatcatcaattggactagcccattctccggtcttagtaggcacgacaatgatgcttgttagaaaatagagggccgccatccgcaacctatcttttgatctagccggttccatctccattagcttggttttcacgtcttcacgtctaattaccccggttttgaagtacctgttggcgaagttcatattaccagcactctgataattagctggataggccttgcagttgaaaccagagatcaaagcatgctccctaataccatagcggatgggaactccattaacaacgaaccaaacctccttcttcttctcaatagatgccgttcgaagaaaaagcatccacatccgcattaatttgtgggtatatccggaaggcaggtggtagatgtgcttgaaactcggatgctccataaaataatttttttcatcattcgttagaggatgttccaagtcagcgaaggtcttcaacacctccgagatataacacctcgttgctaacttcatcttcttggtatactccgacgccgggaagtacataccaagtggctgcattgccatcgcttcctccatatcctgaaagaaacaaacattcattcatatatcactcaattgtaaatagtactgccacattattactctgtatttccaaaaagtattccccgtaattaccagtattacacagatactcctattcatatatcactcaattgtaaatagtactgccacattattactctgtatttcctaaaagtattccccgtaattaccagtattacacagatactcctattttactatatagtatttctcaaagttactagtactaactactgataaatcacaattgtagtactactctaaggtattacccacatccgccaatattgcctaaatatcaacatagcatttcccaatgttactagtactgtccacagttcacaattgcattattacccaattagatcggtattacgaaatggaatacttaccacatttgcgatgtcctcgtctatggtcctctcctccacgggtttttccactatcacgtcctcgtctctctcgtcctcgtgtccctcatcctccacggacttttccacattgacgtcctcgtcgctcgcggagctcctctcctcctcctcctcgataacggctaggccgtcatcttgtctctccgcctcttccacgggattagcacacgcgacttctttgtttgtctccgtctcctctgaatcggaatcggagcccaaggtttggctactactccctgattcttcttcttcacttccttcttctttttcattttcatcttccacctcatcagtttgcatattctcttgagtttcttcagccggaatatgcttcagagcatcataaaacgtagaatcatcaagcatcgggctctccgtcgttggagccgttgtcgttggagccgctgtcgttggagccgcattggttgccatcgccgtcgcaatcgtttgtgccgtcgcagtcgtcttcgccggcgcctgaaccttcgctttcttcgccggcgcctgaaccttctcttccttcgccggcgcctgaaccttcgctttcttcgccggcaccttctccttcactttctccgccggcgccttaactttctctgtcatcgtcggcgccggcgcttctatctcctttctttttccttgacctcctccacgcgtcttaggcggcatggctgatttcgaatcggaaatagaacggaaatactggtgaaagcaagaggaacgatcgattgaatttaaagaaatagggaatgttgcggttaatttcagcggttactaaggagaagaagtcaaaaaatcgaaaacgattgtaatgagaacaagaaacaatttcgaattgggaaatccctggaaatattagagttgtttttatttgattttcaaataaaaagtaaaagtggttcgggtggtttggttcagaaacgaaccatgatttttttggtaattaatagattcggatgatatactagtaatatccatctatttcggattaaaaaaaataaataaattatttctgttttt

SEQ ID NO: 5874 - DNA, 856 bp, Arabidopsis thaliana landsberg
taaagaggcgttgttaccttcaccagaagcctgtttctggaactgctctgctagcttcttcaggttgtccatgttgtctggtcctgaaagagatcagagtaacataaagttagagaccttagaatcgatgataaaaaaatttaagagctgttcagttacatggtacatacccagttggctgatgatctgaggaaggatatcttgcaattctgcaagacgcaacaggtgttacattaatcagtgaagatgcaatgaagaagaaacaagataatagagattaagagatattatgagatgcaatacttttggtctgaggagaaccgctaacaacccatgtgtttgcagcaattgaagcttgaactgtagtaacattcaaaggaggaacaatgatcagtaacatgaaaaaatggttctgatgtatagatcaaaatggttaaaaataacttacccttagggttgatgaactgaataacaacatcattcttaaagatgttaacttcttcaatagcgggaatggagttaactcccatttctcttaagagtgctttggagcctcttgtcatcagttgaattggtcttgtgcacagctttcttctttctgcaagtaaaaatcgaatggtttcatgacacaaatatagtaaatgttaagtactgaataatgatattagtgaggaagagctctataccttctgactgtaccctttccgccagtgcggacggtattagccatcttcatcaacttctccctattcatctgtgtataaaccataataagaagcatgatacatcaatccccaaatcccttccaagagattcaatgaacacattaactactaataatacattcacaaaaact

SEQ ID NO: 5875 - DNA, 3008 bp, Arabidopsis thaliana landsberg
cccatattatccgcggacaaaactggtcatatgcccaattggaccatttgttttatggtccggaatatagcccgtccatatgcatttggactgggcaagcccatggaccgtctgtccaattgacagctctaactatgtcaggtgtcagcactaaagattaaatagcaccaaatatctctttacattagaacttgattgatagtagctaaatagctaaggacatggtcttttgatcaacataaaaaaggtctaccatcacctgtgaatagtgatgatgtgttgtgttatgaggttgatcgattttattgtactattaaacttttcttattagggttttcatatgttacaaaagagcacattttttagttgtgcatggaacatttagaaaactttagaagcattggaccggccctatagtaatttcaagttaaagtgctcagtctaaagataactaattctaaaacagaaacagagttacaaattgaaaaacaacaaaaattcaagtgattgggatatcactaatgaacgagtctaaattctgagcggaagatccaccaggtgccatcgccgatcttgcggcgtgcttcagctccgtcgctctcctcctcatatccgcggcggcaggtccctctgtcacggcctcaatgcatctctccacctctgcaaccttaagctctccatcgatagcgtcgttcttcatccttactccgattccaaacacatccacaagcagtctcgcatcaagcggctgatctatccaagtcggatacgccaccacgggaacaccagtcaccaccgtctcgatcgtcgagttccatccacaatgcgtgatgaagcaagaaatcgccatgtggctcaatatcttttcttgttgaccccattcagttacaacccctttaccttctttaaccatctcctgcaaaacctggacgttttcgcctttctcttcggccgtatcacccaaagaaatggaactcctctgttttttaatgccgttgctatggtctcaacttgattctccaatgatttgagtatgcttccgaaagatatgtaaacaactgaagacctagcttgcttgtcaagccactccatacaataatcatcaactttccacatatctagggttttttcttcatcatttcccaacagaaatggagagtccagagggccaattggaattataggttttaaatcagccatcgattcgattatctctgattcgagttcatagaatgaattaaccaaaacccatttcacatacctcaaacaatctgcaaattccgccattagattatagaagtgagcaccaccagaaggtaacataaacgatggaagatctcgaacttccaacaatggtaaagctggtaactccaccgtttgattcagatcttcaagatcagggaaagagtttgtcttcatgtagtaacggtaataaaccgagtaagctccacaagcttggatccaaagtattgcacaagggatgttatgagaggctgcaacagctggaacccatggagtaaaaggcgaagagatgatacaagagtatctcttttcttcgatgattttagacaagttcttgcctccgactttattcaatgactttaaaagagtttcaggggctcttggatcgtctttagggagaccgtcggagaagaacacgaggtccaccggactacggggtttttctacggtggagaggagatcacgggctgactcaatagtggcgagattgatgtgtaggttctttgatgataacgagagatgttttgcgagtttgagcattggattgatgtgaccttggaatggtagtgttaccattaggacatgtgtttcttgaccctcactactgcccattattttttatttttttcactaatagtttagattttcatgaaactgtgagtcatatataatagcaatggtggtttgatgagagattttgcttaatgaagacataaaattagattatggtaagaaaatctgtctatagtaatggctaacccagtcaactgttagcaagtagattctttagtatccaccttttcaccaagtatgttcatctattggtcatcgggtcagttacaatttttatcttattattaactaaaaattgtttattagtgtgacacttgaccgttacaatgatcaactttggtatgtgtcaaaaatttcacaagattttcacatctgtttagtattgtttctttatttataaagtcatttttatagtaaaaaagtatgaaacatagaattaaatttgaaataaaatttggtcaacgataagatatccaaaataaataaggaataaaaagaaaagtgtttaagtggcatgtaccaaaccgaatgttaatttgctagaatgtataaatagctcaaacatatattccatttgttcctttttgtttgattgtttagaaaaatgcacatattaagaaaacatattaacgttgattttaaatgtattattttttgtattttacaatttcctataattttaaatcaatgatattcaatcatttttattaaagttaacaattcattgataataattaataaatattacatagaaaacttaaaatatcgatctttttgaaatatttttcttaaagaatcaaacaaaaaggaacatagggaataggtgaatctcgtgtttttttatgtaccatccaactcagatctcattttcggtaatttccaatctacaggtttattttcttttataaccaaaaccaatgaatgtgaaaatataaagaaaattttacaatgtacttaaaaagaaaagtcctccatacacatattcgtcgtcatacattaagttccactaaacgatttttaaggatggttttgagaaaaaaaatacacacacaaaggttgaaatatcaacaatctgatacttcgctcatgaacatttcaaagaaggctactttgaatggccatacacaacaacgtgagaaacaagaaaagtaaataaaaagattggtgggggtgcctgaaattttgtaacatca

SEQ ID NO: 5876 - DNA, 1548 bp, Arabidopsis thaliana landsberg
  unsure (1)..(1548): unsure at all n locations
gacaacccagggatgtcattaaccacctgattcttttgtgcctttctacaatagaattgaactcaatagctctctgttgcatttcaaggtgaaggcttcctttctgcttcacaatcatgtctttaattctcctgccattgagttttaaaacaccgtttattaccaaaagagagttggggacaggatctacaggtataatttatttctaatcctttttacagaaagtaaacgcgctacagtttcttgtagacagccaaaattcattattcatatactcagtgcgcatatgcatcttgtgaagagttgaaaatcgataagtgcagatatcaaatgaacatactctgagattgaaggaaagccagatgacagcttcagaagannnnnnnnnnnnnnnnnnnnnnnnnnnnnnnnnnagttatggccagcaatggcatcctcgatagcgtccactgcatcagattccgtaacctgctcaaggcagtcaaatactcattgcaaattttttaaagccaacaagaaatcccaagaagcaaaattatgactaacctgggcaagtatatgagtcatcaaatcactagcatcagcgtcaccctggcctaaaacacgcaagaaccnnnnnnnnnnnnnnnnnnnnnnagggtctgtgatccctgcaacatcgtactcaggctgatatgcacaattagtaatatccctcaaaaattttatcagtccctccgtgcatttctgcagagacaaaacaaagaaaagggtttgtcaaaactgcctgtctgataaaacaaaaataacaacctgatttctgcctcatttgagcagattgatctatcataccacagatatcaaactttattgcaagagaaatatagtacacaaaagcatcatacaggtaatttagtagcatatgtacgcatatttaattactcgatgctcctgtatgcataagtagagtgttctgtataaatttattgacttaccgttctgaagtactctagggcttcatcattaatcgtgcataattcataacaaagttgaactcctcttattagaaccccatgatgcttttctttaagcaaggaagcatcagcgtttacaaagttttctactaaatctggaactttccttactattctagtagagcaaagcgccgcctgcatatgatacaactttaatcgtaacagcaatgaagagacaaaacagcgactaggggaccctgtatatgaatatgaaaacacttcaccttctttcggatattagggtcacgaaactggactaatctttctacttctggcgcaagatcacgggccatttccgctgaacaaatattccctaaagcaaagagagcgagtcctacaacatactggttcgagtgattaagatctctgcacgtggcttaaggttaaacaggaataaatctagtacgatatggttcattaattcctagtacagcaatgcaaccaaaaatcaagtattctttagtatattagtattgctttgacatagaagaagaatccatgcaaaagccaaggtattaagaatttataaggatac

SEQ ID NO: 5877 - DNA, 3306 bp, Arabidopsis thaliana landsberg
atgataaacaaaagaaagacaaaagattccgatcacatcataattgagttggtgcatgcaatagcaaaagcagattccatttcaatcaaatagctaaagagcacactcgtccaaactctttatgagaaacgtttgattttaatattttccctctaacagcccaacaaacaagaatatatacttactattatgataccatacaacaatgttgttggtgtatatatcagtcagtgtatggatatctataaatcactccattatctctgatttgacatgtcaggttcacagtgacatacaacgtttcaaacttttcatcgttcatagaaaacaatttcctactataaaaattacgtgtcgaatttacgcaaaatttagatgatttgtagggagaaattcaaatctttatgattcaatattaacaaaccagccttgatttaacagaagtagtaaggagttaggggtcatgcttgtaaatctctaaaaccgatcatgggaccttttgacttattgaggataagtaaacataattgattttcaattaaattttgctaattcttcttattttcttataatctttctacgagatatatagaatagggtcaaattaaaagagccaacatttcacatcattatccctctaacatgcgggttatcttaagttatgaagtatgaaccctaagcctctactctactctagctatagtctcaatcaaaaattacttttttaattacaaaatctcctcaatcattttcagtaccattttaaatcacaaagaacaaatttatagaattttcagagaatctcaagccaatccttacttgtgcggtaggtgttatcaatagtgaaattacgtttaataaaacctagaccggtcaaaatgggacaaattaatagagtattagtgactcaacatcatggagtctcaagagattcgtagagagtaatcatttctcaataaggtaggacttaggaggcctattaaatcagagaaggaatcaaagtccgtaccaattaggctctaagtaaactctagttggctccttgattaagacccacctccccaaactaagtatatttacttttctaaatatgtcaacaaaacgatcaattagattcttttgttatgatgacacagtgtgctatgacacctaaaaactaaagtaatcaaggagataatcaaaacctataggcctgagcttcaactagttctccgattaagaatatttgtaatctattctaaaggctagaggaaagttaggtcaagctcaacaactaatgattctctatcaagaatttaataaggaatatgaggaaatggagagagaagacacataactcaaagaagaacattgaacagctaaacaaaacacacaattctctttaatacttgtagaacattgacaatgggaaacactagcaccaagcaacaatgtttcactcacagggttccacacttaaaaaccttcacatgcattgtagggttcttgaagtcgaccgaaactataatagcagtaaatgattaagaagcacggacaggactttaccttgacaatttgacgccatgggagaataacaccatacctgcagctgtaaataatgaggggctatggaagcagacaaagcatttatagacaaattgttgagagctgggaacattttatgcattgaataaataaagattaattaaaacagagtttggcgtttcataaggagaatcaaaatatttgcttttggctattatataatccattagacaagaagacaaaggttagattttcttcagaagtttgatggccaattcggatgaccaagttgtgattgctgataggtaccaacttgagacggaggagagggaacgacaccgactccaacattaccactgaggccaggtcccatgtggtgcggattcgccatcgtaccaggctgtgacgggtggaagagaccctggaactgcatgtgagatgattgcgcagttgggttgaacgattggtgtgctgtatgggatgataaataagcaccatgaggcgattgtccagctacgttgtaatatggagactgaaggcttgaaagatctcttggattttgcatccatatctcagaagtctcagcctgtagtgttagataaggaaacatgaatcagaataaaaaataattggtaaaaacataaagttcgggcacaactaccatacttatcaattatcattacctgaggatttggaacgtaaatatttccatgtttatttatcatgcgagatggatcttcaagtcccgtagcgtttccaactacattgggaggattagttggatacccattaggattgttgtaagtcccaaaacccgcaggtccaccagttggaactggtttatattgctgatggattccatacttgacaccatttgaaccgagatgagaaccgcctccaggcatcagcacatagctattgccatttgaagggtgtgcatatgctgctgggttacctgagtagcctggcatgggcatttggggaacatagactggggaaaggaattgacgataaggcatgagattgggaaaatgcgaaacatggacctgcggatacatctgttgcattgatgcctgctgttgttgctgtaacatgggaatagtggatggtggggcattatttaacatgtgagcacttaatccctgctgcattatcaaaaggatacttgatcagtttttcctagttaataaaacaaaaaagataactatgacacatgcacaaaccaactgctcaaacaggagctaactagactcttacgcatcaactcatgctggcaaactagtaacaactaacaacagaaacataaattacctcgtgtggagatggtaatccttgaactcgtacagtttcatccattgcaggactaaagtacggaaattcataactaccatgattgtcataagcctgctggaaaggaagagcatgtcatttttgaatgaatttatctttccttgatttttaagagttaaaattgcaagaacccttacagaaaatttttgcaactccggaggatcttgctgctgttcaaactccaaaggagtataaggtggaccattcctattgagtaattcaatccccgagtacgcatccaaattgtcagatctatgagtttctttctgttcgggtaactgtggctcagatactgctgagacgggtgagtcagatctagaaactctgacatgatcatcaatagtgataggcagaacgcccggaccatctgctgaagcctcaggacaagtaactggcgaactgtcaacaatatcaccaagttaattgggggag

SEQ ID NO: 5878 - DNA, 1694 bp, Arabidopsis thaliana landsberg
tgggggaaaccacacacctagggttatggtgggaacaatacaagagagggtattctacagccaatacttgtgacttgatgatagattcacttaagtggagcagctattagacaaagatcatcaacagaagacttttattaacaacagaagacttttcggtttcattttttagttataacttgattacttgaacaaatgctaaacaaagactttcttctcaattttattgcttcttgttagatttaattagatagatcgatattcagcaattcatttctgatttgataatttatggaataccataatgcccctgcatctctacaactccaatgttgcaacagccacaggcgccgatggcacagatttattcacaggttcatgtttcacattttcccaatggtatgccatatcgtcagttcctctctccagtctatgtcccccgaatccccatgcagtatatgctcaccctttaaatggcaatagctatgtgctgatgcctggaggcagttctcatcccagcgcaaatggactcaaatatggaatccagccattcaagcaagtctctacagggggcccaacgggttttgtggactttcaacaaccccaatgggtatatgtcatcccaatggacaggcaaccaagagatctttcaggccttcagtcttctcctcattacaacatggctggacaaacacctcacggtgctttaactctgctccagtccaatcgtctcatatgcagtttcaaggcgtcttccattcgccagagcctggtccaatggcgaatgcacaccataaggggcttggacttggtagtaacgctgggcttggggttgctccatctccttctccagttcaagtccgtgcctccttattcatcttaactggcgagcaaacttctcaacaaagtctaacttgttgagtgagagcccaaagaaaatatattgtttttcttgtgaaacggccgaactctccttatttctttattcaatgcataaatctctcagttctcccagttttctttgaatcgcttttgtatactctaaccttctaccggctattacacaactagtttaattctcttaaacaaggtaacgcgtattgccataatctagttttggtttaagtcataatcattgtgaaaagcagaaagagaaccttataaagcatgtgcttggtcgttttagtgttgtgcttcttttagaataccctgttctttttctcttttcgccatgagagggttttggggatttggggtgtgagagttactgttgtttttaagtgatgtttcatagaaaagattgtgttgtcattgttcttctttgagttctgtgtcattcttttgtgtgcttttcttcttttcttgggatccccaaaacatttctttcatactctcccggattttcataaagaaacattggttcttgagcttgacccaactttcttctgcgctaagaatatgaaccactttttaacttaacaacgtttgaaaatgagtccataagtttggttattttcttgattactaaggtttcttttgtatattatttgcacactaaatgattatgacaacatgccaacaagaatctaattgatggtgttgttgacattaatggaaaattaagagttagtttaagaaaatggtatagaatcataatcaagtccctatttgttatctctcttttaccggtttgg

SEQ ID NO: 5879 - DNA, 3308 bp, Arabidopsis thaliana landsberg
ttctttcgagtgaaatgttcatatgatggtgtaaaagcccaagcagcgatgcagttgcagatgtctgatgttctcttaactggagatggatctgaccacacaaatatgctggctttgggaaaaacagcttcacatctgcttacacaacttgaggtatatatatatatattctgatgtttccacttgcgtgtgttggtgtgtgtgctgaaactttctttggttcttcagaagagaaacatttcacgtaaaacctcgctcggggataatcaaagttccatggatgtcaatcttgcttgcaatcatagcgacagagaaactctgacttcaaattctatcgaaattcaaagtacattgattccaggtaagcactgttaattacattgagtgattcttcttttcttcttccgtatatttttgtatccggagttctgcatttcatggtttaatgtgtttcagttattggacctataaacatgaagaaaggcgggcctcgtggaactctacatgagttttgcaagaagcatctgtggccaatgcctactttcgatacctcggaagagaaatccaggtgacttctcattttggttcctgttttctctgctctcatgtatcctgagtcctgaccaacctgagactgataactttcttttgtctgcacagaactccgtttgaattcgtagatggcggtgagaagcggactagcttcagcagtttcacatcgaccataaccctaagaatacccaatcgtgaggctgtgatgtatgctggagaagcaaggcctgacaagaagagttccttcgactctgcagtcgtggaattgctttatgagctcgagcgccgcaagatcgtcataatacaaaagtagaataatttagactgtactatatatgattcacatttagtgatctcaagcagatcttgcaaatgcaagaactcccaaataataacaagcttacccatttggatagttttgtatctgaatctctaatttatatgttaattgttatgccttgatgataagctcatagacattactacagttgaagctactaacacgttttagcatctccaaacctttctcggatccgagaaactgaatacgtttgaatacattcttcccgcctttcatcaccgagaccgctgctcggagcttttcactgtgcctcgagttggtgtgaattgctgctttgagttcttcctctgacatgttttcctgcgacagtacatacaacacacaaaactactttgaaaatggtttcctcaacgagatactggcacatatgaggacattgctacctgatagaatgcatagatgttttggagaatctgctgacatgtaaaaccggtttcactgaaatacgacctggaagaaggtcccatctcaccataccaatcgattggaagaagtaatgttataaaatggtttttgtataccaattccattctctcactatcatgccataataacaataaacaacatgagctttataaacttaaaagagtagcttggatctcaagttacagagatgaagtagaacataggaacctttctgtgagcagtctcatggagtgagtgaatgaatcattagatttagcatcaaagaaggcagataaagattttctttcgatatcgtcgttgttgctgaaactatctatgataacactagctgttgaagttggttcagatattgtccaagagatagaatctagaaggctgctcagatttaacggctggatcagagtcttccccatctgttttatgaacaaagaaaatatagttcggtttagcgattgctcggttttcgaagatgaaacatagaaaaagatgaattgcctttgcgtggcgatttgtgacagtctctttggcggattccacaatcttctgcctttctttgagtggtctcgtcctatttgttaacatagatgcatcttcaagaacacattccctgcgagattcctgtaggagcacaagattaaaggactaaagacttcatgaatacttatctacagacaaaagataccttcccaagattctcaagcattgtcctaagatctctggccaaatcagctgacatttgaactagattttgcgttggtttctcttccaatgttttctgaatccagagtggctgaaacagacgacatattacacatgcaaccaactgataatttgcggtatttgtaacaatagaagagttctcattagcttactgtaacaagattgctcgagtgaccaagatatctcaaaacagaaccagcttcacatacaacatgacttgcattacatccaatgaaccattgattaataaccttggcacctccttcaacagccacctgtaaaacctacaagacttggaatgtagctgttgatccacgggcgttgctacatacgtttaaaactgataaggtgtttaggactaacccggcgtctcacttcttctgaaatatcaggatcgataaaaactgaatagcctgacaaggccaaggccttgcttcctgtgaactctattccttgaactccttctctatgtagtttttctaccgcgtaaaccgactttaatccatcttcattcaccttagtctctccgggatttttgaccgcgtagaaagactcactcaacttaactacaacacaatcacaactagtatgataaatttcatgagaaataataaacaaagaatttgcaaactcgtagtgcaaatagtaaagcggataatttggcacgaaaaattcgtaccgaaccgcatcatatcacgtttgaaaacaacattccccaagaatggctcctttgagcgttaataatttcaaatgacaaaaaaaaaatgtgcaaactcggttaaagacatacacaccatttctacagacactgtccacaaaccacccaagtgtaacgatatacaaagtctctcttcttccatgtttcaatgcatgctcaaacttccgtccatcataattgtatactccttcttgtgttaagaaactaacacaaaactacataaatattcatgtttataatttcaaaagattactctaaaattctatagtaacataaggatatctgaacaaccaaatgtgtacatagagaatgcaaaagtgaactgtattcaccaccaagtctctcggtagcttccttgacctgtttccttgcctctacatacaacaattgatactcaattcataaaactagctcagagttctttacaaatacgctgattgattttggctattaacaaaaagttgaattatcgaggtattaatttatcgagtattaatttataaatgttttgctggtacctttagagagacc

SEQ ID NO: 5880 - DNA, 3089 bp, Arabidopsis thaliana landsberg
ttcttgttcagaaacttcaacgccattctttcttcctagagtttctgctttcctcctcttcgttcaaaaactcgtcaagggtttttataataagaaattttccccgtcttataatctcagcgccgccttaatggacatctgggcttgctaatggccattaacgggcctgttttggatatctcccggtagagtcccggtttacattggtttaacccagtgaagtggtcgatgaaattggttcaacatccaacagttgaaaaggagtcttctttgttctctcttactaaaagatacggtaatacaatgctcagacaaaagctaatggatcattgaatatactcaggtattacaagacaactgatagtatttacaaattctttttttatttgaggtatgtaagaagatatagattatgccaaaccgaagagcttcagtgttgctgcactagcgagtatgccatgtatggctagctgtttttactgtgtggtacagtaaccttctggggaaaaaacccatcaaacagaagttgtgcactcttgctgatatgcattcttctggtgttgaataagctgacttctaagatagcattcttccatctgcagaatagaagaaaaaacactttaggatttcagaaactgaaaagaaacaaatggttatgtcccccaaacagtacaagttttaatacctgtgatgaatgtgtcttaagcagtgcaactctgcaatcttctactgatgctttctctatgctgcttactctagctaattccgacatcaaagtctccatctcttgtgtctgcaaaaggaaccattgaagttgtttcagtttcaacatttgcgtgtgtaggaactttgtttttgttcatgtttaatgtgaagcacattgactgtattttactaaccttaggcacaagatttccaatgttttgcacaatgccttccatagattttgaagcgacaacaagtgcttcagctagctctttagtctcaacctggttttgagaagcaaaatccaaatgttttagtacaaaaggtaaaaaggaatagaatttttcctagttgatttcgaccaacacaacatataccttgatttttgaatcgagaggcaaccgcaatgaagcattcaacaaagcttcaattgtttccgatagtgaagttgagaattcatcttcaagaacagcccattgctccaaagaaggagtctgcatagagttaaaagtagtttaacaccaattattacaaggaaactacacaattgctctaaacgttcataaatgtaaaaatagtgtgaaatctacgatatttaagatctttacttacttgtgactctacaatctccgtaacagctttaactctccgtaaatgttggagttctatgcgtttcctctctacagaatcagacaactccgacattttcaaaccaagtgaataaaacattctctgcaagaaaaaaaaattacagcatccataagatcaccatcatcaaaaagaatctgacctaaacaacattcatcactaatactgaagttaatgtgtcaaacattgatctatatgtaaaagctatcaaatttctgattctcagagctatagaaactgacctcagcttgtgctttctgagattgtgttttgatctcagcatttgcatttgcaaatcgccattgcaagtaacggttatggagcagtttcagagaatgcacatccgcttgttgtcctaaagctttcttctgcttctttgtatcggcttgaatcttcgaattaggagccaccggaggcaatgacaaaccaacaccatttttaagcgacaatgaagctctaacatctcgaaacatcgacgcatcatcggaactcagggatcgagaaagtggtgaggcggtgggagtgttaaaggcctttgcttgggttctaattgttggcaacagatctgggccgttggatttgaaaatctctctattgttgttatcttcttcaccgtctgtagaagatgataacgagatcccgcttgatcggagaagcctagtcgcagcggaggcagtgagtaaacgctgttggttcagccgcgatctagacggtggcggcaacatagccgtcgttggtgtgtcgagacggtgaccgttctctttcaacggcttagatcgaatctgctgcttagggtttttacctccgtcgacttgttgaagaggaaaaggcgagtctaagctacgcgccgtctcggaaggacgattctcgtctccctctggcattttcaattgccgtctcatcctctgagccgaagtcgatctctgattctgatgttggtgatgatgtctaggagaatttgaagtcaattgatggagatctccggcggaagaagaggaagacgacgatgaagaagaagaaatgggagacatgaatctcgagctcacttctcttactctcggccgcctcgtagaaggaggaggaaccggcgccggagcattaatcgcaggtgtagatgggtgttccatggatcggccgattctcgcctccatttcaatcaaatttcttcgaaattgacaaaatcaccggagattccagatgccggagatttttttgttccgataagaaaacagaaattattcaaatcggattgaaatttttgaaaccctaggcgaagaggaagagaaaaggggaagaagaagaaggaaactagccgttgagtaaatgcttcacaaagcgcaacggttctcttcttgtccgtgaaacgatagattttttttttgtcttgctttctcgattaaattaatcagataagataagcaagattaatgttttgaaaaaaaagataagcaggattaatgttggtgagcctattaatattgggcccaataaggagcgtttgtgttctttaaagtaatgggttataaatgtataaatgaaagttttgttggatcattttgcaattgttttaaccttccgacattttcctggatagactgaagaaaagagttgggagtgaaaaaggtgaaaagaggagactttgacttcttctgatgaactttcttctgcacttattctcattaagcctccttgttaaaataagttgagatggcgataggaaacccagaagtagcaac

SEQ ID NO: 5881 - DNA, 1428 bp, Arabidopsis thaliana landsberg
gaatggcgttaagtttctgaacaagaagagatggcatacgggaagtattcgcaacgttgagaaagtatggaaagctgaacagaagcacgaagccgagcagaaaaagattgaggagcttcgtctccaaatccagcaagagaaggagcgttctgaatttcgcgctatccaagaacaggccggtcttgttccgtaagttttctaattcgcgcaaattccactccgaccctttgcttctcatcaggcagcatgagcaggaagctcgcaaatctgtaagttcctttcattcttctctttacttcactcatgtgtcctgctcgtgtttcttctgtgaacggttacggttttagattgtattggacttcgtttctgctgctgacctgttgtggattgtgtttcttctttaacagttgaaaagaaaagcgagaggatagagatggagtgttgaacgaggacaagatacaacatcggcgtagattgtttaaatacatcgcaagttatcttcttcagtttttttttttttttttggtaggattaggaatcttcttccggtgttgaatggatagaaaacacagtttttttttttttgaatacaaacacaatctttaattgctctctacttcataaagttgggatgatttttaggtggtatacaagcattactctctggtgaaacacacaagctttttggtttgaaataataattgaatttgtcaattgtctataacgtctcgaaaatcaataaatctttgccattgtttgatccagaattagaagaaacgaatgtctttgacttttgagtatttgggagtttcacagacaaatttcaacaagccgtcagaatttcattggacttaaagccaatctaaaccggatccaattagcttagaattgcggtttagcacaatcattgacaacaagcccatgaggcccaaatataacatctaaatcacacgttttaaacacggacggctctgattccatctcattatttcgcttatacgacggcgacggagcaaaataatttagaaccctcgaggagttttcgattgaacgaaacaaaaaagaaggtaaccagattttgaagcgagaggaggagaaacaaaaagaagagcaatcatggggatgaaatttctgaacaagaagggttggcatacggggagtctccgtaacatcgagactgtatggaaggctgagcagaaacaagaggctgagcagaaaaagcttgaagagcttcgtctccagatcttgcaggagagggagcgttctgagtttcgtgctctccaggaacaagccggtctcatcccgtaagttcctctgttttccttacccacgatcccaattgatttgggtgataacgaatttgggaattagggttagcggtttgagtttttagcgtagaatctataatatgcatctgatggtagttgg

SEQ ID NO: 5882 - DNA, 1638 bp, Arabidopsis thaliana landsberg
agatctatttgtagtatatgatagcttcccacttttaaaactttataatctttgataaatattgatatatgatcattgataaaggtacatttgattccttaaacaggggtttaaaaacaagaaacacatgcttcaactaattccaaacccataatttctcctttctcaaaatactttgttcttataatccttttactcatatcccaaaaactcgatttaagacacgacgataacactaaaataccaatacacaatcaaaatattccaattaatattttgattatattaaaaaggtatgttcaatagaatcattgtttgggaaaggcgtatccaaatacgtgtataagtatgcaaatgacgtgaaactttttttttgacccactagaaaaagttacatgactatacaatgttgaatatatagatattctcctctacaatatgcttttgtcatgcacttttgtcccttggtccattgaagaaccaattttaaatccatctttctcaattgccattatctcaacttttattttgtgcactattcatatcaatatttcaattttgtgactagtatcaaaacaagtaaaaagtagttacataacaatattaatatatcatctttatttggttccaaatatgcaaatttgtagctttcacgaccaataccaaaggtagacaggaagaacatgcttcaccatttcatcgtgagaagcccgaaagagacactggttcaatacggtttacaagtttggttaagaatcggtatggacggttttaacacagaagaagccaatttagaacattgaccaaaaaatatagaacaatgacaccaacagaaccacattaacacatacaaaacgaatcaaacaacatttgatttcgaagaacagcttaagtctcctcaaggagctctctgctcctttttcttcaccgccaagcttcagtacgctctaccctcgatcctacacggctcaagttggtcaacccctttgttctgcccactggccactgagctggaggatctagattcagcaccacctgttgactcgagtcgctcaatcttcctgttctgtattttccaaagtctgtttctctctgttcacatgcattgttctctagggttaattcgtctgatatctcactgcttgaactctgattttcagcattttcgatgttgtctgattgcgtctcttcactctgctcaatggtgttaaaagccaaagattgtgaagggctttggtgaccactctcatcagacggttctaaagggaatgcatgagcttgctcgaccactgagtcttgcctttctcttaaagttttttcgattagtgtcttgagaaagttcatcacttgaaccgcatacatcagtgctgtcagtggatcatccatctacaatacaagtgtttctcaatcattttatcccatctgaccccgagttaaacattgataatcaaccttgttgttgcagactcacctgtgtcatatttggtgcgaaaaccatagcgatgttgcgtgaattcatcttgtttagatgttcatactgaacaacatctgccattagattgatggcccaatcaagcagagcagcttctgtaggtggaagaagcctaacgagctcaacattttcctcttctgtttggc

SEQ ID NO: 5883 - DNA, 3411 bp, Arabidopsis thaliana landsberg
  unsure (1)..(3411): unsure at all n locations
gcttccatactcagaaaccccaaaacgcttatttctcaaaaatctccactctctctcttctgtctcttcaatcacttggggttgtgtcactgaatctgcatcaatggcgattccagattcctcactcttttctgcttttgactttagctctagcttcttcttcacgaaatgccgttgttgttaaaaagtgatttctccactatcccatttcctttggcatttattctccactctctctcacttgtcttcttcttcttctacgatcagctcaccaatgtcctgaaccattctcctctgaatcaacctctaaggtctctctcactttcgatctctgttttccctcttgttttggggtttattagcttcgttgtttattcctttaaaagatttcttctttctcaatttcaattactccgtttagcttagctggagaaaccctagtttgtagattgcagatctgggttaatcaagtatctgtgcacacatttatgtctaaaattagttactttcgtaattggatttgttttttttgtgaagatttattatttgaagtcaaacagatttcagctgattgaatcaatgtgtgcatatagcttccataatttcatattttgatttgagaatcgagtaatgttgctttggactttatcatcagcattcccactttggtttgagaaattacgctattgtatctttgtcattattaaggaagcttttcgttgtgttgatgatctttttactcatgatacctgtgatgtgtaggtgtcattcttggctactttatccatagatacatttctcatattgagtttagcttttatgtggctataaatcattacatgatgtgttttgtgttctcttgcagttgctgttgaatgagaaagctttgatgtgagcgagcctgagagtgtaacaaaggactgatgatgaagattattgcggcgtttctcttcctcttggtcacgacttttgtttcccgttgtttgtctgcagacatagaatcggacaagcaagcactgcttgagtttgcatctcttgttcctcacagtcgcaaactcaactggaactccactattccaatctgtgcctcttggactggtatcacctgctccaagaacaacgcccgtgtaaccgcactccgtttgcctggatctggactttatggacctttaccagagaaaacatttgagaagcttgatgccctcaagatcattagccttagatccaaccaccttcaagggaacattccatctgtcattctttcacttccttttatccgatcactatactttcatgaaaacaacttttctggtactatccctcccgtcctttctcatcgcctcgttaatcttgatctctccgccaactcgctctcgggaaacattcccacgagtctacaaaaccttacccagctcactgatctcagcctgcaaaacaattctcttagtggtccaattcctaacctccctcctcgccttaaatacttgaatttgagcttcaataannnnnnnnnnnnnnnnnnnnnnnnnnnnnnnnccttcccagcatcctcatttcaaggtaatagccttctatgcggtgctcctctgactccatgcccagaaaacaccactgcaccatctccttcaccgacaacaccaacagaaggtcctggtacaaccaatataggtcgtggtaccgccaaaaaagttctctccactggtgctattgtgggcattgcagttggaggttcggttctgttgtttatcattcttgccatcataaccctttgctgtgccaagaaaagagatggcgggcaagatagcaccgcagtgccaaaagctaaacccgggaggagtgacaacaaggctgaggagtttgggagtggggtgcaagaggcggagaagaacaagctggtcttctttgaaggaagttcatataactttgatcttgaggacttgctcagagcctcggctgaagttttagggaaaggaagctatggcacaacgtataaggccatcttagaggaaggaactacggtggtggtgaagagactgaaagaagtagcagctgggaaacgggagttcgagcagcagatggaagccgtgggaaggatcagtccacacgtgaatgtagctcctctccgtgcctattacttttcaaaagacgagaagctactcgtgtatgattactaccaagggggcaatttctccatgctgcttcatggtaatatgatgttttacatgttactcaaggttataaaaagtggctttaaagtaacactttagatgaattctatgcaggaaacaatgagggaggaagagcagcgttggactgggaaacaaggttaaggatctgtttggaagctgcgaggggaatttctcacatccattctgcatctggtgctaaactcctccatggaaacatcaaatcaccaaatgtcctcttaacccaagaacttcatgtctgtgtctctgatttcggtatagctccattgatgagccatcacaccttgatcccatcaagaagcttaggttacagagcacccgaggccatagaaacacggaaacatacccagaagtccgacgtatacagctttggtgtactgttgctagaaatgctgactgggaaagcagcagggaagactactgggcatgaagaagtggtggatctgccaaagtgggtgcaatcagtggtgagagaggagtggactggagaagtgtttgacgtagagctgatcaagcagcaacacaacgtagaggaagaaatggtgcagatgttgcagatagcaatggcatgtgtgtctaagcatccagattctaggccttcaatggaggaagtggttaacatgatggaggagattcgaccttcagggtccggtcctggttctggtaacagagcctcctcgccggagatgatcagaagctctgatagcccggtttagattggttttaaattctctttctctcattctcaaatcattatttatttttgcttttccttcttcttcttcttcttcataaaccgtttattttagttctctatgtctgactgcataatttattccaatcaatatctggaattgtagtgtaattgaaaccctcaccatgaatggttgtagttcttagattggttataagtgtgcgactagttttgaattttcatttgttgttgtatgattcgtttaaattaaatcacaagagtctttgggtgtttgaaaatctaactgaaatagtgatacaattatatgtgaaatttatcgtctcaaaaagataaactacatgagtaaataaataaaaataaaatcattgctctgtattttttgactgcatgagtcctaattggtcccatcacacaacttttggcacgagaattactaaaaatataaaaaaggtgaaataggtgagacggtacttgctgatacaatcggaa

SEQ ID NO: 5884 - DNA, 3113 bp, Arabidopsis thaliana landsberg
  unsure (1)..(3113): unsure at all n locations
actaactactatttaccagcaaacatgatcgacttgagtgaatttcataatgtccactcacatgaattggtagaaagaacaaacaaacaatcatgagaaacaacaacagtcaacagttagttagaagaatcaggacagcctctaattacagaacaagctaaggttagaaatagaaaggagaagactcacttgaaatacttatcaaaggtcaaacgatctttgccaagtcctgcaatgtcgaaaccataatcccctggaagttctcctgtaaggtatggaggataatcatatgggattggaccaaaccaacggggacgttcttttccataccacttgctgcacacttacaggaacaaaccaaggaaatgtttgatccatatagttacagtaacatagaacttttgtatgtatctatcaaataatcgttgccgcagaaaactgaatttatctaccattttatcaaacattgccttcacaaaaaaacactgataaactcaatcttacctgtcgtttctagcttcctgagctttagacttgaatcttgaagaattctctacggcttccttctttttctcttctaatctccgccgtagagaaactcctattgagctatttgcaattgctttaaccgcagtgaatggaatcgccgagaaaaccaacactccggcgagctaaaaacaacagcaaagtttcaaaaagaacgaggagaaaacaaaatgatgatttctagtaagaagataaattcaacaaaaacctcttgccacgaagctctgcaaatcgaacgggactttgtcacggcaattctattacgaggcttggacacgagaatcctcggaagagaatgaattgacgaataacttgaggaaagtgatgaaagcttctcctgaaacagtgccatggaatttggctcaccgtcaaatcttgatttggctgtctgtttcactcgagaagaagaaagcagaggtgaagttagaagagcaagaagcggtctctaattttccacaaaaattaaaaataaccaaattttcaaagttatggatctggccacgtgtaatgatattcgccagttctttaaaaagcccggactcggcggatccagattataggcccaattaagtaacaggccacatcgttagatccataaacaatcaaaacaaccgttttgttccaaagcaaaagatccaaaatgcagagtttcattccaaatcaatcggtgtaagtgaacacgatgaacaacggtttcaatggacgattgagatttattaatcagaatcagtctctgttctaagtcctctgttttgagattagctacaatcattaaaaacacgaaaactcaaattttagtcttcgtagattcgacactcgtcggtctctggattctcctggcagaaactctcgagcggatcctgattcagtaacttcagcttgatcctcagatctgctctggcttgactcacttcttcaacttcgtcccacgcaactctacactcctccgacatctcttccgcctcgcaaacctctgtcgcttccttcactttctcctctatcatctccgatagtttctcctccctcatcttcgtccccatatactttgccgtcgccttcgtcaccatcatcaggctgaattgtctcggtactgtttctctgaaacgtaaaatatttgatccagttgagacgggccgtcgctccctttgtgacggaagcaacactctcccatgactcgccgtcgccgagcccgagatcatttctacgaatttcgtttctcttcttcgtctttcagaaaattctttattcaccttttattattaatggtttgggccgtttgactatagttatcgtaattacaaataagccctccaatcatcaatgttcgattgtcatttcacgtttttttttttaatgcggcattatccaaactacactcatcaaacatttgactttagaaaaaaatattattttcttctcataaggtagttgagataagcacaatgcaaagctgaccccttttacctactccttttgttgttctaggtgttcaccaactttgatgtcctttgtatcatcataatcttatgcttttattatatactcctactctcatcgtaatatcaaagcttattgtttttgaggtcttatcacactaggcctatattatgaaaataacaattaccattaatatacctaatcccatcgatactgactgatgaaattcagttggtagatctttaaataatgacaggcctttcctacggtcaacagagtaaataagaagccttattaaaagcccaaatcaggtcaaataataaacaaatccatttttttaaagatccatgtgcataataaatatttattttcgatgggtagtttatcaattatcaggcaataataatacttggggaagagggaatgagagagtcgtatcttttactatatgtttgcctttattcctttgtaattaccatgtaaaagcatatctccctattgaatgctatattccccaatatttccatcttctttttttttctctcgctatttccgtatttacccttcacctatcctttggtgctcattcactctcccttttagcatatcatcatatcctattttttgcttttattttttcttagtttgaaagtttggtcgcacttaggtggggaatttgtcaactcaaactaaaccaaaacctaaccgcatttataaactaaacttaaaaccaaacgtacactcatacagttcgataaatttgcagtctaaaaccttttaaaacccataaaatatgaacaccaaaccgaattagacaatttggtcactaaccaaacattaccaaaccgaaaaaggtaagggtatatatttatatccaatggcattttcgtaaataaccagaataacaagggctgatcgagaaaaagcgtggactgaaagaaaaaaaagaagaagaccaaattttggctgtnnnnnnnnnnnnnnnnnnnaagtcccccgcatactatataaatacttttgacgggccaaaagaaaaaactttctctgaatcttctctgagtctctctgacactctcaccaacctaatttctcacaaaaacctaanaagttatcgcccatggattcagatt

SEQ ID NO: 5885 - DNA, 1117 bp, Arabidopsis thaliana landsberg
  unsure (1)..(1117): unsure at all n locations
tctgagtcgtgtgatactgttcttattgagtcaccgatggtttttccttaaaactaaaatgtactattgcaagtaaaaaccaatcaaaaaaaattcattcaaacttgcattataaccaagtaaacgtgatcaatagaaacttgcaaaagcacaaccaaaatatttgtccaaacaatatgtagtcaaaacagtctgttgtgttcataaaaaagtcatataacgatatatttagtctaaatctggaaaaaagaaacgagacaccaaaaagaaagaaacggaggtgtttggttggtagtatattcctcctcctcctctttcttcttctccctcctcactatatattttgaagtttattaacaagaaccaaaaaaagtcacactcgaagtctcacaccacaccaaccacttcttcttcttcttcttctacataaaacctaacgccatggattcagatttcggaatccccagagaactctcccctcttcagcaacttcgatctcagtacaaacctgagcttcctccttgtctccaggtcccttcttctacttcatagatctacttccttccattgttcctatcattggatttatttgagtacttagtttcttattcaatattatcattcttggatttctgcaactattccaagtttttgtttatcttaattcgatgaactttgctccttaagcagatctgatttcgagattgtattgttctcggatctgttttatttcgattcctaagtttcattggcagtctcttcagctttaatcagttgaactttgtcattttcttattctggttgaaattcgtttcaggggactactgtccgcgtggagcttggtgatggaaccactgtggctgaagctgctgattcacataccatggctcgtgctttcccgcataccttaggccagcctttgnnnnnnnnnnnnnnnnnnnnnnnnnnnnnnnntgatgcgcacatcattaccgagcttccttcagttaggtgtgtgaatctgtttgctctctatctatatgtttctggattggcgtttgtgttcgatttaccttctattcagcttaagttagttcaatttctaaagtagagttggaattgtgttttgtgaaggcaa

SEQ ID NO: 5886 - DNA, 2522 bp, Arabidopsis thaliana landsberg
ttggggcacccttcacggagtcagagctcatggaacatacacccatggaactttacttttttctttctttaaatatatcaaactgtgtcactgggactctaacgggaaagaactacattctctggaaatctcagttcgagtctttccttgatgggcagggacttctgggttttgtcaccggctccatcccagctccaaaccaaaccaatgtggtctcagatattgatgggtcaacctctgcttcaccaaatccggagtactatacctggttcaagacagaccgagtcgtcaaatcttggcttcttggatccttttccgaggatatcctcagtgtggttgtcagctgcaacacttcacatgaggtatggatctctatagcgaaccattttaatagagtctcctcttctaggctgtttgaactgcaaagacgcttacagaatgttagtaaaagggataagaccatggatgcatatctcaaagatctcaagaacatttgtgaccaactagcatctgtaggtagtccagtgacagaaaagatgaaaatttttgctgcattgaatgggttaggtcgtgagtatgagccaatcaaaaccaccattgagaactctatggatactcaacctggtccaagtctagaagatgtcattcctaagctgactggttatgatgataggctccaaggatatcttgaggaaacaaccatttctcctcatgttgctttcaacatcaccacatctgatgatagctatcgcaactcctacaaccgtggtaagggtaagcctaatagaggcagaagctccttcagcactcgtggtagagggttccatcagcagatatcctccacaaccagttcttcaagctcacagcctggtggttcttctgttatctgtcaaatctgtggcaaaatgggtcatcctgcactcaagtgttggcatcgattcaacaacagctatcaatatgaagacctccctcttgctctggctgcaatgcgaattacagatgtcacagaccaacacgggaatgaatggcttccggactcagcagcaactgctcatgtcaccaacagtcctcggtctctgcagcagtctcagccttatcacgggacagatgcagtcatggttgctgatggcaattatctgccaatcactcacactggatccacaaacttggcttcctcatcaggtactgttcctcttactgatgttcttgtttgtccaagtataacaaaatctcttttatctgtgtcaaagctcacacaagattttccatgtactgttgagtttgactctgatggtgtgcgtgtgaatgataaggcaaccaagaagcttctcttaatgggaagcaatcgtgatggtttgtattgtctgaaggatgacaagcagttccaggccttcttctccactcgtcaacgctcagctagtgatgaagtgtggcacagacgtcttgggcatccacatcctcagatccttcagcaactggtgcagaatcactctatatctatcaataagactactaagtctctttgtgaagcatgtcaactcgggaagagtactagactgccatttatttcttcttcttttactgccagtagacctcttgagagggttcactgtgacttgtggggaccctctccaataacctctgtacaaggctttcgctattatgcagtgtttattgatcattactctcgtttcagttggatttatcctttaaagctcaagtcagacttctacaatatctttcttgcttttcacaagttagtcgaaaatcaacttagtcaaaagattagtgtttttcaatgcgatggtggtggagagtttgtcagtcataaatttctacaacatctccatagtcatgggattcaacaacagctctcatgtcctcacacccctcagcagaatggtctagcagaaaggaagcacatacatttggttgagttaggcctttctatgctgtttcaaagtcatgttcctcacaagttttgggttgaagcctttttcacagcaaacttcttgatcaatctattgcctacctctgctcttaaggaatcgatctcaccttatgaaaagctctatgacaagaagcctgactacacttctttacgatcatttgggagtgcctgttttccaacgctacgagattatgctgaaaacaaatttgaccctcgctctcttaagtgtgtctttctaggctacaatgaaaaatacaagggttatagatgcttgtatccacctacaggaagagtctacatcagcagacatgttatctttgatgaatctgtgtaccccttctctcacacttacaagcatcttcacccgcagcctagaactcctctacttgcagcctggttgcggagctctgactcttctgctccttcaacctcaacatctccttcttcaaggtcccctctctttacgagcgctgactttccacctctaccacagagaaagacacccctactccccacttcagtgcctatctcaagtgtctctcctgcatccactatcacaactcaacaaagt

SEQ ID NO: 5887 - DNA, 4370 bp, Arabidopsis thaliana landsberg
cagttcttgcctactaagaaagttaaagagcgagctaaaagattgcggcggtctctctctgaggatctttctagtggagacttgtcaaagaacatacttgcgatgacttttaggcaagttgttttgcggcagctgtggaacttccagctagtgttatttgcacctggagctgaaagagaaatgggagatttcgaaaaccctcgagaggttaacttcgctttgatgtgaatgtttctagtgatactggccttgcaagtgggaattgatactgataggttcagttttcttattcatttggtatcagcaggtttctacatccttcactcttagctcatcagatgaacgggttatatctgttattgcagaagttatatgcatctccgctcttcaaagcaccgagaagcatttcctcgatgattatctgggaaaagctaagtttccgtttatgaagtggttatctaaacgcaggaggattgcttcaagagactgctcggttgtcctgcataagttatttgatgatgagcagaataccaaacttttgcttgagtattaccagtcaaggaaggaaaatttcaaacttgcagacacaaagcaaagaagccggtggtgggacttatctgccaattccaagttggaaaaaattggtggccctggatttagtagttgggcaagtgaatatttacccgcatatcgactggaaatggatagtacaatacttgcagacttaaagcttgagggctggagaaagtccagtgagaataagtgggaagttcttctaactcactcccaaatggtatgacgttttctctttatttatgtaacctacccgtctatgcttttgctgtgtgtaagactagaaattgcaatgttgctctcgctctatatatttgtctggctagcagtctaggttgttgctgctatatgataacatggagctatgttatattgttctgtttagtatagataaagacgtcgaatgttgttcaaagtttatggatagaccgtctttagacaatgttgaatccgtcataagagttgtcattcccatttacctatacacttaacgagatgctgatacgttgtgtgggaaggaacctagcaagatgaaagaatattatcaatcatgggaataaaatttcctgtactgctgcattttgtgtgctctgtggtgactaaggtgtctgtttttgtgcatgttatttcttgaggcctctacattcctgagacttgtataaaactcttaggttggattagctgaagcattggatatttactttgaagacacatattcacttcccaggaaacagctaccatgtgatgttcctggaaattatgcaaacttacccaatgaaaaggtaatgactactggactgctaaaatttagccaatctttctgatattatactttggtgtctgttattgtgtatgtaatcagaaccaattgccagtccttgctatattactgtctgtatataatccgtattctccatgataatcacttgctctgtctaatcgtgtgcttcattacagctgcctgatgaaatatgttaaatatatttgtagtctgcagaatatattcatgtttactattagagtttttaccattattttggagacatgttatgagttaataagattggcttctttggtagctttttacctgtcaaacttatgttcacttctttggtttgctcattctctattgacagagaggattgtctttgttgaaattcatatctgtcaccatggccagtggaatttttcttcttgctgtgagtgctgcggcccaattctgtcttcctcagaaaagcgagaggaagtatcccggaaaacgccaagagattttatggtcagagagtgaattgttatctcatcaatcttcagattcctctgaggtatggattaccaaaacacgttgtattcatatagatgtgtacgacaacaattgcacgtagacattaatagcttttcaggacagctctagttcatttgatgatcacataagattaagtactggtgcagcctttttttgtaaatcccttgccatgaataagttaacccatccaaaaagtaaagacaatccaagacctatatatatttcatgtctaatgttatttggttaataatttttgcatgagtatggactctctatactgagaatgagagaatgagatcaaccttttattattttttgtggtgctttttcctgtttttctcggaaactaaattctgaaacctcaaatgagcagttggattcattctgcggattactcgtcaacaagctcaaggatgcctacagctgggtaggggagatcacactagaaagcagcataggtgcctggataggggaagtacctgactacttgaaagaaaccagcagagctaagtctgttgaagatcacattgttacaagctcgtctcttctggaaatactcaatgaagacgcaaaggcatctgcgcaagatatagctacttaccaggtaattccagtgaattatgatgaattgaattcttttaagtggactactacttcatcttcgtctggttctttaatggaagcaggtagttttatcatccgaaggtaaaatcatagggttccaaccgacaagccgggtggctgtgaatcactgggctgctaatcctttagctagagaactttatggaggaaaaaaactcaagcctggtaacacaccatggttcttctttcaattccttaaattcaatgctattcgtatccttttaagtttatctgattatgtgttgtgtcattctttgctttgcagggctgattgagcctggtcttaagagtcaccctcccaaaaaagtagttgtgttggaattattaatgtctgtgaattcagatcgtccttttgcattggtcagaccattattgccacaataagcatagcgaagttcctgtctctctttagatgaattttagtcaatatatgtagaatatgatttgcttgattgcttgaaacactgggcgtctatgatatgcaaatctcttaagaagagtgagaacgtgattacatgattcttgaaacgatgcttaagactttgaagctctgcagagaatttttattaacaaaaccccaaatctgtaacatagactaagtaagagcaatgatctcattgaacaaggtcctgattctataagaacaacactgatactcaaaaccgtatttgcttatcggttacataatttgtcatctgcattatatcgcacaagagagtcgcaaatgcatcacaatatataaaccggaatgtcagcaaatatgtcttcaccttcatagactgaatcttaaaaagcagtctccttcgtcacatttactattcctaactccaggacagtcttcagcatccacttcttgttatatatacataatctccatagatagacagagaactattatataagagaaaaaaaagatacgagtcatgaaaatccattactttgccctacgatatgtagaagcttcttctgctgctgcctaattaaatggtaagcaaacagctttttaaacctgagtttttccacattcgtctcaggggatataatagtcgcttagatttccgaccagatagttaaactcttcacctactccatagtcatttgcctgctctactgtgttctgaacattcccggtggcgacttttgtgctcacttttggtcttcctttgatgcagcgtttgttgttgttggtggtgttaggggtattgttttctggagggaactcagctgtgagtcttcccatctgcttctgcagatcagccactgagtcgtttgagactttgccttttgaagtcttcttcccgtcaacaagcttgagctcgagcctgtacaaggcacaagcatcacatttgttgatctcatattcgtaaagatgccattcgaaatggtgcagaggctgtggatccatgtagtaagatctcttcagccctccaaactcgaccatgatctgtttacgtgactcgtgccaaccacgaccattgtagtctggtaaagatctttgctttctgttcccgctctcaaaggccctccttggcttgtcaaagaatagccactcccttagtgtctcactctccagaaccgtgagatcaaagagctctacagtcatcaagatttgagtatgatcagctcaagaatggtgatcaattaacatacttgtgaatgaattccaagagagtaaagcctacctggagcattccatggagatttagcagttgcagctccttcacattcgggaataccaacatctttcccttcagcctttgcactaagagcagcaaaaagcagaccgtctttaggccgatactctcaggacgcaccaccggattatacctggtgcccttcattaaagccatgc

SEQ ID NO: 5888 - DNA, 1948 bp, Arabidopsis thaliana landsberg
agggtgatgttatttatatagcaaacgtcggggattcacgtgcggtattggccacagtttcagacgaaggaagcttggtcgcggttcagctcaccgtagatttcaagccaaacctgcctcgttagttccataagcataaataaatcatgtaaatctcagtgcatttagctaagcagttctgaatctttatctttcaaattttgtttcttattaaaacagaggaggaagagcggataatcggatgcaacgggagagtattttgccttcaagatgagccaggggtccaccgtgtatggcaaccagtagatgaatctccggggctcgcaatgtcaagagcattcggagactattgtatcaaagattacggattggtctcagtgcctgaagtcactcagaggcatatatccattagagaccagtttataatcttggccactgatggggtaagaacatttgaataagcaactttgttttgtttgtttatattggcagcgtagtcatgtaattgaaacattataggtatgggatgtgatatcaaaccaagaggccatagatattgtttcctcgacggcggagcgggcaaaagctgccaagcgactggtacagcacgcagttagggcttggaatagaaagagacgcggaatcgccatggatgatatctctgccgtgtgcctcttcttccattcttcatcgtcgtcgccatctctatagcaacatcttctccatgccacgacctgcaagtaggtactagtacttttggaccgggcaagaaaagaaaaaatgctgcaatgtagatagacttgcgtaaaatcgcattgaatattactttcttgccaaaccagagtcctatcacaatctaaagaacacaattggttacttgtaattttaataatcatttaaaaagtgggaaacttcttaagttattatgaaacatgtgatgaggaaacaagcttttggaacaagaatcaaacatatatcaactccaaagttgtaagaacatatccgcaattgaagatgtattgtacagcttgaggcacataaacattatgatttacaagaagtgtatactatacacacacatacctctgcgaacctaggaagtaatcaaatgaatttcttctttctatataactaacatctctatacataagtaacgtgtgagcttaggtactctattaactgattaaagagaactgggcgtacaataaatagtggttagtggaagacttgaggagcagtgtagaactcagattcgttgaaacctggtctgagatcttcttgatcacacatgaactgtaatgggaagcacacaaggttccctcttgtctccttcagaatctcccacgagtcgctgccgcatgattctagcctctccggtgcaatgccaaggtcgatcgtagtgtgacccaacttgtctttacaaagagccatattgtgtctcaatgcagctctgtgtttagaaagacaaagtcagaagcagatttgatcatctctcagttgcgtttaaaaagccaacgtagttacgtatctttaatcactaaagttatggagatttagttaaaaagggatgacgtatgaaccttgagcgtatatgttcattcgggatgcacgagaagacttggttgtagatgtccgtgtttttcttagctgttgccatccataagtctttgtatgttgcatctttgattggatcttcgatcttctgaatctaaacacaaaaaacaaaatcaacattttcaaattttctatggaggtaacggtagttaaaagaagctttcagctcaaggaatcttatccaacggaaataggataccaagactatcagagaacagagcaaaaacaagtaaaaatactaaaaagttttcggctatatatactcaaatgaaaataaaggtttctgaagtcaaaaatgtatagtataggcgtttctagaaattttttaaaatta

SEQ ID NO: 5889 - DNA, 1799 bp, Arabidopsis thaliana landsberg
catctacatgactacatcaatggaaacgaaaccaaattgggccaagcccattaattaaaaaggagacacccaacattagatatctacttttgtccatcaaactttgttttatgatttttatcttgtggtatattattatacacttcggaatcggttgttccgttccttttcctggtatcaacttatgtgaacaatgagacattgagacgataaatcaactcatgatggcttcgaccaaaaaaacgcatttcggatttcaaaaggaatgttacaaatgtaacattatcgctgatctatctacaacacaaagttttactttgaaatcgtcatggcatgatgatgttttgatagagatgacgatgaagaagaatggaggaagaggcagacgactgacatatcgtccatggagtatcctcgtctctttttcttccaagcccgaaccgcttgctctactaatcgcttagccgccttaggccgctcagccgttgaggagacaatctctatagcctcttggttagagatcacatcccatatcttttacattcaaaccaaagagaaataaaaagattaattactaaagatgccgataaataatttaattaagactgtacaaccaagataaaccaagtcgattcaaatcgaaccaaaatgtatacaaacaccaaaatttatatacatttgaactttaaaaatctatctacctaaacatcaaagccgaaccaaaaccactcaagtcgattcataatagatttatataccaatgagtaattttcattaaaccaaaaaactcaaaccaaggaaaacctaaattcggattaaaaattcctaaatcaaataaacaatattccaatttgcttttcttttggtattaccaagtctcttattcaaatgtggttatttcttttcttttcaaattgaccttttataactttttgaacgttttaagagtgtggatgagtatattttgtttgtgtaaaggtttataagtatttaccccatcactagccaagattatgaagtggtctttagtaggagatgtgtctttgagtgacttcagggactgagaccaatccatactctttaatacagtagtctccgaatgctcttgacattgcgagccccggtgtttctgcgtctggttgccacacacgatggactcccggctcatcatctagacagaaaacccgccctttgcagccaattatccgctccttctcctctgttttgtttttcaaagcaacccaaattcaagattaagagtcaagaattcactagaatatacatataagatttgtattttgtttgcttctttgatttctaagaggacggaagttaaaacttccgagatctagtaaggtaaaaatgcttatggaatttaagagggattaagaaaactaacgtggtagattcggtttgaaatcgagggtgagctgaaccgcaaccaagcttccctcatccgactccatggctagtaccgctcttgaatcgcctacatgtgctacataaataacttcaccctacatacgccaataaaccattaatcagtgcacagaaaaattctcaaaaaacgtttactaacaataggagcaaactaatattcattttcagtttttcctgtctcacaatggttagagctgttgtgccgctatagtaagaatcgatcttgcggtgatgttcaagctcttgatcaaccgttgcacacgtttttagataggattgcttccatatgtcgaatattgagaattttttattagagccttcgaggtcgagctcgggttctagagtggcctgagcaagaa

SEQ ID NO: 5890 - DNA, 828 bp, Arabidopsis thaliana landsberg
  unsure (1)..(828): unsure at all n locations
atatgacacatccagaactgcaccattggacaacaaaaatataaggattcaactttaactctaaactttaaatacttcataatacagaggatgagatagaaaggagtccttaactttgactcctgaatagggacgtactaaatagaaaagaaaaaatatttaatttaactgatggtggtgtgaacaaaataatgatggcgtgaatacaactatgtggaatccgcaaaagaatttaaaaaattattaaatattaaaaatgtgaatagttatatgtatatgtacagcagaccggagtctcaaacagatgaattattataaatatttgggattttgcagttgaaccttaaaatcatacataattttctagttggtcacataattttcacattgtattggtgattcataagttttgatggaaaaatatttagaaaatcatagttttcacacttaatgtatcactataggatgatcattagctaaatgttccttgttatacataggtgatttataagaaaaccaatttatgttaaagtttactaataataacgttataatatcatattttatcaatagttagtgttttaatgttgataatatttgtaaatagtgaaatttacttattataaattcttgataaaatataaatacatttatcaattgttntagttgaactttgaaatataaaatcaaaataaagagaaggataatcagtttgagaataattcaataaagttgaaaataataaatcgaactttgtgattataaaatacacatacagagaaggatgataatcagttatcagttgaatcagttaaactttggataata

SEQ ID NO: 5891 - DNA, 3952 bp, Arabidopsis thaliana landsberg
gcctttggagacggcctttaagaacgatgaaatcaactactatattgacacgaaagaggcccggggcgaacgtattgaaacccttttcgagaggattgatcagtcagacatcgcactagcggtcttctcaaaacggtactcagaatcaaaatggtgtttagacgagctggtgaagattatgaagaacgtggaggaaaacaatctcagagtcatccctgtcttcttcaatgtgaaggtagatgacgtgaaataccaggagggagagttcggtgggaacttttacggaaaaaatcaccgtgaaagaaccaatatccagcagcaggaatggaaggaagctttgaaatctgctcccacaatgatggccttggttttggcgaatttcatgtaaaactagaaaaaactatctgctcatcttaaccttttcctaatccaaagacatataattgattgatttttgtcactcatgttgcttgtaggtcggagagtgaacttatcgccgcgattgttgcgaatgtaaaaaaagtgaacgccataattgaaggaggagaaggaaccaacccgcttaataggaataactcatcttttagttgtagtggaaatacttcctttagagaaatcaaagaccctgaagcggctctcccctcggatggaatgcaacaatgccttaagcaattagaagaaaagttagattttgataacaaagaaactcaaattgttggaattgttgggatgcctgggataggtaaaacaactctggcgaaaaagcatcttcaagcgtggaaccacaagttcgtgcgaaatgagaatgagattttcgagggattccgtgaaaagtccaacgaccatgattgggtgaagaacatactttttgtagctgacgacgatgaaaaggtaaaggttttgattgttcttgatgacgtgagcgacaagaaacagcttgaatttctgcggatggaccgggaaaagactattaaagtgggaagcaagataatgataacaacgcgcgacaagggaacaatggaaggactagctcacgatacttacattgtccctggattgaacgacaaagaagctttgcaactctttacctattatgccttcacagatcatacttccaaagaggaatttgtagagatgtccaagaagtttgtggattatgctggtggcaatccgctagctctcgaggaattgggaaaggaagtttgtgagacaaatcaagataactgggaagctatactagagatgctgccacatcgttgcaatgagaatatcagaagaaaattaagaatcagttatgacgaactgactgagcagcagaaacacgcatttctagacattgcgtgtttcttcagatcagaggaagaggattatgtaagagttttactggactcgtatgacactaccgctgatgaaactgcaagagaagttagcgatctcgccgacaagtgcttgattagtatctccgcaggccgaatagagatgcataatctcctatgtacattaggaaaggaaatcggttcatccaaagaaaacaattggggaatagtagactgtggaaccatcaagatgcaacagatgctttgcgcttaaaaaaggtaagcaaaataatactcaacatttgtttgctttaacatattattaaccttaatgtttcttaagcaaaaacgaaacgaatactctttattttttgtttgcagtatgctgaaaactgaataatacttttaacatttcaagtatgattttttgaaacaattttttcctataaacttaaacgcaaaaatagaaattgcgtttgaaaacaagtttggtattcacaagtttccccgactattctttatttgtttttattcatactaatttcaaatgttttgctaatttatcgtcttttaacatgttatataactagggaacaactagtgcgaggggtattttcctggatacatccaaattatcgaaggcaatacccttagaaagtaaagtctttatcaaaatgccaaatttacgatacgtcaagatcttcgactctagctgtcctcggcaatgtgttggctgcaaagtaaacttgccagagggacttgagtttcctttgaaagagattcgatatttccactggctgaatcttccattggatgagctcccaatagacttcaacccggagaatcttattgaccttaggctgccttatagcaagattcaacgtctttggagaaggagtaaggtgtgtcttcctgtatcgtcttttgttacacgtagtcatttacttttatacttaacaaaatggcaaaaataacttgcgtgctttagtactgatcaggttatctgttgaataattatcgcagggtttaccaaaattgaaatgggtggatctaagtcattcgactaagttggtcgacctgtcaactttgtcaaacgctgaatctctccgacggttaaatcttgaaggttgcactatgcttgttaatttgccaggagatatggagaaaatgaagaatcttgctttcttgaatctcaaaggatgcacaagtttcttgtctcttccgacgatgaagaatttaacatcactcaagactctcatccttagcgggtgctcgaagtttaaggaatttcaggtgatttctgaacatcttgaatatttgcatctagatggcaccgcaatcgagggacttccttcaaccatccaaaacctcggaagacttattgtcttgaatttgaaaaactgcaaaaagctgaagtctcttcctgactgtctcaacaagctaaaagctcttgaagaactaatactctctggttgttcaaagcttacaagttttccggatgttaaggaaattatgaagagtctgcaaattttactactcgatggaacgtcgatcaaagagctgccaaatatgttactacaatatggtagtaactccatagacctccaacagatacaaccccagatgaatggtttatccttcttgcggcgtctatgcttaagtagaaatgaaaagatcagcagcttgcaatctagcatcagtgaactccatcatctgaaatggattgatttgaagtattgcaagaatcttacagtctcttccgacgctcccaccgaatctgcaatgcttagatgcacatgcttgcatctcactgaaaacagtagccagtcgtctaggcattctcatgtcgttaacagagcagaccccttcttcatatattttcaccaactgtgaaaaattggagcacattgcaaagaatgaaatcatatgctatgcacacaataagagtcgtctgatttcgaatgcattgaatcgccaaaataaggtatctctatccccccactcaccatcaaagcttgatccacaatttttgaaataatactccatttgtttcatataatatgatgctttaaccaaaataaatttcgttacattttaagaaataatactccattttgtttcacaatggttctccattcttttattttatttttaattattgatacaaagcttagatatatcagatattctagaatctctcttgatgtacatataatatataatatatatctatatatatatgtgtgtgtgtgtacatgaacactttacttaatatgaacagatgaattattacttatctttaaattactctacagggtcttgcttttgaagctttggttgccacttgctttcccggaagtgaagttcctgcgtggttcaatcatagagcttctggagcaatgttagagccggagtttcctagacattggagtgaaagtgagtttgttggaattgctctatgtgcggttgtctcctttcacgactacgaaatccaaaataacgacctcatggtgaaatgcatatgtaaattcaacaatgttaccgggacttcctcctctagcttctttaactgcaatgttggaggtttatctgaggcaggggatgaacaacgcacgattaaatctactcacgttttc

SEQ ID NO: 5892 - DNA, 803 bp, Arabidopsis thaliana landsberg
  unsure (1)..(803): unsure at all n locations
ttgttgttcttgatgatgtgagtagtgcaagacaaatacaagttcttcttggtgaccaaaactggattaaggaaggaagcaggattgttataacaacccgtgataggacacttatcaccgagttagatccaaatccttacgtggttccaagattgaatcttggagatgggttgatgtatttcagcttttatgccttcgaagatcacctctgcaatcccgagatgggagattatatgcaaatgtctagagagtttgttgattacgctagagggaatccgttagctctcagagtgttgggtaaagatcttcgtgggaaaggtgaggctcaatggaaagcgtggcttgatacatcggctaaatgccccaacaagattattcaaaatcagttgatgatcagttatgatgaacttagtcaacaagagaaagacgcgttccttgacattgcgtgtttcttcagatcagaggatgagtattatgcaagaagcttactggattcgggcgatcatgagtccttccaaggtgcaagggagataactgatcttgttcacaagttctttattagtatctctggaggatgtgtagagatgcatgatttactacatacattcgccatggaaccctttgttnncattagctatcttgtggggttaattaagggagacaaagnttaaggggcccttgggttgggggaaaaaaaggtactacattatcctgcctggtggcaaatgggaggctattaaatagctaagcttcatttcttgnnntcatttattaaggatcttggtttcttaaacttttttcag

SEQ ID NO: 5893 - DNA, 1917 bp, Arabidopsis thaliana landsberg
tgcaccctggatctggagaaggagagggagaaaacggtcgagctggaggatcggctgaagtccgagaagaagaggcttcggtcccgtcgtgagaagtacgcggagaatcagacgagtaaggccttgattcatgttgctgacctctttcaagctcgcatcaatcgagtgaaggcccatctcgatgacaagctgaagatcaatcccaaattcctcgattacaaccaagtctgtgggaacgtcgctcttttggctgagctggttgaggctggggagatcgagatcaagtctgccgagctgatgccacgtttgattgcggatcgggatgccctcaaggccgaggtggagggctttgagatcaccgagatcgagaaggatgacttcgacgtctggacccttttcgagaaggttccagaggaggaacatttcgaaccatcggctagcggaggtgtttatcgatcagttgcagggccaaggcaatgatgtgaaagttcgctctactttaggtaagtctcgagatgaacaacagatagaattttattaatattacagctgcgccccgtcaaacgaggctgcctacgtaccctttgcagggatcaagccgatcgtagttcacatttacaaagtgatgaggtggttctaccgcacctcgtttttttttttttttttttttttttttaatagtatctcttcaggtgcattgagttccaggtgcgaggcaccgcggtgccgctcattgttaggagttcgtagtctcctggtcggacgatttttgatacttggtatggtccttcccagttcgctcccagtttgccggcgttgatctcggctgtattttcgaaaactttccggagaacgagatctccgacgtcgaagtggcgattgtggacctttttgttatagtgtttggcgggggcgagttgatagttctgaatgcgacagagggcggcgttccgtatttcttccaggtcgtcgagtcgatcgagcatcattctgttgttgagttcggggtttttcaccatcatggatcttcgaagactggagtatcctacttcggcaggggccatggcctccattccgtatgcgagtgcgaatggagtttgatccgttgcacttcggggcgtcgttcggtaggaccacaggacaccatccagctcgtctgcccaagctcctttcttttcgtctagtcttttcttcagaccggagagagttgtcttgtttgtggcctcggcctggccattcccctgtgggtaccgtggcgtggacttattgagtcgtattttccagctggcgcagaaattttcgaaagacagcgagatgaactgcgagccgttatcggttatgatttcgtaagggagaccgtgccggcagatgatgaatttccagacaaagttttggacatcattggctcggatcgtcgcgtatgattcggcctcgacccacttcgtgaagtaatcggtcattacaaggatgaactgtttctgtcgggaagcaggcatcgggtcgacgatgtccattgcccatcgcataaaggggtatggtgcgactccggctcgtagcagttccgtgggttgatgaatggttgtttcaaaacaataaatgtttcaacttggacgaagataataatttcatgaaaacgaaaccattacatgactatcatcatttcattataagaatataaacatggacgagctcaacatttatttagctgactccttcttttatcatgtgttttatatacaaatacatgactaggatctgacactgtagtattagtattaccaaatcttaaactagacctaattttccctgataaaataatttaaggttattttattccgctgacatttaacatggtataatatatttggacggttcatttcaaacatgtagaatattctaattaaatagaagagactt

SEQ ID NO: 5894 - DNA, 8038 bp, Arabidopsis thaliana landsberg
ttttgttgtaaatattttttttgatctagtataagttttttatttatgaaacaacaaataaaagatttggacttaagaatggatagaagttttggaataacaatatttgtgtcctatgtataaaaattattagatagagatacaaaaattgttatctgaacaaatgcaatatatcaatagttagtgtacatatgaagtcataagaattacaccaaaatactctttaaaaatatgaaaaagatgtttatagtgttttgaaaaataccaccaaacaaactttataatcttatttgaccttagagcatgcccaatggtggtttctaaccatagtttctaatctattaaagtaataataaaataaaaaataatattatttaatttgaaaagtttcttaaaatagttagaagagtcttcaaaatctcttgaattagaaattctctcacctttccttagaaactatcttaattaaataatattatttattattttattattattattataggttagaaactttgcttagaaatcactactggatttgcttttagtggtatgaatagtaatagatgacaaaaattaagaaatttatttcgtgaaatgctagttcaaatgtggtcggtagattgtagcatagtcatgactcatgacttcgtggtgttacagtctatattcaaatccaatatagaaaatgtgtttgcttacaatattcaagtccagcatacgtatatatattttcgatttttgaaattgcaaacttagttataaataaaatgtgttgtgtgcatgttgaatgtttttgacagggtgtgattacgtatgtaaacaaacaatcacatgcgtacacaagattacaaaatataaacgagaatgtgagtggtatatacactaataagataatgactcatgaaccgttttcaaatcaatctactttgctttaaacttgttacgattactttaaattagttagtattgctttagtagtttagtagaaagtaatgtactaaagcgtgtagaaataaattcaatggtcttatacattgattctgctatgattgggaaattagtttcttgagacacaagaaagtgaagaaattcatactgacatatagaattagtaactttggttacttgtattcattgtttatgtttattaatactagtggaccaaaatagcgtttgcgttttaaagtggttgtcttgacagagaattcgtttattacggttgagacttgagagagaaagagagggaaggacaaaatggaggagtggattccactattcgacattttcttgaagagtccatctccggaggctgaggcttcgctgtggttagaccaggcttcgaacccttcttcttcctcctcctctgcggcggcgccgatcaaccggagctcgtttgtttcattgctgagggaacaatgcgaccagaattcatctccggttacgaagaagtaatacccagatttcaatttggattttgttttgtttttctatatgttatggaccgatttgggttgctgatgaaattgtttttgtttctccgttagggttcttttcattgagacattaccgaacatggttcagtcaaagattctatctttccttcttttcgagtatcagaggttttgcgttagtgatttggtttggctggctagagaaatgttgggtagtggtggtaataaagttgtcgatttctgggttcagagagatgcacataacctgctcgacagaattcctaaaccaaaatttgaatggatatctaatctagatttggattcagctgatgaagacagcatgaagcaggtatttgactctgtacctgattggctcagtgagaaacttggttctgctggtacaattcttccatggcttcctgtatcctgtgatgatgtagattcagaaatgctggttgttgattcttggaatgggaaggagataactcaaatcaaagaggatatggaagaagatcagagagaagttgtgcataacattgatcataccatgactgttgggttacaagctcatgatcatgaaatggctgtgaatcttagagctcagatttcgaactttgagtctacttctgaagttttaaccttgtgtaacgacattcggagactttgcttggagaagggtaaggactctttgagagttttggctttgattgagccttggaatgcagatgatgagactgctgcagttttactttcgagtttgcataatggaagtgaggaagaagagcttggttggccaagccatgttctatgttcgatcgtgcttccaaagtttttgtctcttgagaagtctgcctctcgtgtgctgatgtcttcaacaatcgagttttgcaagatccaccaaagagcagctgagtatgcattggtgttccctttaatactcaggaaagaagggataaacaatttcatttgtgaggtgatttcaagggttttgaaagagtgcttgcacttgggtcaaatctctggtttttgccagaagttgctttgtggaagaacacaagagcggaggtttatgttccttccctgccatcgagatctcatatcggatgaactgacatggaatgaatatctgtttatccttttccagaacatattgatccatggcatccctttatcccaagattccgtcgattgtcttgtttccaaggttcaggagttggcggaaaggtattcgaaatcgctaaaatttggaaacttcttgctacattttactgccaaatgtgctccgatgctacaggctcataagtatcagctgatcgaatcagttaagtgcaccaacagtctagttacaaaatctatcctatcgaaactcaatgccctgtagatcctatagctcaagtccaggtaattcaaacaatcctctgtggtttgacatctggagcccttgtcttgtctccgaacttggtggtttaagaacagttaaggtaaatttgaaacttgcctctgggatacaatagctttgaagctggagaaataattgcatcagcagcaagattgtagaatgtggatattgatccctgtaataagaggagttgttcagaccaaatttagtcaatagagcagaagagtttagttaatagagaagctcgacaagtccgcaaccggacacttaacttcaagaaacatgtgctgcggatgcccatctatgggtcctcttacctcagctcggtcatcttcggtcagaccacagtccctgaagctaatgtagaagattgcatccccggttggctccatggcttcacgagtttgaacaagaacgaccttcttgatctccagaggtgcagcaagcttgagctttgtcttggagacaaaagacaagttaggcataaaattaacaaccaacattattgtttacacattgtatgaccaaaagccagaggcatgtgaaacagaaaaacaaaccaaaaacaatatcattatttaagggttaagatcttcagtatgttacattgcaacatcaaataaagaaaatagagcggctcacagatccatgagcaaacacttaaactcaagacaaacatgtcctggaatcccatcgacggttcttcttacaatggctctgtgatcttgacgtggaccatgaggagtattgacacccctaaaactaatgtagaagatggcattcccagccttgagcttttcctttgatttaaaatcttcacgagttcgtacaaggacattcttaatctgcagcggcacacaagacttgagcctcatgtctccttcccacagcgagtaagacgcaatctcagtgtatagttgaagccagttgtgttctcggatgtctgactcttgcaccctataaaagtgatcttgctcactgcatgacatcaaagtatcatccgaaatccactcaggtagattgcctttgtagatatcatcaattgcttcgtcattccatcgctttatttcgtctccagtacctttttaaaacactttccaggatcatcaagattatgataacaaaaagagaacaacccactaatcaaaagcagaaattcattcaccttgaatctttggtttaattctacagacttcagtcagtatcctcaggtcttcatctttttgacatgtagctctggtaacacatgtctggaaagtgaaacgtgaatcgttggctggatcaacagcctcagcagtaatgttgtaagtcataagcgcacagaatctagaattatatttatcgacgtgcatcaactcaaggtttgagccctgaaatcagtggtagtaaagaagataaagaagaattcagtaaaaaaatacaagtagtgtggttagaccaagatgagaatttttaaccttttgaaagttgtaccaatggagtcccactctagcacaaatgccaacaatgtcaccacgaaggtcatcattgttggcacatttgtacacataaagtgaactagtcggaatacgtatgtcaacatcaaatccctgcatgcgagaattattatcaaaagtcacacatgaacaagttgagatcagggaagatcctgtatatatatgtatatctttacgtcggattcgcgaatttggcgatagaactctttctccaaagccgggtcaacctgatcatcatcatcttcgtcagtccatccagatggtggatcgttatgtacagcgtcagacaattcttctttcgatataaaactgctactaaatacatcgtcattatcatcatcttcgtcagtccatccagatccagatggtggatgtttatttaaccattcttctttcgatataaaaccgcaactagatacatcatgagatacggtggtttcttcaatgcgcagcggtggatcgactgcttccatatcctaaaacaatttcagtcgattttcatattcgaaattacaaatcctgaaagctgtggcttcaaaatttcaaaacactgaagcgaattgaccataagaaaatagatctacgatggctaaaataaaagtgagaagcagatttcatgaacctggtaatcgtcgtcttcgtcgatttggcggatggcaacggagacaagtagaaaggcaataaatattcagataaacgccgtcgtttagaccgatgtattttcattccgctctgctaggctcatttggttttggaccaatcgtcaaattggataacgatattcccgcttatttcgtcgccggctattgtctacttggtcaccggtcaacagtaacgtcttttatcttttctcaaatttttgttttccccctttctttgcattccgtgtacagaaagccagaaactatagcgaacgtatgtaacagttaggtctagctagcgtaatgaaatcattgcatctcctctctttctttctttttttctttggtatgctctgttctgagcagagatctttgggttattcatcgggtctagtagaattgagcctggatttgtttaaatggatgctaatacttggcttatgtagtgttgatcttgtttcttttttttggtgtatctggtaaaaggatcgatagctatgcatagaaaaaacaagattcttggttttctaactaacttttcttaatccgcaggagaaacaagcaaaaatgtcgtcaatcatgaaacctaaagtaagtagatgccaaagactatagaatgcacatgtataaaactgagataactctctattgattgtagtcgaaacatgtttccttgtttgaaacaggaactgttacccgtaactcgagcaaatgtgaaagttcttgctcatattttagagatcataccagttggtacattctctcaaatcatggcaacaactcctaattctggcatcaaggttgaggaggtgcacgaagcagtatatgcacgctggcgtgtatcacgggtaatgccatgtaccatgcatttgttatcaagtatattatgtatatagttatgtaaaaggaaacgcgttctcttcacaatttcagcatgtccatggtgaaagactaacatctatggctgtataaaggaaacagtggattctcttctcttctatgataagaaaacaaaatattgtcttttgtagtttaaaactagacctaggtatcttgttcaaccaaacagttttattggtttaaaagtttttgtagctgttttgttgactgttaatgacaacaaagaagaaagaactaagagaaacgatattatggaaagaccagaagaatgaattgaactaaaatcacgaatagacatgagaatgagatctacactaagccactaaaagcaactggctatttttacaggaaaacctaattttgcctttactctcacggctaatgtaagtagacacatcttcaatgtatattattataaagtgaccaaccaaagtgaactttcttctcactgttttaaggatattttgtgcccacaatgttcacaacacttgtataagcctttttctgtgaaagaatctaggattgactgcaacatggcggattctgcaggaacactgtacatctcttggttcagttcctgcaaaatgcaaaatgtacaaatgtttctgcgatagatgcacagggtaaaagacagtgaagagaattgagtaataacaagcaccatcttcgttaagtagctcttcaagacttaaagggactgtttcagtagacatgaaaatcttatggtaggatgctcttaggctcttcatctaccaatgccaagaaacaagacatgatcttttggtaacactccaaaaaaactgaatctaaagacgggaaagatccaatgcttggctagaaagggaaatgaatgatatatagattcattcttcaaggaattataaggctgcagcggtttaatacaaaacaatcagcttggtagattacattggaacaccaaataaaagcagaggataatctgcaacatcttagaagaaatgtgttcagaccaattgtagccaatagagcagaatagtttagttaagagagcagctcgaaaagtccgcaaccgtacacttaacttcaagaaacatgtgttccggatgcccatctgtggttcttcttaccacggctcggtgatcttggtcagaccacagtccctgaaactgatgtagaagattgcattcccagccttgagattttcctttggcttcatagcttcacgagtttgtaaacaaagtggggtctcacgaagagatgcgatttattagttcctctatttcgaccatgagtttattggttctctgtctctctataccttgtatattgagcatacggaatttgcaggtactctgctgcctcaggcttttcaagtccatctccatctatgagtctagcatccaaaagttatagcttcattacagtattagaaataataccaaaatgaattttcctttctctgacaagtgatttttaaggatgttatgtgcccacagaatgttgacaacacttagttaaagctatatatcaaactattacagttccagtgaaggaaatggtattgagcaattaggtataataagccattgctgattaatgaatgcctaagctaagtctctaagttgtggaatcgagccattgtctgaacttgcatatcccacggcgactttcagtgaaagaatctcggattgactgcaacattgccgatactgcaggaacactgtacagctcttggtcctgttcctgaattacatcagatataatatgtttagatgtttatgcactagatccacagggaagaagacagtgaagtgagttttcattgattacacgtaccagctccgtgagacgctcttcaaaacttaaggagactgtttcagtagacatgaatatcttacgataggctgctcttaggctcttcatctaccaatgccaagaaacaagacatggtcttttgtaacactccaaagtgatattctgtttcttacttcaaaagactcaacattggacagagtacaaacctctgacatggtaaatccatttcgtctaagtccctccagattcaaaccgcgaagttcggctctttctccagccaccatcatgtactttgaaacatcttgtgagaaactatatattaccgtaccagtgagtaactgtggaaatgggaca

SEQ ID NO: 5895 - DNA, 1119 bp, Arabidopsis thaliana landsberg
aagtagcatcaaactaagaccaacccaaaaggtaactaaacgattcacactttcaacgtacgttttcatgatttgtccttctgatgatttcaataaaataaaaactgaattgaatcaaccagtgatggagaaattatgcatcccatgtaattaaaagaaacaaaatcacacaagatattataaaataaaactaggtatattcaaaggcagtaaggccttacataagcccataaatattgggcttttttagcccactaatattatgagtctggcccggagcgtaattaggtctggtggcaaagttgttaataacacaaaagagattttagttaataaaccctaggcttctcaaatcggccattgctaccaacttcgacttggaattctttcagccgccgtccaaattgctttgccgccaccggtaaatttgttcccccttttcccactctgcttatagcctcacttcttctagggttgagttcagtctctgtttataaacttttttcgcaaaaaaattcaatctgacaatctgttttgtgttgtagaagcaaagagtagagagataatggctgaggaagaagctaagggtttggattacataccggagatagtactgaagaagaggaagaacagagatgagcttgcctttatcaggaagaagcaacttgagttgggtaattccggcaagaagaagaagaaagtctctgatatcaaacgtcctgaagattttgttcatgagttcagggctaaggtacacttctttttttccagattctctgaaaaacttttgctttgtctttttctattcgttttactgcctcaagttctgatttttgcttcttgacttttgtctacaccttagaagaacttgtttttgcttattctttgagttaaattaaagctatacatcaacctttatgattaggttttgtcacttatctcttagactgtaacttttctacagataattatgtgtttctcctttgagatttctccctagtttgtgcttaagacttgttgtttcttctgtcaatcctgcattgttctctgtaatttgactgtttcctttttgctaattttatctctacttaaggaagtagatatgatccggatgaagca

SEQ ID NO: 5896 - DNA, 2674 bp, Arabidopsis thaliana landsberg
  unsure (1)..(2674): unsure at all n locations
cacacatatatctataaattgaacaaatgtatatttttagccaactttgcaatcgagaaaaataaaatagtcgacagtgttcctaacagagaaagatgaacacatacattcagaacagagttcaatcataccaagtcaaagaaatatacaagtggattgagaagtctggactattttcagacatggacagaagcagaatgtaagactttgacgctaaatgagtgtgagagaggatcaagtttgtagacagtaccggaccacacaatcttcccccaaatctcgcctccatcgcctctctccacggaaatctcagcacaccaatcatgggacttatctctctttactttcaatattttctcactttctaatcctatccttctaattttatttagatgtcaatcattgtgaataggattatgagcctgcttagttgcattggactccaattgggtgaattggctaagaaatttcgacatggtgcattcatataattcgactgcaacctctataaagctggaaaacatgaatggtaagacctatctggatttgtgatattatatactgtaaagttgaagattgggggtttagtttctgttgttacagtacgctaactggaaatcggtgtactatacaacgtaaaatcacaattcaaaccgaaaactttatacacagtgagcagagcaatagttcataacagttaaggttttgacatgttagttttcttttatgtgatataagtagagaaacttggcatcttgtccaaacgcctcagtatattttctgccatctgccttgtgttaccatctccacgatggaaggcactaaccaacatacctgacaacatcctatcttgtgatatttcgctggcatacttatctccgcctctaataatgaacttgtcaatcatccaaaatgctttctgcaatagagactctttcttgtgttccttgactgcatttagaattagttgtactgcattcatttcactcagcatgcttaaactcttctccacttcgaccttgtcatctaatagcgtgcatatagcagctaatgctgactccactacctccactttatcactctgcaaacatgctagaagctttgtgattgcatttgcttcaaccaagcaaaatgtgttttttgcagaacatacgcctctgtggattgcacagatctctatctgcttctttttggatgaacggagggagaaagacctaggcatactcagtgatcccatgaattttgtgctcctaggttggggtggcctcgataaagtcatagttgtagatgatagattttctagtccagttgctgataacctttgaacttcgtcgcttgatgttttcatcaataaatcaacaaacactgatgtcaaatcgtggtttctggctaggtacatcatttggggctcgtacagtgtagttgtgaatctcactaagatgccaacgagaccttccaagaaatcagttgcatacctgcttgttcgtgctccacttctttgaatcagatggattgcatgcagaatttcagacactatgctctcgttgaccagtgctaaattaagagtcagattctgatgaggaagtttagcaagtaacttggctgaaacagcatgcttttctgttatttgatttgcttctactgggcactggataagattctctggctgacctctagttttacatagtctctctgatagcgtgtgaccgatgtagggggtaagggctattagaagttttaatgctccaacccctaattcgtcatgaggattgttgatgagttctatcatggcaaagcttgcgtcggtttctttgatcactgagacgattgttgccatcgctctaggtgatttggacaaggataggagaatcctgatcaaatcaatgttaagatcatctgggcttgagttcttgagcatgtggatgatgttgtatacaaagtaatccgagcctaatgtgtggccatgagtattcacctcaaaggtctcatgttccagcccagattccagtatatttgcgagtattgtagcagcttcgttcctggagttcatcagatcactaaacactcgcttcgtgaacatctcttcgaccatgatcttgatgatgccgacttctaccagtatcttgttgttggggtgatacaatgaaatatgagcaagagctttgaaggcggctcttctagcgtcagtnnnnnnnnnnnnnnnnnncccaacgagcgcagggcaagccttctcagctacgtacgtttttttctcatgtccaatatcaatttccacaaggtacgcagccattgccacctgagtctcctcactccctgccatatatcattcggaagtaaactgatattaatcaacatcaattcattgtttatcatttcgctccaggtaatgcttgtatagcaactatgcttcataaactttggagagaaaagcagtaatgaattaccttctgctagatggcccagaagaggttccaatagtccactctctgccatttgcttgatgttctcaggacacttctctaaatttcttaagatttggtctgatgtttcagatgcaaaggaatccaactccctgttatactttgcggtaactaacattagtatcgcccctctagcagtcccaatcttctcacatgcatgttgggattttgaaagctcaagcagtaaggcttgt

SEQ ID NO: 5897 - DNA, 1469 bp, Arabidopsis thaliana landsberg
  unsure (1)..(1469): unsure at all n locations
atcccatgaacactaatgtggatcatggtttcttcttctaacttaccagtagttaagagttcaagagaaccaccactagtctttcaagagaagacttctacctgagactcgaactgtggctaccaacacccagaagatggcacacaaagcacccacgattgataatagaagaaaacctctgtttctaatacccttctttgctatggtagtactcactggcgttccattagcctttccattgaacctcatacggctgaagctagacatacgtacaaaggttcggttaaggggaccctcacacgcagaggctggcgttgaaggtattgagtccattaatgcccacaaagccgatgagaactggcttgttgttccaccaccattttggatttcatggccttgggcattcacactcatagtaggattggtggaatcaggcatcacacctaagcaaatgaggattattcacaatgtatcagtggaaaggcttaggcttaaattcttacgttttaagagattaacaagggggtttgataatcgaggaataacaacagccccagtatcatatatatacatgtcttggtttaagtcaaagacaaacgcagaaaagaaaatcgtgcatagtggaaatagcttagcagacatcaaaaggtgaatgctccaagacaagcatgagtctaagtacctgatgagggtgaagcaaatgctccagaaaaggattgttgttgatcaaatagaatggcctgatcatcctcgaaccaaatatcgctagtgatttgattgagagttgtactaggatccatgatgttgttcagctggttctcgggagtctggtcctggaactgttgataaaggagttgctgtttttggtctgatgtgtagttagcagaatcactcagagaagacagatttgcagaagttccctgatcaataggttccatatccaaagacatggaaacgtcatggaacaattggtcaaactcattaaaatcgtcgaattcaccatggttcgagaactgtgcggctttctcagttgaagaagctccgaattaggggatcagaagaagatcatccatttcaatgaaatcttccttctcaaacaccagaggagctgaggtgacctcagcgggctctaatgagtcaaaacttgattgcctgttgtattgctgaccgtttggcaagagctgtggggcagaattattcaccaacgtactctgcagctcttattcactattcacctgcaagtacaatcatcaaattagcgagcaaatcacaaggaaaaaaacatgtgcaataaggcctaatccaatagatagatattaaaaccatctttcctcatttaaagagagaactaactgacctgaggaatacatctttgaggaacaccaggtgcattagggattccattgagaagctcatcgatattctntaactgaagaataacaggattaaaaagtcttctcttatgcaca

SEQ ID NO: 5898 - DNA, 736 bp, Arabidopsis thaliana landsberg
ccatgatccacattagtgttcatgggattattgacctatctataatatatgaaactttgaatatgtacagagtttgaaagagtaaagtacaataattcgtgataaaggagtttcttttccttctcgattgtccttgtttttttttctgcatatcttctgggtttcaatattcacaaagtagactgtctggttttggtttcatcaaagcatgatcttgaagaggtactgtgaatcgtgaagcaaactcgtgtattcatctctgttgaagttgtagatactttaggctgagctccggtgatctgtgtcgtgttgacggtgattgttatcccgatttgtggaactgttgccactgaggaaagagagtatgatccgtaggaatctgcaagcttgagaaactagagagcagataccgacgacgcaaccaaccgaagtttcctctgttctactcatggcagcttccaagagaaagcttaaacctttatctatcacccgtcctctgttattgatcgctgaggcggttgcgccgccattctttaatgaagttactagttgccgactacaatataagtcgtatggctgggcaaaatattagtttgattcgatcggatccgttatttggttcgattcaattcgaaaaatcgggatatctatagttttacaaagcaaattaaaaaataaaaaaatttgtttaaagtgaaacaaataactaatactaaaatttaaataagtggatatc

SEQ ID NO: 5899 - DNA, 4739 bp, Arabidopsis thaliana landsberg
  unsure (1)..(4739): unsure at all n locations
cgtacctgagacgacggtgcagtcagtccccgacgtgacttcatcaccgcccgtcgaccaagaggtaccgactgattcccatcccacgtctttcggattcagcctcgacccgcctagcgacttcgctttggcgggcgctctcatagaggcaagtccaaaccctctggggtttcgtatgcggtcaccttgggaccggctgacggacgtctcgacctacgggccctctgggtccgaggaagacgacgagcccagcttctgttgggatttctctggacttggcaaccccagtgccatgcgggacttcatgaccgcatgcgactactgcctttccgactgttccgacggtagccgtagcctcggcgacgaggactgcagcccaagccgcgaatgtttccacgtcgatctagggggtcctccgaagcaaccatctcggcatgccggagacggtgattccctagcccggtgctcgcgttcacatccacgggagctagctgtggtccccgtccaggcggggggtcatgacccacagctcgagcaaatccgcgagatgcaggccaggctcgacgagggagcaggaacacttgagccgatccgccgggacatcgggcaggaatgggcgggccaacctccggccggagaagtgcgtcatctaccctagggtatcctgcaccgcatcgccgacgatgtcagggtaaggccgccacccacttccaatggagtcggccagaacctggctgcagcagcaatacttctccgtgcgatgccggagccatcaaccaccgaggggcggcgtatccagggagagctcaagaatctcctggaggacgccgcggtccgacgggccgaaagctctgcctcccgaaggcaaaggtacccctcggatcatgcgtcgcgacttcccgattcatgcgggaagcctcggtccacaccggcggcacgcgcaacacacgcgtgcggccctgggtcgcctcggcaacgagcaccatcaccgcaaccgtcgggcccacctcgacgagacgttgcccgagctaccaccccaggtgtgggggacgctacgacagcgcggaggatcggagtccttcgcctgaaccacccggtccgcagctttcagccgggccatacgatgggcgccgttcccgacccggttccgaaccccgactactatcacaaagtactcgggcgagacgagaccggaactgtggctcccggactatcggctggcctgccaactgggtgggacggacgatgataatctcatcatccgcaacctccccctgttcctctctgacactgctcgagcctggctggagcacctgcctcccggacagatctccaactgggacgacctggtccaagtttcgccggcaatttccaaggcacgtatgtgtgtcctggaaactcctgggatctccaannagtccgccggcagccgggagagtctctccgggactacatccagcgattctcaaagcagcgcaccgagctgcccaacgtcaccgattcggatgtcatcggcgcgttcctcgccggcaccacctgccgcgacctggtgagcaagttgggtcgcaagacccccaccagggcgagcgagctgatggacatcgccaccaagttcgcctcgagccaggaggcggtcgaggctatcttccgaaaggacaagtagccccagggccacccatcggaagatgctcctgaggcgtcgactcagcgcggcgccaagaagaaaggcaagaagaagtcgcaagcgaaatgcgacgccgccgacgcggaccttgtcgccgccgccgagtacaagaaccctcggaaaccccccagaggtgccaaccttttcgacaagatgctcaaggagccgtgcccctatcatcaggggcccgtcaagcacacccttgaggagtgcgtcgtgcttcggcgccacttccacagggccgggccacccacggagggtggcagggccgcgacgatgacaagaaggaagatcccaagcaggagagttcccgaggtctgcgactgcttcatgatctactgtgggcgggtggcgaacgctcggctcggcaccgcaagcaagagcaccgggaggtctgctcggtaaaggtggcggcgcagtctatctagactggtccgacaagcccatcaccttcaaccaagacgaccaccccgaccgcgtgccgagcccggggaagtacccgctcgttnnnnnnnnnnnnnnnnnnnnnnnnaggtttaccaaggtcctcatggatggaggcagcagcctcaacatcatctacgccgagaccttagggctcttgggggtcgatctgtccgcgatctgggccagtgtagcacctttccacggcataatcccaggcaagtgtgtcctgccccttggacaactcgatttgcctgtctgcttcaaaactccctccaacttccgaaaggaaaccctcacttttgaggtagtcgggttccgagggacctatcacgcggtgttgggaagaccatgctacgccaagttcatggccgtccccaactacacctacctcaagctcaagatgccaggccccaagggaaccatcaccgtcggccccacgtacaaacacgcgttcgaatgcgacgtggagtgcgtggagtacgccgaggccctcgccgaatccgaggccctcatcgccgacctggagagcctctctaaggaggtgccagacgtgaagcgtcacgccggcaacttcgagccagcggagacggttaagtccgtccccctcgaccccagcagcgacgcctccaagcagatccggatcggctccgagctcgatcccaaataggaagcagtgctcgtcgactttctccgcgcgaacgccgacgtcttcgcgtggagtccctcggacatgcccgacataccgagggatgtcgccgagcactcgttggatatccgagccggagcccgacctgtcaagcagcctctgcgccgattcgacgaagaaaagcgcagagcgataggcgaggagatccacaagctaatggcggcagggttcatcaaagaggtattccatcccaaatggcttgccaaccccgtgcttgtgagaaagaaaggagggaaatggcggatgtgtgtagactacactggtctaaacaaagcatgtccgaaggttccctaccctctgcctcgcatcgatcaaatcgtggattccactgctgggtgtgaaaccctgtctttcctcgatacctactcagggtatcaccaaattaggatgaaagagtccgaccagctcgcgacttctttcatcacacctttcggcatgtactgctacattactatgccgtttggtttgaggaatgcgggtgcgacataccaaaggtgcatgaaccacgtgtttggccaacacatcggtcgaacggtcgaggcttacgtcgatgacatcgtagtcaagacgaagaaagcctccgacctcctttccgaccttgaaacgacattccggtgtctcaaggcgaaaggcgtaaaactcaatcccgagatgtgcgttttcggagtcccccgaggcatgctcttggggttcatcgtctccgagcggggcattgaggccaacccggagaaaatcgtggccatcaccaacatggggcccatcaaggacttgaaaggcgtacagagggtcatgggatgtctcgcggctctgagccgcttcatctcacgcctcggcgaaagaggtctgcctctgtaccgcctcttaaggaaggccgagagcttcacttggacccccgaggccgacgaagccctcgggaacctgaaggcgctcctcacgaatgcgcccatcttggtgcccccagctggcggagaagccctcttgatctatgtcaccgcgaccactcaggtagttagcgccgcgattgtggtcgagagacgagaagaggggcatgcattgcccgttcagaggccagtctacttcatcagcgaggtactgtccgagaccaaaatccgctacccacaagttcagaagttgttgtacgcggtgatcctgacgcggtggaagttgcgacactacttcgagtctcatccggtaactatggtgtcatccttccccctgggggagatcatccaatgccaagaggcctcgggtagaatcgcaaagtgggcggtggaaatcatgggcgagacaatctcgttcgcccctcggaaggccatcaagtcccaagtcttggcggacttcgtggctgaatgggtcaacacccagctcccaacagttccgatccagccggaactctgggccatgttcttcgacgggtcgctgatgaagacgggagccggcgcaggcctactcttcatctcgcccctcgggaagcacctacgctacgtgctacgccttcacttcccggcgtccaacaatgtggctgagtacgaagctctggtcaacgggttgcggatcgccatcgagctaggggtcagacgcctcgacgcccgcggtgattcgcagctcgtcatcgaccaagtcatgaagaactcccactgccgcgacccgaagatggaggcctactgcgacgaggttcggcgcctggaagacaagttcttcgggctcgagctcaaccacatcgctcggcgctacaacgaaaccgcagacgagctggctaaaatagcctcggggcgaacgacggtccccccggacgtcttctcctgggatctgcatcaaccctctgtcaagatcgacgacgcgcccgagcccgaggtaccctcggctcagcccgaggcacccccggcacagcccaaggtacaa

SEQ ID NO: 5900 - DNA, 2278 bp, Arabidopsis thaliana landsberg
atctcttaattatttttgtccaacgatcaaatgtgataggaacgttttcccgtaccactgttccaatgtaagatgccatcttaatagacccttcaccataaggttctgaaaggctattgaaatctacatctactatggtatttggatccttggcgatgtcttttatgcatgttggttctcgctgtctcttactctttctctcaacattgccatgatcttcagagaattgtatatctcaccttcaggctcgtcatcaatcagacctttgtcaccatcaataggtgtcacctcaccttcatgctcttcttcgttgtctaattcaacagcaggcgcagcaagaatctatgtttctacctcaagatcttgttgagcgtcacacatattcgacctcatcatctttcttcttaggtcttcttcctctctttttctttctagctcccatttcaaatatcctggataagaagagaaaaaaaacaaaacgttaaaacatatacaatatatatgaaacaatcaattccctatctgtcatttacttaagaaaaacaatacatatgaaactaacaattccctatcagacatttatttaaacaaataatcactaagcatgaaaatgatttataaccacacatatatgcctacacaatcagctctttcattttccgtttcatccaagtcaacacccatgtcaatatttgcagacaaaggactaacgtctccatctccagcttcaaactctttctgactgaatcttctaaaaggacctctcattgcaacatgccagtttgatgactcgtcttcccttgagtaaaacacttgctttgccagagaggctaatatgtaaggatctcttgaaaaactaacttgactatgactcatgttaacaagcgtgaaaccatcttcttcctttactccattacccttcactgcctatttacaccaaaataaaaggacaaaaaatacattgtaccccaacaagataatgtatgttattgccctatagtataataccatatccaccacctttgacgtatccttagcaccagacctacagattgccgtagcctcgtaataaacaccaatattctgactccttctatctactggatattgtgtgaaaccgctgtctatttactatttatcttttatatgtgaaatagctcaaattgccttaagcttactccctcaaattagagatcgtcgttagcacttaagctctcgatgttcacacaataaaattatgatgattctaattaagctagacaaagtgtattaatgtaaaagaaaataaaagaagtaagtgagttgtagatttaagtgattaaagcgtcaggtctaaggaattgtctcggaaaatagataaattgtagatctagctagtattaggattgttatcgcaccggtctcgaactcaaactatgattttagagtaaccagtggcattctgcaaaactctctatacttagagctaagataaccggagaagccgagaaatcctatactaaatcatgcattattatcaagttttattagttcacctagtatctaaaccagagcccttctttgagcctatatgttctttcttaaatgcataggctcatctatgatagttcaaataacaagtacctatggtgggtatacctattatctaatatcaagttctaggtgatcaatctaaaactagcaataagaataatcaagatgaagaactctaagaataatcctaaggggttttcgatctactaatcaatctaaatccctattaactccttaaacccaacaatgtgattactcagacatgataacagaaacacaaatcataatctgaatagtttgcattgatgaattaagaataaaagtaaaggagttcagaatcctctctaaaaggattggattcttctctcaaaatgtgtaacaatctctaaaaacaaaacttaggtctaacaatgaccaaacaattaggtatattcgtgactaaaaacatgcagggactactttgcaaataaggaagatttcagggcttctcaaagactaacgagaattcccttggcagcaataagagtgtcgatcgacacaggtgtggtgtcgatcgacaccatcttctggaaaaacgtccttcacaatcttgattgctgaaaagcttccaaaattccttattgtgctccatagctcccagatgtgtaaatgactcaaaacatacgaaaaagactagaaagactctaaaaaccattcagaaactatgttagaaatcagtaaaaaccaggacatatcaactccccag

SEQ ID NO: 5901 - DNA, 3855 bp, Arabidopsis thaliana landsberg
  unsure (1)..(3855): unsure at all n locations
aatactaacacaatcctctccgtctttcttattttttcatccctctacattagcacgaagatggggggcaagagttttcttgtaacccaagaaagaaaaagtttgcgtaacttgagaaacaacataatgacagagaaggatcttcttttcgacacgatacttgctcgaagctttatcagaaacgagccgaagagacttggctatggagctttcattgcctctcttctctttgtcttcactctttgcactgtctttaaaccttacctcagccctctaccaatcggtatgtcccttaccacgttttccaaaacgtcagagaacgcagaagcactcattaataataacgtttatctttctttgttcagtggagatgcaattatcagtggacgctggtctcagaatgctgagaataacagaaccgcaagcattaaggagcagcaacgatgaaacatccgcagattcagataaactcattatcccaacgaatcaagataatgttacatcaagtgaaattattactcagagcctaacaagttctgaggatcataaactcaacgacacaagcatgccaaagaattatcttgattcgtttaattatactaccaacactacaatctccaaagaagaagttatttcaggtcaatatacttcaaattattctctacaattgtcttcaagttgttatggtttttagtcaatttattgatattttgtcttgaaattgttatggtttagtcaatttattgataattttgtcttttgggtgaattttcagatgaaaataaattggagaaaactatgaaacctatatgcaccaagctagcaagaacagagttctgtgaattaaacggcgacgtaagagtccacggtaagtccgcgactgtttctgctgcgatcacgtttgcgttttcgggaaattccacgtggcatataagaccttacgcgcgaaaaggtgacacggtggcaatgaagcgcgtgcgagaatggacggtgaaattggaacaaaacgctgaccaattagaaaacgctaatttctcgcgttgcgttaggaatcacagcgttccggcgatgattttctctctcggaggctactcgatgaacaatttccacgatttcaccgatatagtgattcctctgtacacgacggcgcgtcgattcaacggagaagtacagtttctcgtgacgaacaagagtccatcgtggatcaacaaatttaaggaattagtgaggaaactctctaattacgaagtgatttacatcgacgaagaagacgaaacgcattgtttcagcagcgtcaccgtcggtctcactcgccaccgtgagtatttcaaagagttgacgatcgatccttcgaattcggagtattcaatgtccgatttccggagttttctaagagacacctactcgttgagaaacgacgccgtggctacgagacagatccggcggcggaggccacggattctgattttggctagaggcagatcgcgagcgttcgtaaacaccggcgaaatcgcgagagcggcgagacagatcggattcaaagtcgtggtggcggaagcgaacaccggaatcgtgaaattcgcgcaaacggtgaattcctgcgacgtgatgctcggcgttcacggcgcggggctgacgaacatggtgttcttgccggagaacgcggtggtgattcaggttcttccgatcggtggattcgagtggcttgcgaaaacggattttgagaaaccttcggagggaatgaatctgaggtacttggagtacaagatcgcggtggaggagagcacgctggtgaagaagtacggacgcgaccacgaaatcgtgagagatccatcggcggttgcaaaacacgggtgggaaatgttcaaatcggtttatttggtacaacagaacgtgagtattgatataaaccggttcaagccggttcttgtcaaggctcttgagttattgtagagagcctagaggcagtcgatgtaaatcatatatttaccgcatccatatactgtaaattcttgtagttggaatgttggatcgtaatattgttatcataaaacaattatatttttatcgaaatttctgaactgtcagttattattctgatgaggctcaatcgactaaccagagtaaaccgatatcgattagaaaaagaattatgtggcttacactaaattttatgtaactttttacagttttttggtcagctttaatctgttttgaatagcttttcccccatttaacggatatttttgtcatgctttctttccttctcttattttggttgcaaattaaattgcatgttttaatgatttctataattttgatatggagctaaatgactcatcactaactcaatatgaagcaaataaagaaaaaactcccaagacttcttctccttccttaaactctaccaatataagatcgaaccactttgaacatgctctagctagttctcttctttaaaccagtaccctttatattcattctcaataactaaaacgttatagtgacaaaaaaaaaacagataatatcgtaaaacaaattcttaaatacctcacataatcctctcgctctcccacctagcttgaccttcatatctctacattagccagtaaactctgattatagagtttcttgctgaagaagaaagaaaagttttgtgtaacttaagagtcaagagatgacaaagaaggatattctttacgatacagtacttgctcgtagttttagcaaaactgatcagaagagactttgctttggagctttcattgcctctcttctcttggtcttcactctttgcactgtcgttaaaccttatctcagccctttaccaatcggtaagtctcttaccacgatttgccgaaaagccagataacgcaaaaacaatcattttaacgtgtatctctttctttctttcttcagtggagttacagttatcagttggcactggtctaaggatgctgagtataacagaattaactaccaacactacaatctccaaagaagaagttatttcaggtcaatatacttcagaattttctctacaattgtcttgttatggtttttagtcattttctgtatagtatgatacagtttgttcttttgattttgtcctgactgaatcttcagagtgcaataaaatggagaaacctatctgtcactgtaacacactaggaagcaaagagttttgcgatgtaagcggcgacgtaagaatccatggtaaatccgcaactgttcttgcggcggtcacgtttgcgttttccgggaattccacgtggtatatgagaccttatgcgagaaaagaccaagttcctgccatgaaacgcgtgagagaatggacggtgaaattagtacaaaacgctagtttatcacgctgcgttaggaatcacagcgttccggcgattcttttctctctcggaggcttctcgttaaacaatttccatgatttcacggacatcgtgattcctctgtacacgacggcgcgtagattcagcggtgaagttcagttcctcgtgacgaacaagaatccgttatggattaacaaatttaaggaattagtgaggaaactctctaattacgaagtgatttacatcgacgaagaagacgaaacgcattgtttcagcagcgtcatcgttnnnnnnnnnnnnnnnnnnnnntatgacaaagagctaacgactgatccttcgaattcggagtattcaatgtccgatttccggaaattcctcagagacacctactcgttgagaaactccgccgtggctacgaggcggaagccacggattctgattttgtctaggagcagatcgcgagcgtttatgaacgcgggtgaaatcgctagagcggcgaagacaaatcgga

SEQ ID NO: 5902 - DNA, 1168 bp, Arabidopsis thaliana landsberg
cttggtgactcccaaaatatagctgtggtaaacaaacattcgttaatcttccttttgtttatcaatggtccattacttatgcttaaacacaggactgaaaacgtatgcagaatctcatatggtgttcctcgtcctgaatgtgatagtcctggtctaagtagctctcaggttcaagccatttctaaccacgtctcaaaggtgaaatctgacaaggttattgactacatcaagagggaatacaacatcagtcacgtcaccattcagattgaacgccaacgatgcttttgagggggcttgtatatgaatgaatgatcaaatatcaaaatcctatttctctacatatatttttattgcttacctatttccacttttagtttttgtttgaatgagacttttattttattttagactttaacctaagaaaaattagattacgtattcactactctactgataaacaattaaaggtaaagaaatagtaaattcgtttttgttacaaaatggaaataactaaccaccaaggaaataaagaggaaaaattaagtaagagatgtgagaggaggagacgcaacaaaagaacttcccctccgagaagaatggtgaacctacaaatgaacacctaggtcatttttacaaaacaaaaaaccatgaagctttcttgttttgttttttcattttctggttccttaaaattaccatttcaaaggcatctacaagttcttttcttggtcagaaataaacacaagattaagatgggggagaagaaaaaagaggtgatcagattagagagagaagctgtgatcccaattctaaagcacaaactcatcactgccttgtcccttcactttggtctcatttttctacttttcattgtttctctgtttctacattcctctgtttctcctctttaaaacaattctacattctgatcgttcaccagaggacaaatgggagagagaagagttcctgagattttgccaaagagtggaatgcaccattagagcttggtaccaccttcactttgaggatcttatggtatattcatctcaccaatctatcttcttcaattctttcttgagatcatattagtaaaagagcttgtgtttgtagcaactgtattcactcttcgagcccgtccgtggtgcacacaggcttaaccaacagaatt

SEQ ID NO: 5903 - DNA, 2783 bp, Arabidopsis thaliana landsberg
  unsure (1)..(2783): unsure at all n locations
tggtactttacaggagacatctcatttgaaaagcaaggaggctgtaacgctcgcgatccttattaggatcgttggctgggacttggtccgaggaaaaaaggtggagtctcggacaagttgggaaggagctggccataagctcggacaaagggatatcatgcagactaagctaggatcgtaagagaatcagcagggtcagctcatccgaagctcaagctcagctggaatgagtgaaggttacttgggtcaagtgatagtccagttcgggcagctagatgagtgacggttgagctcgaggtagctggtcgactgtccgaccagctaggcgtttatggggacggttacttgaacggttatggtcgaacggttgctcgcccaaaggatggataagggcgagcagttacgggcggagagattcaacttttcggaaaggtgcaaggaacggatgtgatgcttcgggaagcatcccatcgtaccctatataagggagggcgtccaagacctttggaatcaccacaacacacagaaaacaccaaaactcaccattaaactctcgccctcttgggagaataaatcgtcgaaggaatcggtagccggactatggccggcgaaggagaagaagggctcggcataactgaaaatcgtgaaggaaggtaaggaatcctagactttgagagtaaggattctaggatgcgatataggagtcgggatccttgaaaggatcgactagagggcttggtagtattcgggtcatgtgcaacctacnnnnnnnnnnnnnnnnnnnnnnnntcggctgaggcggggatgcggctcggcggaggattggcgggtcttagagatcattgcaatcttccccactctgattcctctctgcggatcgagtagtgtaaggattagagagcattgcatggacttgcatattactaagtgaacgagagtacttatggctctatgactttcaggaactaacggtgattgtgggaaggacttggcttagccgcgagagactcaaggccgggataatgggtggtgatagttcggatagtttagggatcgattatatgacttgtaatagcttatatgcaaactcataggttgtatcgaatccttttcttaatcaataaagtatccgattgtttgtttactctattcgtctcatatattgaatcacggaatcatatgaaacggattagactaggaaagaacctcataaacggtcagggccgagtcacttagtggcttgggtcgagagaactcgcccggactttaggcagtccggatcggggcctttcaaaaatgttacttatatgacttgcgtttaaattatattttttgggttccctatatagtatcttagggtttagattttataattaaacgagttaaaatattggtttgggtttacaaaaattagggtttagattttgtaagtaaacaagattatatatcggtttggatttatagaaaaatggttaaggtttaaattttataattaaatgattttaaaaattaattatttcttagttgaaataatttgattggctagaataaaaaatagtgaatataaaaacacaaaatattgttctttgtgattatactgttacattaatgttatactatatgcatttaaacgaaattgtttgttttgattgatattgcttataagggtgttttcattggccaaagcacagtatttgaaattgtaatactatttgatattgcttctctggtttcttgtctatactatttcagttttcagaataccaaatctttttacttacaactacttttctattttgtaaatattggttcattttaaaaaattcaaaccatgacataatcagaaaaaatctaattttttaaaaataaagtttagaatcggaatcagtttattttaaagagattttttagcaagaatatgtaatggggtgtacaaataattatatccaaaaataataaaaaataaaaataaatggaattaacccatctattgtacgttcacaacgtgagcgtgagcatgtctaaagccttccaaataaggagtttgtggacatttcatctcatctgtatgttacttacttaattttagattttatggtgctatatccttaaataatttatgaaaataggttacttttgcaattcacactgacaattaactgagtttggtgcaaaaaaaaaaactgagttttattttcccggtataagtgaagacccgaagatctggtctaaaccggagaaatttgagccgaaccggtttataacaagacgccgatttaaccggagttgctggagttaagatgattccgttcggaattggccgtcggatttgcccgaggcttggaacgacaaattggtgttcacggtggtgatgaagaatccgttgacataaaaaaatgttttcgatcgtatcatcatcttcttcttcaccactcgtcaactcaactctcaatttccaaaattcgccgaaatctccggtctccgttatgtcgacgacgtctaaattcaaaaatctcacggagaatttcaccgtgagagtgcttaaagcagagaatcgcgaactaaacgtgcctctgctctcacctttcactatcgcttcttcacggcttgaatcagtcagtaatgttgcgattcggattgagctcagcgatggatttgtgggttggggagaagctccgattttgccgtcggtaacggaggaggatcagataacggctatggtaaaagcgcgggaagcttgtgagtttctgagagagttacgggagatgaaactcggtaatgtt

SEQ ID NO: 5904 - DNA, 4267 bp, Arabidopsis thaliana landsberg
tagcccatacgaattacagctgagatcttgatcagtcttgctgctgtgcattccgttttccttggtagcctcaaaccacagcttgttgtgcatcccggattcttataatatggtcccttgactgaggattgcttaccaggagttactggtctagtgtttgcattgaaccgttttgttcctgtagctgacatatcaagagagagtgagaacaaacttgaggagagtaagggattatatttatagggattgatgctgaacaagttgcctataagagttcaggtagagaccagagaagccatgattcttaataatgtatcaataatgacatgttaacacttaaagcaatgattactgtagacattcaaaacatatacaaataaaatataagcaggtaggttcaatttcatacttactttagatactttatgtcaaaaggattgtaataactaacagatctaaagatatcagaaacttaaacgccgaaatttggaaagcaaaggcagccatagagcaaaagaaaaagactgtttttagtttttctacatttccattagggaaagtaagtataagatggtccgcagaggtaataaaaccatttgtttaagcgataaaggttctttctttaaagcaacctttcggtattgttcctatttgatgatcactcaggtgtgtgcacagaagaaatgtgaacaaattcttttgactcctggagaggctgagataaactaacctttatatattgcagataccttacttgagacttgaggctacacaaaagtagagaaaaaaagagagaataagaagaacgaagtcaatggtgggcacaagaatatcagcaaggaaataataaccaagcaacttcatgacatacatagacatcaaagtctagagggtaatttgttacatgtgagaacattccattgagatcagaccaatgagtgatgactactcggtagttagatgctaatggaagttgattggcattatatggcaggttccaaattaatccaatcacgtcttagagaggaaagtgagaagctttaacataccattctaaccatagacctcaaagatatcttaatttgagacatgacgaccattagttccaataactcacgagtaaaatcactgaactttctagatcatgatcaactctgttgaactttaaactataagacaggaacatttacacacttgatgggtattcgataacatgcagagacaagtaagaaaattgaaactcacattgttgatcttttaagcattattcacaagcaaaacctctccacctaaactcagattttgatgcaagaaccctctaacttcatcatcatctctaaacagctgcggcacaacgagatcactatccaaattataccaaacaccattgatttttctaacaacaacccaatgcctacttctccaaagtccaccatatctcttaacaggaacattcaacacaatacccattaaagtatctgcatcatcaagatcaatcgaagaagctccaatacgcttatcatgccaaacaacactcttgccttttccttcaagagctgtaatcatcacgtttacgtcgtagttaccagtgattgtattgtggtgaggcttgaggacgaaagagagaggtgtccatgtttctttgtttggatcattggtctcgagcttctctgcgattgagttcaagctttctttagtgaatgcgtctttgtcctaaatcaaacgagatcactatcaaaaactctcaaatcggtgattcggaggatgaaattttgagattgaaatagaaattggatcaatcacctgaaatagattgttgaggcagtgcaagaggcaaaattgtaatcgttgtcgttcgtgatagattttagattcggaatccgccattttcgggagaattatagtgacgaaaattagggattagattgagagaaactaagcaagggcttggattggagtattctagcaatcgacacggtaagactttttttctcaattttcagatgaagaagacgacggtatcggatgagtattaaactacgtgtcgttttttagtattttgaacataacatacatgctgtttttttctttaccagtcacaaagcctacgatcaaacataacaacgcccaggatttccaaaggaaacagtgtgccatctctgatctcttctctctctcactgcttttacatgaggttattaactgatcaaactgaaaatggtgaaggaagaggctcacaagcggccccaacgttacagacacatgatatagaaatagttcacatctctcatggttgatttagcagaaacattaaccatatgaaaccaaagcatgtcaaacacaggagctggtcaaatgagaaaccttcaaaactctatgtaacgtgtctaaatattggtattccagagtttcaggctcttgataattgtgtgatctcatatagcaggaaaatgagtacagaatgtgtaaccttttgatctttccggctcgaaaagctttctttcgcatttggtaaggtcgttttacttatgttctactgcaatatatcataatcttttacgtgttgactcgcacatttgtgtaaataaaagctgaacaatgagaattacagtggatcagtttcatgagcttcactttccctacacctgcccagtatgctttgctcaaagtgaacaactgatcatcccattatgtaaacaaacgagtataagttgaaaacatgatcataagttttaaaaatctgatttgtgcgagcagagtaatttcagcttatgccccaaaggtgcaaatgcatttttatcaatctggatgattttttgattgaattattccctactgttagtgacttagtgcatcagttaaagacttcttttatggatgtaagccaattaagctaaatctcttagctcataagaaactaactgttgaaaaccgtggaacgagactcgagcggcaacagtagcttcttctcctttagaaagctacaggaaaaaaaaaaaactgcacactccctgcgcaggcattaccctgttcaggttcaaagggactttctcagcctggtcccggatagcccgccttttcgcaggctatcctggttcaagcacccctggtgcttttgcatgtcaattcaccaaccaaatcacacaaaaaagtattgaaacatcaacttagattgcctttattgctggctctgactcaaatgaacaggcaacataagtcgttctaaaagtaacatgacatagagactactaagcttaccaacagtttgtgcctttatccaggtatagtccaacaggcaccaagacttgggtaagcaaggtcttgtttaaaacatttgcctgatgcagcagaagaaaaagaaacacgatgaaaaacaaagatcacagtaaggactcatttaagagttgaccatatgttgcagatttaagaaaagattataaacctgaatgattttatactagcatgccgtaactaacatgtttgttgagaaagcaacgactaacagtctaaacatactgaccttttatttctgagcagctttgacatagctctctggcaaatagatttctccacctacttcaccgtgctgttctccgctaatggttttctttgcgatgttgaattcttcactcatagcatccattccttgtctgattgcttcttcagcactgccataaccattctcctctgcatactttcggatgtcttctgttatcttcatagagcagaattttggtccacacatggagcaaaagtgtgcaaccttggctccatcagctggaagagtctcatcatggaaagacatagcagtcatggggtccaacgacagagcaaattggtccatccatctaaactcaaaccgcgctttgctcagcgcatcgtcccatgcctgagcatgtggatgctgtttggctagatcagctgcatgagcggcgatcttgtatgctataaccccggccttcacatcgtccctgtttggtagcccaaggtgttcttttggtgttacatagcaaagaagagctgtacccaaggctccaatattggcagctccaatggcagaggtaatgtgatcatatccaggggcaatatcagtagtcaaaggaccaagggtgtagaatggtgcctcgttacaccactccaactgcttctgcatattctctggaatcttgtgcattgggacatgccctggcccttcattcatcacctggaaaagtagatataagtagttgtatccaaagacaaactggatgaatataagtgaattaga

SEQ ID NO: 5905 - DNA, 5389 bp, Arabidopsis thaliana landsberg
ctcctttgaacgattactgagtttctcaccttgagcaaagattcatttatggagtcctcccgatactctatccttgttttgtataattagagagaaaactaatttttgttctgtaattatctagggatgcttgtaagagctttggagttggagtgggatgtgctgtctgaagaaatcggtttctggttacctgctgaggttaccaatgtagaacatgatgataaacctgaaggagaggaagagcctggtaatgttttcaaaattttctacattcttgatctctgcttttgcatttatttgggtggaaaagtgtggtgacactggcgaattcaaatctcatgaagttgtgcattttttccgtagaggaaatattggcaggcagaccagtgccagctgtatgtaatgcagagcttcacacagattatggtggtgctgcagtgagatgggggcttacacatcataaagagagtgcagctgattgttgccaggcttgcttagaccaggcaaagcgtgcgaaacctggagaaacgagatgcaatatttgggtttattgcccatctgagtttggttgtttctctccagatatttatgagcataaacatcaggagtgttggcttaaatacgtaagaacttacctcgtacacatactactttacccaattttcagtttccttgagattactcgtccaagttggactggaagcttggctcatatccaatatgtctatgtgaattgcaggcagagaagccaaaacagaatttcaaagacagatattctgagacatacagaaacaaccacccaaaagcgccatctatcgttccatgggtttcaggtgttgtaacggcttgagcaaaacccatgtggacagattgatgggagaaataggagatagttttggttttttttttctcagctgtgttaccattttcagagtcttgaaaattggagtaccgtaccaaagatgcaaacatcttttggccagatgtatacgagggaatagaatgttttgttgtttttgttgattggctttaaacacttgtggtcgaagtcgaatatggtgtaaggaatcatgtttttgttcaagcttgttcgattctatagtggatgattaaaaagctatctataaacatgacgaatgtctgtctcctgttatatgatcagatcaaatgtttatgtctggtctgtaattatgtcacaaaacatcacagtaaaactctgaaatgaaataatggttgaaatataggaactaaaaaaaacaaagcagaaattacggagggaaaagagaaaacagaggtgtgtgttcatcttttgcttccggggttgtctctattctaaatatagactttccaattgtgtacctctcttttcttgtcttcttaatcagaaaatcaataattctcttctactttcttcatttttccctttctcttgtaagtctctcttttcattgattctttctattggtggcgagcttcgttcaatcgttttagcatttctcttgtaagtttcggccttgctttcctccgatggaggatttgaaaacaacagacgcactatctcttccagttgttagtgataatggtggaataatagagcctgagttgcagctacctcaagcaataccaacagaacttgagaataatgaagaagaaaatgggacaattcaacaatctcaaagtgaagaagattccgcagaaaatgggaaaatttatatggatgacacttttttaccttcaaaatctcaagtagaagaaacacaagattctcctactactcctagttttgtgtctccctctgctgagattgttctgcctcgcgtaaacaccaagtatgaagcagagggcacaacaagaaatgcagtgtctccaagacctttgtattcccctagaagcattggatctccaagagcactactgtctccaaggtttgcaggatcatcatcaccattgagcaatggaacacccataagtatggattctttcagagactcaattgatacagcatcaccttttgaatctgtcaaagaagctgtctccaaatttgggggaataactgattggaaggcacatagaatgaaagtattagaggtacattttacttatgttatgtctacacatctgtcttttttgcctctgtattggccaatagttgtgctcactgttttcgttgcagcgacgcaattttgtggaacaagagctcgacaagatccaggaggagattcctgagtacaaaaagaaatcagagatggtcgagatgtcaaaaatgctagcggttgaggagctagagagtacaaagaggctcatagaagaattgaagcttaatcttgagaaagctgaaacagaagaacaacaggcaaagcaagactctgagcttgccaagctgagagttcaagagatggaacaaggaattgctgatgaagctagtgttgcatctaaagcacagcttgaagtcgctcaagcaagacatacatctgcaatttcagaattggaatctgtcaaggaagagctacaaactctgcaaaacgagtatgacgccttggtaaaagagaaagatttggctgtgaaggaagctgaagaagcggttattgcttcaaagaagttgagaggaaagttgaagaactcactatagagttgatagctacaaaggagtcattggaatgtgcacattcttctcatttggaggcggaagaaacataggattggagctgccatgttgcgtgatcaggagactcaccggtgggagaaggaactaaagcaagcagaggaagaactacaaagacttaagcaacatttagtttctacaaaggaattacaagtgaaacttgaatttgcatcagccttgctgcttgatttgaagaaagaattggcagatcataaagaatcatccaaggtaaaggaggaaacgagtgagacagtagtaacaaacattgagatttcattacaggaaaaaactacagatatacaaaaagctgttgcttctgcaaagaaagaactcgaagaagtgaacgcgaatgtggagaaagcaacttctgaagtgaattgcttaaaggttgcatcctcttccttgagattggaaattgataaggagaaatcagcacttgactcattaaaacaaagagaagggatggcatcggtaacggttgcttctctagaagctgagatcgacataacgaggtgcgaaatagctttggttaagtccaaggaaaaagaaactagagaggaaatggtggagctaccaaagcaactgcaacaagcaagtcaagaggcagatgaagcgaaatcattcgctgaacttgctcgtgaagagctgcggaagtctcaagaagaagcagagcaagcaaaggctggagcaagtacaatggagagcagattatttgcagctcagaaagaaattgaggctattaaagcttcagagaggctggcattagctgccatcaaggccttgcaagagagtgaatctagttcaaaggaaaacgctgttgattctccgaggactgtaacactgacaatagaagagtactatgagcttagcaagcgtgctcacgaggctgaagaagccgccaatgcaagagttgcagcagcggtttctgaggttggagaagccaaagaaacagaaaagagaagcttggagaagttggaagaagtaaacaaagagatggttgagagaaaggcaacacttgcaggagcaatggagaaggctgagaaggctaaagaagggaagttgggtgtagaacaagagctgagaaaatggagggaagtaagtgaaaaaaagagaaagaatggtagtagccatggaaaaagcattcaagggtcgaaggagaaagaagctgagactagtgtatctaacgaaacagaaacaaacccaatcccacaggtaaatcctgtaaagaaaaagaagaaacttttcccaagattttttatgttcttgatgaagaaaaagtcacataagtgagttcgatgtgaagaagtcgattgtgtaaaattctataaatatttaatctatactattaacttagagctaaagcttccttagtttcaaagatgtctggaacaatacatgaacccaacaagatcaatgtttgtttctgtcatgagttagtcaatgaatcagagaatacacatttgttgaacactaactttggcgtaaattagcgtccttgaataaaagctaagaagaaattgaataagctttcttcatgatacatcttcaaacatatcttcattcaaatgaaaacgaaaaaataaaacgtctacaatacgaccaaacatcttaaaagtcaaagccagaccaaagtaatttagcaacattgctaggtgtcttatctctgaatctaacatcgttctaagagccagaacattgtaatttcacatggttacaaatagactagaattcaaatgaaaataactagtggtccggtccatcacttgcttgtttcatcgcttgctggataagctgaaagagctgactttcataggcgttgcaatgaccaaaggcgcttcaggtgaaccagagattgcaaagttgtcattcatgaagcgactgtccactatagattcatttcgaaggactatcttgtagcagtagcatttcttcagcccttcctgatcatggtagcattcatgagatccattcttcacctgctgaaagttccatatcacactgaacttgccaacagttgctaccacatgacgctcctgtttcccatcctccgtgacctatatatcgaaattttcaacaagaaaagatagacaaaaagagtcaggaatcaactattagtaaaaagttatttcaattgatgaatgattcaacagtagtaaaagttcctctatcaaaaatcaaggttgaaacacaaggcaactgaggaacattataattcaatttccacaaaaattcttaagacttcaatattatatgcacttatgctatgagcaaaacatgaaaatttcaagaatgtcactttctcagcaagaatatacactgcaactagagttctgcttacccaagaaaactgagcattgcggaacttgttgtcagatccagctaaatgtgcatcaagaggcctcaacttaagcaaccttggtgcggcaatcttatttcccatgcgaccctcgaagccggtctttgttttgccacttttgtcagtgaaaagggtacagataacaatcaaatatgtgtcagttgtaccaacaatccatttcccatcgaatgtagcatccacatgagtaacaggtgcaccaagtccagggaaagccgtctttgcctgcctcatagtgttgctcgagtagagtctaattttgccatcaagagagccaacaacaattgaaccatcaccagtagttgcaaagcactgaaaagtagtccctctagaaaactgatgcccctgtgccc

SEQ ID NO: 5906 - DNA, 3632 bp, Arabidopsis thaliana landsberg
tcttcaatcaccactatctcttgaagagttggaacatcttgttgcattttcaccaccgtgaatgtactctttcatccctggtgtggtgtaaaccatgtcgaagtcacctgtcatgaacttcactggaacttgaatcttagctccggtccatggtgcagtgagctcccaattcctgatatattaaccaataacaaattaacccaaaccctaaaatacgcattcatatactaagaacttacagatccatggctctgtagtagttcaatccaccggttaatcctgccttctcgaatttggagacatagaaatcgagatctttcttagaaaaccattcaggcaattcaatgttttcgctattagggttaggttttcccccaaagggattatccttaggtaaaatcggcggaccgagtgtcctccctgtgaagaggttcctcagaaatattcttggatctgcacttgcaatctctccttcaatcttccccggttcctgcaaattcacattgtttaaacaaaattgaaattatattggacataaccaaacaatgtcaattgaatggttttattttattggttaagagattattggtcgtcgatgttacttgattagtacggtcggttaataaagaaagatcaagatgcaaaacctgaaatctacaaatgtagtaatcatctccaaatacagccttgaacccttgaacgggcttgactttagggtttcttgatctatacggcacactcaaacacacaaagccgttaatcttttcaggtcgaaacaaacagagaaaccatccgataatggctccccaatcatgaccgaccagaaacaccttctcttgatttccagcaacagtgtccagaagagctacgaggtccccaacgacgttaagacacgtgtactcggagaaagactccggcgaatcagagtctccgtagcctcggaggtctggagctacagcgcggtaacctagagatgataacccactaatctggtgacgccacgtgtaccagagatcagggaatccatggaggagaagcaccacaggtccttctttgggacctttctcggcaatgtgcattgttatgccattgacactcaccattctatgatcgattccttccatttctcctttctttttttttgttggatagatgaatgtgtttttactttttaagatgtgtgatggaatcaatttggaagtgatataaatagagaatccaaagggaagttacttttaatattacttctatttacctatctagcatgaatactagttttaaatggtaggataagttggtggaaaattgattgaaacccagcacaaaaataaatatcaaacacaatatgtaaaagacaattataacgctgcttttatttagttttcaaaactaataaacagatggatgtatatctataatgttgagcttgccaattggtgaagacgagtaaccatttggaggtaaagagaagtaaatgtagactagtgggtagttgcgattgtgtgcatgcatatattgggaaccacctttcttttattgcctcaaactttatgataacaaataggagtatatatttagaattttagatcttcagatatttatttagagttaaaaagaacttttttctgatcaacgttttctaagaaatataaaacctaatagcaacggatttcgaaagtacacatatgcaaatttaatggctagatttcggattcgaacttggggtaaaagaatctctaacttttccaatggacgtatagaataagatgatttggctatagcttacaagatgagagggtggagctaaaatgaatgcagagaagtaaatgaggttagttgtaactactttcttttactacctttcactatttctgcttcttctatttccaactttctcttttcataaacttgtcccaattcatatataaatattatatattgagggttgtgtcaataatttatataagaatattaatttcgtataggaaattgttagtactagaggacacatgaaattctttggaacagctcgcgcatagtaatgaactaatttctacatataaatgagtttacaagatgcactagttaataataatagatttataaacagcattttaatatactgatatattaaacatgagtttacaaagctaaacattaatgtcaacaatttggaagaccaataatcctgaagtcctcaaggttgtgcaaatatttttgttcctttcaggttttgcttgaattagagtaaagaaaaaacacattttatgccatcttaatcaatcttttaggtaaacattgaaaaaaacgaaccagagctctccgttgaagccaccataattgaactttctggggaagccgtctctgttgaagcctccgtaaatgaactttccggggaagccgtctccgttgaagaagacaccttaatcgaactttccggagaagctgtccccgtgtaagccatgctaattgaactttccggggaagctgctggggaagctgttggagcaattgagtcagcgccacttgtatccgtgaaggtggagaaacctggagcagcagctgagacgcttggggtggtggttgcagcggccgggttcccagccaaaaggcctgtagtgtacggaacacctttgcctggaatccagtcgtcaccttggatgtactgagccggtgtgaacttgaggatatcttcttcgctcaatgtcttgattccagcccaagtaacccggtttgcaagggcagaccccggtcctgtgttttggacctcagagtagaacaatgtcttgaggccgaagtccccgagccatggttgccatccttgtggctgaacaaaatctgggatgaaagtgttcatgatgatagtccttgaatattccttccatggcctaccgagataggctttgctggtttccttgacagccaagtaatctggttcaccggcaatggtgcacccttggaacacaaatccagtggattcccttgggtcttttcgaccgtgggctgtgatagggcatgcttggtttgggagtggcttcctcaccaacaacgtacagttttggaatacagcagccgcatctccaaagaggaaatcaatggtgcctgaaatggtacaatcacggaagaactgacggtgggagtgagtgtagagcgtgtcttggtagccatcgaatctacagttgaaaaatatggactcatctgattgaaccctaactgcaaccgcttgatgttttattgccccagcggtgttttcgaacccaatgttcttggcaatgaagtagtttccaacaatggctgcaataaacattacattcatcattttacatagatgacttctaagactttgtaatctaacgagtaaaaatcctcaaaatatatatcttaccgacagtggcggtacggtaggtggtgataccatccttgtaatttttgttgccggaaatgatagttttgtcgggaccgtcaccgatgaacacaagatgcgacatggtcttgttcacctgaacatactccttgtagagtccagccttaatgtgaaccacgaaagttgtgttcctcttcttggggacaaactgcaacgcttcattgatcgtcttgtattgaccgctcccgtcctgtgccaccacaatatc

SEQ ID NO: 5907 - DNA, 778 bp, Arabidopsis thaliana landsberg
tcgacttcacacttcgctctccggcaacaccacgctctctagcaacacgtgatgtgacagagcttgagctcattgttagagtgagaatgtaaaagaaaaagaagagatttggaaaatttagggtttgagattctaaaattaaattgagggtttcagaggcttgttttgtttttaaagagacgaagtcgtttaggtttaacggtgcccgttaacgaagtattaactccgtttctcgtgtactaacagagacttaacgcgataacttatttgtctcggtcaacaaaactttggtattttttggagaggttaaccaaaagtatgtgattaaaacaacgtctcgtgagttggcgagtttttcgtctcttttttgaaagttggcgatttttctgacatttttccttttttttaaagtaataataaagtgttactcttttgtgactaatgtttatgagtcacaactatatttctatgaatttaaagcttattaactaaataaaatctatgtataatgttatagtcatgtaaattacgatactaaacaagataaatcagtttaatgagaaagaaaagaaatgtaagaataattagaaatttagaaattataagtatcatcacatataatcgttacgtaagtttaggaattttgtttaaaacattaaaaactttaaagggattttttggcattgtaatgattttgtagatatagtagttaaaatcaatttagaactccttgaaaccttttctttttttttgcgccaccccctttgaaactttaacc

SEQ ID NO: 5908 - DNA, 963 bp, Arabidopsis thaliana landsberg
atccctacttcaaatattcaatattataccaaaatatttcctaaagaaatttttttttattaattttattttaaacaaaattaaataattcaaaaaatataaataaaataaaaaataaaaaattatgttaaaatgaatagaaaattaaaaaaaaattatagtattttttgcattactatatgtcaatatataactatttaaatgattacttaacctaaaactacattaaacaatcgatagaaacaaacctatgtgtagcagcagctaataacctagttaaatcaaaatcctaattatatagagtcgactctctctcgagagcttttggcacctgagagtgttgctgacgtggcactaggtgactggctgaataattctctggagagcttttggcacctgagaattttctcttttagggttagggattggtttctaatcgatttgggaatcgatttgggaatttttagcagactgtgaatcaaagacgtttctctcgtttttggctcgttttgtttgtgaatcaaacgaagtcgtgtaggtttaacgatgtccgttaatagagtattaaccccgtttctcgcgtactaacagagacttaacgcgatgattaatttggctcggtcaacaaaacttttgtattttttggagaagtcaaccaaaagtatgtgatataaacgacgtctcatgagttggagattttttcgtcccatttttgaaagttgggaatttttctgacattttttccaaatataaataaacgcgtgacagtggcatttgcaaaaaaaattcccggactttctctcttctggcgatcatcatcatctcaaacgctaattgaatccatcatcatctttaattcttctgtgtccccaccgccaccaaaagctcggtcgcgctatagtagtcaggaaacaacattggcgatgggaagaacggttaaggatgtctcgtcgcatgagttcg

SEQ ID NO: 5909 - DNA, 771 bp, Arabidopsis thaliana landsberg
taagcaagggaaatatgtcagaaaaatcgccaactttcaaaaatgggacgaaaatatctccaactccgaaaacgtcgttttaatcacaaacttttggttgacttttccagaaaatacaaaagtttggttgacttggccaaattagtcatcacattaagtctccgttaggacgacgattacagggttaataagccgttaagggcttccgtcttagcaaaacgacatcgtttctataatgacaaaatgagccataattgatagaaacgtcgtcgttttgattcagagagatttgagaaattcccaaatcgattagaaaccctaaaagagagaaaattctgaaattctctcaatctctttccaattgatcccgatggcgaagacgcggggaggaaactggaatcctcgtcggtcgcggaggctaatggctgttgcaggcgaagctaacagagcaaacataacgaatcgaccaccgaaagttgttgagatctcagaagaactggagacaaatcaaaacccagaagaaaccgcgatgaatcagatcccagaagaaactgcgacgaatcgaaacccagaagaaactgcgacgaatcgaaacccagaagacaatgtgggtgggactgttggtgaagacaatgttggtgaagacgatatggatggaggtctagaggaggaaaattgtgatgattttgaagcagaatttggtgttggtcaagagaagatggagatcaagcgacactgatgctgacagtggaggtacagattgtgatccca

SEQ ID NO: 5910 - DNA, 1786 bp, Arabidopsis thaliana landsberg
gaatccatcaccatcctggcgacgtgggcatatattgtagattacctaatggaaaactgatcatgaaaaaagatatacaatatataattaaggacctttcttgttttgatagatcatgggtggacttaactagtttagtgtaatgtaatactaactctcttctcctgctctccaattgacctactattacaaacactacaaacccctaagtcaagacaaatgtgaaacaacaaacgaaggaaaaaaaaatagacaaagcaaaactctgatctaaaaccaaaattagttttatctactattttcctcgatattacttaccttaaaacaattgaccaaactatttgacttttcaccttttttttttcttcgacaaaaccaataaaagatttgttaaaaatggataaaaaagacaacaaaagtaaattgattgcaagccacattgtgtacttcttattttagcttgagattaggattattttacggatccagattatcttcaaagtactctacttttccctcctcttttcttctatataaaacaaaaactatatctttttcatcagagagttctttctcaaaaactatttacacatcaaaaataaaatcaaaataaattgttgtgatcataaagttctcttgcaccaatgagtgctccaaagtttggttatgtattactattgattgtattaatcaatataagcaataatggcgtcgatgcatttcacaaagttttcaagaaattgcaatcaaaatcgacattattggagtcagtaagtcctcttcacagaaccgcttatcactttcaacctccccgccattggatcaatggtacaacatatgtgacatcttattcaagttcatatttattcaacttctattactagggttgtttatatcaaccaaaatacattgttctaacgtaaatttcttgggtttgttgttttgccttcgttttggcattcttgactccaacagatccgaatggtaagtccattacaaatatttttccctttttataagttaatgacaaaaacattatatatatgattgcatgtaacaatattcaaaaattgcaacagctccaatgctctacaagggagtttaccatctcttctaccaatacaatcccaaaggtgcggtttggggtaacattgtgtgggctcactcggtttctaaggacttgatcaattgggaagcccttgaaccagccatttacccatccaaatggttcgacatcaacggtacatggtccggttcagctacccacgtaccgggaaaaggaccggttatcctctacaccggcatcaccgagaaccagactcaaattcaaaactacgccattccacaagatctttccgacccatacctcaagacatggataaagccagacgataaccccatcgtaaaacccgataatggcgagaacggatccgctttccgtgacccgaccacggcttggttcaacaaaaaagatgggtattggagaatgcttgttggctcaaagagaaagaacagaggaattgcttatatgtacaagagccgtgacttcaaaaaatgggtcaaaagcaaacgtcctatccactcaagaaagaaaaccggtatgtgggaatgtcccgatttcttcccggtatccgtaaccgacaagaaaaacggtttggacttcagctacgacggtccaaacgccaagcatgtgttgaaggttagtttggacttgaccagatacgagtactacactcttaaaacgaaagacacaaagaaagatcgatacaggccagacggttacgct

SEQ ID NO: 5911 - DNA, 5310 bp, Arabidopsis thaliana landsberg
tcagaaaacttgtaccatcaagatttgtgaacctgatattgcctatgcctctcacttcagaataagagttgttcgccattcttactttccctgaatttacttcagtaaagtctatgaagaaatctcttcttggagtcatgtggaatgaacatcctgtgtccatgatccactcatcttggtcaagtttatcttcacttaagttcatttctgctgcaaccaacccaaccaagtcttcagcatcatctcttgctaaagctgactctccttgttcttgagactgtaacttgtgcttgtttttctcaagccacttgtagcactgtttcttgaagtgaccttctttcccacagatccaacatatcttcttaccatctctggattttgaccttgacttctttcctcctttaccattcgtgttgcctcttgtttcttgccttccacgaacgtacaagccttctgctgcaggctttgaaccaggagtatctcttagttccagttcttttgattttactgcactcaccacatcatcaaatctaatttcatccctaccatacttcaatgtttcttttaacatatcaaaccttgctggtaaagcactaagaataacaatagcttgaacttcgttagggacctggatctgcaaattgtttagatctgatatcatctttaagaactcatctacattttcttcgagacttcttgagtcctccattcgatagttatacactttgagttgcagatttactcgattgggaagagtcttcaccatgtaaagatgatccaataaagaccatgcttctgctgcggttttatagtgctcgatctttctaagaaccttatctccaacatttaagaagatcgtatccatcgccttctcacttatatcaattcttgttgtttctttttcgatcagttccttcttcttcatcggatcttcttcttcttcttctgtcagcggcgcgaacggagcttgtccttgcaacgcttcttttagacctgaaatcctcaagtgcgataacatccgtgtcttccacagagagaagtcaccggttccgtcaaacacacctaccttcagattcgtgtttgtcatcttcaaatcgagcagatccctcgccaagaaccttggctctgataccaatttatgcgaattgaactccgatcaactgtcaattctctgaatctctctctgattgactacgcaaacaaacgaatttaaagaaaattgtaaactacacacgagactttaaccagttcagctccgaacttggagcctacgtctggccggatacttgctccggaattcactagatcgtggtgtttctttcaccagagcttgttaagcttccgattctgttacgattacaacaatcaaagaagaagaaagtaattgttgacttcaacggataagagaagcagctttatatatagctcgtctctcgcacgtgtgacacttccacacgtgtccgtccttaagtcactaaagattaaaccctctctttgctttagaggcttctccttacttagagtaatcttctttaaactcttcattaggtgacaccaatcttcagatgtaaaaattggaaatagataaattattgagacaatttgaatagttaatagcatgtggtgatgattttgcaatagtatttgttatacgtgagtatggtggatgttaaaatcctgtttgataattttagtatctaaaaaaaaagattgcaattaaaaaagaaacataaataaacaaaaaatagaataaaaatatataaaaatagaaaaagataacaatatcgtccttattactgatgttgtgttagctgaattagaccaaaaaaaagaagtaaatgtcgtagctagaatttatgggaaacaaaaatgtcccctttttttgttgtggatctgtccttattatgcataaacattaccaagttatattacaaaaataaaaaaaaattgatgaaaatttgtcaattaatatatttaccttttaagtagaagtagattgatattatattatttttgtcacaagtttcgaaattgcattttacattatgttattttaaaaaggaaaactataatcgatgacggtagaagaccgcttatttaactgacataaaaacatactattgggattgactctgtagcataataatgacctgcacacctctataactctatctgagataaagtgatgtatatgtataacagtagtcgtgtgttagaagtgagagacataatatctatgccaaagattgcatttccgagatatttttggggaatatgtgtgataataatcatgaggactatttgaattcgtagagttgtgtttgtttgttcatattcgtagaggaaaaaaatggttctgaaatgatgggggtgagaaaaatacggcggagatgtggtggttgaagattacgcaatggtagtttttgttcagattcaaattggttaacaattaaattaccgagttaactaaaattttatctagaggtagtgatagtaataatcttattggatgaaattcatattttgaacgttatagtaattcattaaaaaaatttatataatataataaatgagttaagacggtaaatataaatatatcacataaattataacttatcgcaatacaaaatgatttagcatgacataattataaacttattgatataaatattttgttattatgttaacctaataaatattatcgagatatttgttattatgttatccttataataagttatctgcttactattctgatacatgtagattttcgagcattaaatactctgattttatgtctgtaatctttttatgttttgcaacatagattatatcaggatagggttattatcatcattattttatgtgtcagatagaaaaaaatttgattatgagatcgtttgtaaatttttagttatatcattttttatgattttattttttgtttacccattttaaaattatagttttaaaatgttccaaagatattgtcataaatatttcatactgccttttgctatacgttacaatgttgacaaatgacaagtagtaaaattcctcattttccttaacaaaacatataataccaaatgatgatgattccacgtatagatgtctatctcattgcgatactatattaatataaatcaatttcttccaatttctgaccatcatattagtattatattgacttttatatttggtctgcattaattatatgttccccataaatagttagcaaatccggttcggatatgtaggtccaagccttaagtattttttatacacgcaaatttttcttgcatcgtacgtaaatattgaattccacgtttccatatacaaaaccaaatcaaatataattacttttacaacaaccccatttacgatttgagaaacaaaaacgtaaataacttacgaattttcatgttcttgaatcttttcagcaggaaaatagtaaaataactcaatgtttttatggaataattaaaaaagaaatagagaaaactgtttaattttcaaattattccaaattttgttagaaaataagttgaccttgaatatctagtttgattctctatttgagatagctatttatcccttttagtttttaggttcataaaaatgtacagttttgtactttgcagattatcaaaaatatagaagaaaagtaaattattgatctgattggtgacttaaaattatataaatttgttttacagataaaaaaattataaacaataccaaaataattaaaaataatactaataaaaattggaaaataacgactttacatgatatttttggatatcagctttgaatggtaattcattaagcactacaatttgtatatgtttgacaattatcattcacaaaaattttatcaaaaacattacaaatttttttaatagaaagctttattatacaactttgtctgcttattttttacagttttgcactatttttaaaaaacttataattgtagttaacatcaaaaaattttgtacaatttgtattaccaatcggactcattatttttgcgattagtaataactaaagaggtattagtccgattcggatctaatattggacttaagacattggaacttgggacgacctcgaataaaccctaacaacttggagagataaatacatttagaggctgtcaattttctaaaaaattaatacaaaaatcatagtaaatatattattattaaatacctagtaaatgtactgtccacctaacacttcaaaaaaagtttggtgtatcggtcaaaaaaaaaaactgggcaaccgataaaacaagtttccaagaagaaaaacacaaacgccaaatcagcccaagtcacaaaatccgtcgtcgtttagtccacgtagacttcacaaagtctacctttttcaccggttataaccggtaaactaaaattctcctctcttttaccagtcccgttgaaactccgttaaacttttccgtttctccgtcattataaatatcaatcttcttcactctatcgtttttttttttccttcttcttccctctcctataaatctctccgtcttctctcttctctcatttcacgtcggagatcattttctcctcctccgcctccgcctccaccgccaccgccaccgccgccgccgacgacttttctcacttactcaacaccagaggtctctctctcactgtttcttcttctcctttctttcgatttcgtttggtagatttttagatctgatttttttctggtctctgtagctttacttgaagttgactctgtttctcgttatagatcttgatctgtttatgatttcgaataagaacagcttcaagcataattttatattcgaataaaaattagatgcaatgtgtttatttcgcgtgttccaactacacgagttttttttttttttttggattaggagttataacaatctcattgatcttattgttttgattttagatcttggtttagtgtataatggaaggtgttggactaagagctgtaggatcacactgttctttatctgagatggatgatcttgatttgactcgagctttggataaaccaagattgaagatcgaaaggaagagatcgtttgatgaaagatcgatgagtgagctatcgactggttacagtagacatgtcggtatacacgattcgccgcgaggtagatcggtgctcgatacgcctctttcttctgctagaaactcctttgagcctcatcctatgatggcccccgccccccaggctttaagaaggtcaatggtctataattcaaaggtcaccctgttggtactcttgccgcggttg

SEQ ID NO: 5912 - DNA, 1498 bp, Arabidopsis thaliana landsberg
tgttttctcgaatcctcttgtcttatcttatttccctcgaaatcataatctaattatgatgaactctaactaaactaacctcgtttttgtttttgtttgtttccatgtggcattctcaacaatccttatatagatccaaatggtgagtttttataatttttgggtcttattacacatcgttaattgcatacgagatactctagttaatttatggtttttcgaaaacaggtccagtatactacaaaggtctctaccatctcttctaccaatataacaccaaaggtgcggtttggggtaatattatatgggcccattcggtttctaaagacttggttaactgggaggctcttgaaccggctcttagtccttcaaaatggttcgacatcggaggtacatggtccggttcaataacaatcgtaccgggaaaaggaccgattatcctctataccggtgttaaccagaacgaaactcagttgcaaaactatgcaatcccagaggacccatcagacccatacctaaggaaatggattaaaccggacgataacccgattgcaatcccagactatacaatgaacggttcagcattccgtgacccgacaaccgcttggttctccaaagacgggcattggagaaccgtggtagggtcaaaaagaaagcgtagaggaattgcttacatctacagaagccgagatttcaagcattgggtcaaagctaagcacccggttcactctaaacagtcaaccggtatgtgggaatgtcctgatttcttcccggtttccttaaccgatttccgaaacggtttggacttggattacgtcggtccaaacaccaagcatgtgttgaaggttagcttggacattacccggtacgagtattacacgcttggtaaatacgatcttaagaaggaccggtacataccggacggtaatactcccgatggttgggagggtttaagattcgattacggtaatttctacgcttccaagacattctttgactacaaaaagaacagaagaatcttatggggttgggctaatgaatctgacaccgttgaagatgatattttgaagggttgggctggtcttcaggtatctagctaattaatttaaaacccatacctttgttaatataatgaaattttatgttaaattatgtaatgaatttataggtgattccaagaacggtgctccttgattcaagcaagaagcaacttgtgttttggcctgttgaagagatagagtcattaagaggtaactacgtccgaatgaacaatcatgacatcaagatgggtcaacgcatagaagtcaaaggaatcactcctgctcaagccgatgtggaagtaacgttctatgttggaagtctagagaaagctgagatattcgatccgagtttcacgtggaaaccattgccctcccgtaacattaaaggctcgaatgtgagagacgaaagtaggaccttttggtctgatcacattagcgactcctgatgggaggagtac

SEQ ID NO: 5913 - DNA, 1330 bp, Arabidopsis thaliana landsberg
ctttatacatcttttaggggactatatacatgggagaaggattgtactacgatttcccgcatacgcactttgatcgatatttttcacctgatttctatacaagggtattaaaatgctgcaaccttggaggttttactagttttgaggtagaagctgatgcaacgttttcaaacatttctcaggtcgggattgctggagttcccgcggatacagtaatgaagaagacgaaaacattagaggataattggataccagcttgggacgaggtttttgagttcccattaacagttccagagcttgctcttctacgtatcgaggtacatgagtatgacatgtctgagaaagacgattttggaggccaaatttgcttgccggtttgggagctgaggcaaggaatacgtgccgttcctctccgtaaccaggatggtgtcaagtgtagatccgtgaagcttcttgtgcggttggagtttgtgtgacagttacaagaaatgctccatttttttctttggtttaagcacttttaaacagggttccagtacatacaagtgaaccgagtttgtgatttcggttcatgggtttggttattgtgagaatgtgctttattggttaaatggttttgtaatgctgagattgtgtggagaaaacaacaaataattatatatatgctatattgctatttatgtcaacaagaattgttctcaaatctcaagcaagtattaccatcattgaatcagacatcaattaaatagttaactggagtgaaaaaaatacacatattaattgatattgattcattgagtttatacattgtatcatatattttccaatttcgtatcatatttttttttcaatgttagatgtttcattaatgatgtccctttatatgttccattgatgatgaatttattgataaccaaaaaatgtatctttttagttatgttattgtcttgacataactaagaaattgttttgacataactaagaagtatacaatctggtttgcaatcaatttacttttgttgtgttttttaatcatttttaacaactcttttatttcaaatgaaaagtcaattagttagttgtcaaaaaaaaaacaaatgaaaagtcaaatcctttggtcaattgttttaggtttagttgagtcaaatcacacctttttgataaccacattcatacaaatcatatttatagcaaaaatggagggataaaaattcaatgggtaaagcttttacaattcttattcaaaaatggcaaagtagttgataaacttcatttctcaactcatgaatctctctatctcaagatcttctacaacattttctaatgcata

SEQ ID NO: 5914 - DNA, 10308 bp, Arabidopsis thaliana landsberg
  unsure (1)..(10308): unsure at all n locations
tacggtcagacattcgagctactgatgtggttgaacttctggcaatggctttttctgtgtctcaatacgcacacatttccttccacaatgtcttctcaatccatggcggtcgctcattggcacgtcttgcgcaagccttagaaaccatgtccttcatacgcgtttgacatattttaaagaactattattcaactacaccggtcactgatggatgccatgtgtgtgtactctacaaaacaagaggagagtttgatgttagtgatcaaacaaccaaaccaaaccaaatgtaagagattaataggagatagaacttactttacctcgaattcgaggaagtatatgtgtcttctttcagtaggtacacatctccaactgtaaaatggcccatcaaacttgtttgtgaatacctttgtgatcttctgggtcagcttaccattgtcgtgaccaaacctacaattacataaaccattagcatatacaaacctacaattacaatgatctgaatgtcaagtttgaagctgtaaattcaaaaatcaagtatgtggagagtcaattcgcatcaacctctgctctgaagcatcctcagcaactaccaaggaaagcagtttagaaacctaaggactatgctactactaatgctaacaccatccagcaagaagatgagtcttgaccaaatcatcagccccacaatactaaggacatcatggttcaagaagggggggggatttaactcaaattgttgcacctgccatccagcaattcatctggactatagagcacacacctttgctgaatactcaccattctgaaaaaaattcaaaattgaaaaactcaagaaggatcagaatcaagagatgattagtactgccatcacccaagaaacttacaagaagaaagttatccaagaaaagcttgatgatcctggttcattccctctgccatgctccctaggaccattgacattcaataggtgcctttgtgatttgggagcatctgttagccttatgcctctctctacagctaaaaggctagggatcatggaatacaagttctgcaacctagctttactcttagctgatgattctgttgcacatcctcatggtctaatagaaaatctgcctgtcaagatcggaaatgttgagatacctacatattttatggtattggacgtagatgaagaaggcaaggatcccctgatcctaggcagaccattcttagcttcagttggaacagtcatagatgtcaggaatggaaaaattaatctgaaccttgaaaaaggcatcaagatgaagtttgacatcaaaaaagcttcaaagaaatcaacaacaggaggtcagagttttggaattcaagatatggatgttgatgaagaaacagaagctgaaaccccaccaaaagtcaactatacttctcaactcaacaagctgaagagaacttttgaccacaagaagagagaaacagaaaggctatctcagactgaagatcctgaagaagatgactggtatgagatgagaaaaaaattaaaatggcaaagcagagtcatagacggattgtcttcaagggtgatgaagctgaaagatcaactttggatgtttgaaaaaagagttaaaaagttttcagatggtattgatccagagaagatggaaactgcactagctatcaagaaggacgaaaatttcgcaacagaatggtttgcaccagaagatcaaaaaggagttcacttagaggaaagaaggccatggaacaagttgttgagtaaggaggaaactcctattccaacttattctccaggagcgcctaaacagcccaccaactcctctacggaagaagaacacttgacacttgattctgttactgaagaacttctggaactaaggatagaatacaaagctcaagaggataccattgggtagctaacttacaaaatggaaggactgaaccatgcaatcttgtaacttcaagaaatggttaaaggctaccccagttttgaatttgaggattggtcaaaggagcctggttcacaagaagaaaactactctgctgatcagaaagaagcttattttgaagaaaaatcaaattagtactcatccttccatatgtcaagagaggatgcagactatgcttcaggaactgaaaatccaaccactgaagatgaggacttctttgttcctctcttcaacattttttctgactaagctctgtaagagtcaagcttagtgacttaaaacaggctgacttgggaagaagtcccatgcttatccatgtatataactttctatttttcttgttatttttgatgtttttgcttaagtgtttcaggtttatttcattgaccatgaggaagtcaacgatggagtaaattcaaatcaagtcaaggaaacatctcaaccgttgatcgagtaaaatgaggaagagtgctttaagttgttggattgaatgaccaaatgagagaagcatcaccactgtttgatcgagtgacttcttgaggtctattctggtccgtttgatcgagtgatcaagaacaaggaactctccaccgttcgatcgagtgttgcgaaattcaagaagatgctcgatcctttactcgtgctcgcattatttggagaccaaagcataactcgcgtgactccacttgttcccccaacacttctgtacccgatggacaaagcaattacccataccctcactatttccaactcgcttttctatcctttcaaaagaaaccaaagaccattctcctccacccattgaattcgacaaaccctcattgaaactctctccttcatcatctcattttcgcaattctctatctctcacaaatctttgaagtcttcattccaaactctccctatcactcttcgagaattcgttctgcacttcaccatacctcaccaaagttactcgatcattcccaattccatcctcaaatctttaaccggttcttaagctgaaattccatcaccaaaaaccgaatcctatccactttaagagttgtttttgattaccttgttgaagctcacgactactctccatggattcaagaagcaagagttcatctcgggctagaagatcctgtattaataaagaagaagttgagtcgtttgacttgagtggcatgaatgaacgccaaattcgccaagctcgccatgctcaaagatcaagcctcattcaagggggaggttcaagccgttcaaacatgcaaagagaagaggtagcttggggaaagagggttgttgaggctggggaagaacgccatgaagaggcnnnnnnnnnnnnnnnnnnnnnnnnnnnnnnnnnnnngatcatcagggatgatacaccaacccttgttaggagaagaaactggccaaggaggaagagagagccaaccccgagcgagtactatcaatacttgaaggagttgaagtttgagggaactagataccctcataaggaaacgatgcaagagcttggtatttgtggtgatgtggaatacttgatggaattagccaatcttgcaacgttcatgagctgccaatgtgggggatttaaagaggagagctgccaactccttgcaaccctcaaagttcacttttgtgttgatgattcggagaaagaagagagaggaggtcttggttacataactttcaaggttaggggtgtcgagtatactcttgatatatgccatcttgataccattttcgggttccctagcggagaaggaatccgccaagactatgatcaagaaaagctgaaatgcctttagaaaacaatagtcggtccgaaacccttcttaccaaccaagagcaagagttcttcaattcgtaatcccgtgattagatacctccaccaatgcatcgccaacaccctctttcaaaagaaggccaccggatttgttagtgaagaagagctatgcatgatagaccaatctttggtcttcattttgagggagacaagagatgggaggaagatggcgggggatagagcggacacttcgttgagtgttgttctcttggatcacttattaagttacaaggagtatgctgcaaccatccatcactcaggaattcgtgggagtctttgtgttggtagtctattaacgctaatactaggagccgtgggtatagaacttggagcccctgacgtgttgcccaagttcattgacctcgactatctcaaggggaaggattttcttgagaaaacaactccggaggatcgctatctcttcaagttcgaaccatctggagcttggaccttctctgttacccctaccatgcgagaaccggacttcggtgaagacaaggcgcaacataaatttcatgccatctgcctctgccttgaacatcgacattggaggagctcgagaagatgaacaagaatatagtcaagctgactatgtgcgacaggagtattttactcaagctgactatgagcagcaaatcgagtttgagcagcatattgatcaaccgaagcaagggaccagcgaacaagagcaagctcattatgaagaaggtgctgactaaggaggagatgagatagctgaagttcacaacaagctcggtgcgcttgaagagcttgggaaccttcatagcaagacaatgaagggtttcaagaagaagatgagaacaatgaagaaatcgctcaagagtatagctgctcaactcaaggacttccagagcaagccaaggccaccatctccaaccgccgaagtaagaaggaccggttcaacgagctcagctgcaaggagagctgaaaggatcgatcaaccccgagcttcatcttttgagcctcgggaagtgatctccgagttgagagagccaaggagtaggcagagacgagcttccacacgctcgaccggacagaacgagcaacaccctcccgcctcaacttcagcccctgccaatacccaagagagtatggatgactatgtctccatctacttcacttgaaaactgaggtaacaccacctctccatagtatataccatagcatctttttatttttctttgtgtgttttgtgctttcgtcttgaattctctttcagatttttattacacaagggactgtgtaatttaagtttgggggagggttcaagacatgtttaacattgtgttctcttttcttatttcaaattttgcatcatctaaggcatagaaaaaccataaaaatttgaaaatttttcaaaaaatgatttcataaaaaaagagtgtcatgtagattgcatatcgttttaggattgtatatagagtgtttgcatttaggattgctcatttgcataggggatgatgatgatttcaaaccgataagcatgttttgattcaatgaagtaagttcaatgcccgggttgttagttctttgttgcataaccgattgtatctctgaagtaagaccttaccctgctttgaatttgtaacttgactatactactttgatcgaaactcgcttatctgatgccattccatatctattagaacctgaactgaaattgcaattatcatgtctatgcattgtttgtgaactcatggctaccatgtacatacttggatcatcttattcatttcatcaccctctgttaatccaagtagttgtctctcatttttagagcagtttctcatacccttagcctagccttatttcaagccaaagatcatttgtgtgtgattgtgaggtcttttttgattgagcttggtataacgtgttaggtatgagccgacaagagaagtctttcatgtagacatagcccacactttttgggttagctagaactaggtggatacttgtatttagaattgggattgtgtatggattgaatgggaaaaagaatgagaatgaaaagtgaaagaaaaaaaaaaagaaaagagagtcagagttttgagttcttaagggggatacaaaaaagtgttaatctagtaaagggttcagaactcaacgagagttaggcattttgatttaaataaaagggtaaaacgccctctatgctaagaatagaagaaaagcctttagtttgtcaaagtatatgataagtgtgcattttacatgttttgagcatccatttgttatcactattgcatcatatcatcactgtttaatattatttctcatcatttgtcatcactttgcatgtttaggatagttttgcatgcatgttgcatatttgtgttgttttcaggtgatttggagctgtttacgagctatctggaagaagtggacctgatcatgacaaaccactcgacctagaggtcgagtaggagcttcaagatctcaagagaccactcgacccccaagtcgagtagaagacaccgccactctaccacaacgctcgacccccaggtcgagtgtcttcatctccatctcttgaccaccactcgatcacatcactcgacccccaggtcgagtgacttcatctccatcttctgaccaccactcgatcacgtcactcgacccccaggtcgagtgacttcatcccattgccagacctctactcgacctcatcactccacctggatgtcgagtatcaccatcaccaccactcgacttcatactcgatgacaagcttcagagctttcttcattccgcactcaagcagacactcgagcacaaggaagaaaagaagactccagctattcactcgacctctcactcgaccacatgggtcgagtacagttcttaacccgtcccaatactgcgtcgttttgagtattagggtttcagaacatttcgctataagtagcttgtactttatattttcgagaaaaaagttttcttccgtagacactgtgtgttcttgatattttgtaatccagatttctcttaatttattcagtatttgctttcattttgtttactaagttgttcatcctgttatcatcttgctattactctgttgctatcatgttttcattcttaccatcgtttatgctttctgcaatgatgtctgattagtgactaggtttctgaggatgggttagagtagtttagaattctcagtatgctaggtggttgagtttgatttatagatcccttctacattagttgttcttaatgcttattgctttctgatccactggaatttgagcccagccatttccgcacccaaaaggtgttagatgaaatgtctgaaccactaattccagagatttgtggctatgtaccaaggtattggttacatggcgcgttttccctttaactttttgattcgtaatgcctgttaaattagctctcgtcaatggtgattgattctgggaatactttaacttgaggatctctgttgcggtggcacttagatttggttatcaaacttgttgtctagggatattttattgagcatgtcaatcacctgtagactgaggaaactaactattctattaccccatcctcgggaatttctcatctaattgatttctctgtttactctgccattgcttactcctcgcttagcttttgcatttcaaagatgttatcattcatatactcgaccacacccaattgtcgtgtaacagactgtgcagtcgagtatctttgttactgtctgtgctatttactcgncttgttgctcgnccccccctagtgcttggcaacaagctgtgttggtcgagtgttttactgtttctgcttgaatttcagtttcctgcatgttcacttaggactgctagaaactccaaaacctgttattgcttggcttgactctgtgaactctgattgcatcttgattgttagcatcacacccatttggattgacaacctaaaatactacaacgacatgatagtgctttaagtttaattgactaaaaacctattatcaatttggcgtctttgccaacacagcttgggggagttgataagtgtgcattttacatgttttaagcatccatttattatcactattgcatcatatcaccactgttttataccatttcttatcatttctcatcactttgcatgtttaggatagttttgcatgcatgttgcatatttgtgttgttttcaggtgatttggagttgttgacgagctaattggaagaagcggacctgatcatgtcaaaccactcgaccccttggccgagtagatgcttcacgacctcaagacaccactcgaccccctagtcgagtaccaccatgagagtcactcgatcacttcactcgaccaccaagtcgagtatcatcacctccaccacctgaccatcactcgatcataccactctaccaagaggttgagtatcaccatcaccatcactcgactacatactcgattgccagcttcagagtcttctccattccgcactcaaccagacactggagcacaaggaagaaaagaagactccagctaatcactcgaccactcactcgattacctgggtaaagtatagttcttaatccgtcccaatactgcgtcgttttgagtattagggtttcagaatattttgttataagtagcatgtactttacattttcgaccagaagtttttatctaagttttattccgtagacactgtgttcttaaccttttgtaatccggatttctctttatctattcagtattcagtattcagtatttgttcttgattttgtttactgttattcatcctgttatcatcttgctattacactgttgttatcatgtttttattttgttcaacgtttatgttttctacaatgatgtctgggtagtgaataggtttctgaggatgggttagaatagtatagaattctcagtatgctaggtggttgagtttgattgatagatcccttctagattagttgttcttaatacctattgctttcagagcaactggaatttgagcccagacatttctgcgtccaaaaggtgttcgatgtaatgtctgaaccactaattccaaagattcgtggacaagtaccaaggtattggttgcagggagcgttttggctttaacttgttgattcgtaatgcctggtaggttagctctcgtcaatggtgattgagtctgggactaggttaacttgagagtctctattgcgggggcacttagatttggttaatgaacttgttgtctagtgttaatttattgagcatgtcaatcacctataaactgagaaaacgaaactactcgattaccccatcctagggaattctgtatctgattaaattctttgtttactctactgttgtttactgcatcttgttatctgttgcttaatttctgcaattctttcttgttactcgacctcatactcgaccaccaagttgtctggcaacagactgtgcagtcgagtatctgtgttttattttctgtctatttactcgacctgtcactcgacctcacctagtgctctgcaaagagctgtgttggtcgagtgttttattgtttctgcttgaatttctgttttcggcatgttcataatgaactgatagaacacaccaaaacctgttattgcttggcttgacttagtgacttctgatcacatcttgattgttagcatcacacccatttggattgacaacctaaaatactacaacgatatgattggtgttttaggataattgactaaaaaacatattatcaacttgatagtccatacaactataatatacgataatatgtttccttaattctagagaagttataagttatatattgtgtatatatataaatatgtatgaattaacacattcttactcatatttatactaacttagcatgtataaataaccttctatattgtaagctgtataattcataatataacatatgttagtatattatgaattacatcaaaatcatcctaatatacacaatgtgaaccagacttacataaagccaacatattctatgaatatgtttgtagttattaaccatcggtttataatctatctttaatcaggtgaatgtgaagtgtgattactcaatcatacatatgtgacctaataggtgtatacacataataaacatgatttaatgcaaacatccacattcgcgcggtccctagctcgagcttgccacacaaacagtttttgacccgtgatagacgagtaaagaagcttgaacttcattgctacgtagacgtaagcttggtaaccttgtgactgcacgttgttgttcgttctcacgggccagaaaacgctgaaccagtcgcaagatgttaacggtgcacggtttagcttttcttcgaactgatcatacttgtttaggatcaagataaatggtgtgtctttgaaacagggttgcttaaccattgattctaaaagttctttgctttggatcatcttgttctgatactggactgttccactgctttcgggtgtgatgctgatatgatcgtaatcacttaagctgatgcagaagatgactg

SEQ ID NO: 5915 - DNA, 572 bp, Arabidopsis thaliana landsberg
  unsure (1)..(572): unsure at all n locations
gagtaatctttaaaaattgctagttaatgatcgggaatttatctttctcagaaactttcaaagatttttgatgatccattcattgaaaatctatataaaaacatttatgatggacttatacgtaaatctctaaaaattccgtcaaaaatcaaaaatatttcttgttgtaggacctaactaaatgaatgtcagtatatagattattgggacaagaagtcaagatgttgttggaaagttctcatcgtcaattttatcattgttttaccttcatggatttaatgttgttccaatattatagatgcaaataaacacacacgtacataactatgtttctgttattgaattaatacataattattaaaacaataatttacttatgatctcttcttcttcttacgtgaatgaacgtaagctgatagaagcttgcgatatcgcaatctcctaagacataattatgcccctactttgatgtaagtagattctatgggtgtctatcttgcaggatacaactatcaatctatgtattaacaccttacnaaatcctagcaaatctactttgagtttctgagaaa

SEQ ID NO: 5916 - DNA, 4305 bp, Arabidopsis thaliana landsberg
atccacatttctattatttaaaaattaaaaatgctaagaaaaaaattaactttaaacaaaaacttgaataaaatttgcaggaaaacctttgaagagaaatggttgagaattaacctgccaatgggctagtcattgtttgatgggctggaattgttgttgttgggcctctgagagcacgctcatgtgatcatctgtttccgttaccgccttaccgggaaaacgaatcccccaatctccgacgatcgctccacctcctaaatctgtcgccatctccgtctccggagagaacctccaacatcatgactcctgaagccgctaactccttcgaatcgcctccgtttctctctgtttctacggtgagatcatcacaggcaaacaaattaagaatgtctctctgacgtttatatgagacgacgtgatgcttgtgtgtgtatgatctctctcgtcttattcatagctttttaagagaacagagagccgttgtatatatgatgagtttttcttgggccagaccaacgaatgattctttttaaacgaagggagaagaaagaaccagggcatcatcatctcgaagaagagaattgaaatcagagaaattgcgtctttagactcgaggagataacaggaaacgaggtatatttataaaacttatatgtttgagaattgagactcaagttccctttttttcttcccaaagtttccttttttccttttcacttagggtttgtttaagtccagactccagagcaaacaccaaccttaggttcggtgataatcaatctagccgttatacacggttcgggttaaaccttagaggtttggtgataatctagccgctagactcaagtttcctttttcccctttcacttaggaagtccagaccaacctttggttccgtgatatataatctagccgttatacggattaaaaatttccatttactagctgatacgctcctataaattgtattttgattgtattactactaacgcattgcttctcattttgatcacgttgatctattgttttgcagaacagggctaataagaacagaaccaaagtatagcagtcttaaagattttttcatggtttgaacaaataaaatcacattgataaagatgcttccacaatacctcaacaacagaatgaacagaagcaaacaccaaaaagtcttcataaacattatctataaagaacatgagatatgtgtcccaaaaaacaaaacaaaagagaaaaccaaagaaagaaagtgacgagatttaacaaattatgttaatatgtagtcagggacgactttttagcgttgttgatcttactattttcacagacaaaagaagaccagagcccatccttcttgtagttatcaaacaaagaatccatgagccctacacgttgccttggtgtgctcagtgatctcatcttttgcccttgcagactctgtcacactcatgtaaggctgcaaaccatcggagctttgaaaccagctctcgtcctccactaatagactctgctccaaacggctgaaaaatctccttaggaaagaaaatggagagtcttgtctctacaaagttgtaagcttcacttttgtaggaacaagcatttcacttggaatgagaaattagtttatggattttgcagacttggattgatcaccccaatgttccagccgacagcttctcatccccatatctttagtgtacaatgactccacaagcatatggggacttcttctctcctaccaaactgttatatgtaatcaaatgctctgcttttggtgtatctacaatgtctaaacaacacattaaggatgatatagaacatttatttcttactggaaataaaagaacaagttttgcttattacaatataccaaaatacagaaagaacaataacattttgagaaacagacacaaagaaacaaaagcacaaactcatatctcaacccctctctcccctttccttcttcatcttctttctttcagagccttgagacattgatagggtagtgagctacaatgtgattataaacagcaagtgtaagaaaatcatcaagctcaggtgcagtacactgctttgtaaacatcttgcaagcttccttatacattccattcttaaacttgtctttcccaacttctttctcaattctttccatctcttcttcgacaactctcccaaacaactctttactcactcgaactccaagcccgtctccatcaagttccactccatacctaatccattgccaattctggacacggcttatctcagccgtagcagcatcttccattaggttatagagtgggacagatcctgatcctgttaaccatgcggctaagtattgaattcctacacgtgtgttcagccttaaaccctcgagtgtacgcactcctcgcggtatttgaagcagatcttcctctgttattgcggctgcgtcctcgcgcttcactgatttgatttggtttggactttttcccatgtgaccagtgaatgcttccatgcagattgggatgagtcctggatgagccgcccatgttccatcatgccctgctcttacctctctcagcttgtctttcctcactagatccaatgccatctcattcgcttttgggtcatctcttatcggaatctgagccgcctgatcatcataccaccgaacaaatcaaaacattttcaactttatttataatgttttcacagagcattcatgtagtttgaaagagacatatagtgaactagtgttaagaggggactaaccatgccacccatggcgtggacaccgcgcttatgacaagtacggatgagaagatcagagtaacttctcatgaaatgctggcccatgccaactaggacacggtctggtaagagccggtcagggtgagcttggaaggttttgacatagctgaagatataatcccatcttccacagtttaaaccgactgagtgatcacgtagttcatagagtatctcattcatctggaagacagccgggagggtctcgataagcacagttgctctaatgcttcctctctctatcccagccatcttctcagcacgctcaaaaacactgttccatatctttgcttccctgacaagaaaccaagtaacctaattaaccctagaccgaaaaacatcaatttgatgaccgaaccaggaaggtacctagaatgttccattttggggagatagaagaatggaccgaaaccggaaccttgagtctgtctaaatttggcgtagttgtggaagaagtaaaggccaaaatcgacaagacatccagtggcgggttcaccgtcgatgaggatgtgagcctccgggagatgccaacctcttggccggacaaaaagcttagcggtttggtcgttgagcttgtaaactctgttccttgacttgtcgtggaacgtaatggatccatccactgcatctttcaggttcacatgccctctcatcagattctcccagcttggagacaaagcgtcctcgaaatcagcctgttcaaaccccaacacaaaatttacttaatttggttaatttaaaccggatattatatacagcagaacataccaaaccaaaccaaatcgacttgtatcgaacatagataaaaacagaaccggatcgaaatacaccaaaccaaacaaatttgatattaactagcctgccagaccaactaaatttggtcaattcctctgaatagtaaattcagacataaatataacaaaaccaaatttaaactgataccaaattgaacgcggtccaattaaaagtttgttacagtattattcaaaagtttcaccaatgtcggtcaaatccaatccaaaccaactaatgtgttgtataaagagagagtgaaagaaaatggaccataaagactttagctccggagttaagagcgttgatgatcatcttcctctcgaccggaccggtgatctcaactctccggtcagcaacggcaggagggacggaggcacagctccaatcaccgtctctgatgaacttagtggaaggatcaaacccaggaacggcaccggagttataacgccgtcttgcctctctccggcactccatggcatacttcacatggccacgaaactctctctgtaactcagccacaaagctaagagcttctctcgtcaaaatcttggcgaagatttggtcgtaccgtcctcgaacctccacaccatccggagaatcataaacggcgacgtttggtcgataaactgaggtctcgagctccatatttatttttttgtctaaattctgtaacgcgatatagtgatatataaatgcgatccgcgaatatgaattataaag

SEQ ID NO: 5917 - DNA, 4312 bp, Arabidopsis thaliana landsberg
  unsure (1)..(4312): unsure at all n locations
tgctcttgtcggctcattcctaacacgttataccaagctcaatcgaaaaagacttcacaatcacacacaaatgatctttggcttgaaataaggctaggctaagggtatgggaaactgctctaaaaatgagagactgctacttatattaacagagggtggtgaagtgaataagataatccaagtatgtatatggtagccatgagttcacaaacaatgcatagatatgataattgcaaattcagttcaggttctaatagataaggaatgacatcagataagcgagtttcgaattaaagtagtatagtcaagttacaaattcaaagtagggtgcggtcttacttcagagatacaatcgattatgcaacagagaactaacaacctaggcattgaacttacttcattgaatcaaaacatgcttatcggtttgaaatcatcattatcccctatgcaaatgagcaatcctaaatgcaagcacactatatacaatcctaaaatgaaatgcaatctacatgacactcgtttttgatgaaatcattttctgaatttttttcaaatttttatggtttttctatgccgtagatgatgtaatattcgaaataagaaaatagaacacaatgttaaacatgttttaaccccccccccccacacacacacacacacacagacaacttaaattacagagtcccttgtgtaataaaagtctgagaaagaaatcaagaccaaaacacaaaacaaacaaaaaataataaaaagatgctatggtatatacaatggttgaggtggtgttacctcattgatcaggtgaagtaggaggagacgaaatcgtccatactctcctttgtgtaactctaaggaacgggttgtgctgaacttggattagctggatgctcgaccctttactcgggttgttgatagagtggctcctcaagtggtgcggtagagtggcttgctccagcatatgatttccttgttcttcttcgctttttcaacttgctcctattttccttctctctaggttcgaaggatgattgccttggtggtgaaggtgcggcatggtgttccctcggcatgttctgtggcattgccgtagttgaagaagaacagctgatcttgagttagagattgttaaacttcttgttgagtgtcgcgagagccttgtcatggaacttacaccagctttggaggaaaccaaggcgcttgtgaatttcctttgagtctttattttgcctcggtgcggagtactcctcgaagtaaaactgttgtgttgcgtaagacacgtccataggttctgcctcattatctgaatgatggattggggcctcatcatcattcactccttccatcggcacagcttcatcacttgaagtatagaggttctccactggtgggtaaaactcactgttgccaccatctctgatcaaagtggaagcgggatttgggaggagaaaaatagattgtccttctgtggggtgatcgaacctatacttgtataggccattcttctgctgcgaccaaaaactcttggaattgataaggtgttgcatatcaatccatctcggaggaattggctttgaatgtagaggtacattgcatgctctcaaaattggggtcacaactcctcccacaaccattcttcctggtttcttaagtcccttagcccatcttctataacttagcaggtgcttgattaggtagaatgagaccgaagtatctatttgatctccagctagaactgtaccgtctgatgctaaaccaagcagctcttgcaagtgctgtctccatcagctctaattctccattgaagaaggttccatttctttctcttgcgaatagcgcactagccaaagatctatgaaagtaattaaccaccggactccttatctcgttactcttggtcctacaggatgaaaatccatgcttagacccaaatgtggcccacaatgactgaagctctctcttgtcaaaacgatgacttgtgtcttttccgcttggaaatccatacatcagctcgagatgctctattggaagccgatactctacgtcatacacacagaactccaagtatcccaaacttccgtctggactgatttcatcgtcctctgactctccatataagaacaattccacggatgaaagaaactggatggtctcttcctcatacccctccattggctgaaacatgtgaatattcaggctgcactgcttaaacatatagtctacatcattatagatatcgagtctctccattgtctcgggatgacggtatcgagttcttaaaaactcattgcatttcagcagcttgtagtactcgtttcgagttgcacacttctcttattccaattcatcatcgcctcctttctctgtttgatcatcttcctctggtgaagccatttcttcctcggagtcttcatctaccagctccaacctcctccccacgagcttctttcctcgagtgatatctgccttgttgctctagaattcccttgtagaggacttactcgaccttcgggatcgagtatttccagctagaaagctgaaagtctcttcttcttgcatcacttcctcctcttggctcgattcgttgtgatcgatctcgaaacttgcttcagagagtcctcgagctgctgcatgcgaagaaggtgttggatatctcttcgatggtgagagagctctgttccggatccttgacaagagcgtgcacttgtttgtcattgagaacaagaatgggagagactcaaaaccaaaattcagtaggttaggagattgaatgatggagataacaaatgaatattgcaatgtttttgataagaaggggaagtgaaggaaagagagagagttataagaatttgagaatgttttggtatgggaggtggagatatgaggttgttgagttcgggaattgcgatggggggggggaccaaagtgattatgaggggacaggaagacaaagagacatcatggatttcaatggaggcgggtcacgagccgtcggagtccgcaaggtagtctctttggtttcttcactcgatcggacggtggaaagtacttcactcttaagcactcgatcaaacggaccagattaaacctcatgaatttactcgatcaaagggtggggatgattcctctatttggtcattcaatcgcacaactcagaacactcctctttgttttactctatcaacggttgagatgattcttgacttgatttaaatttacacaaccgttgactccatcatggtcaatgaaataaacctgaaacacttaaacaaaaacatcaaaaataacaagaaagatagaaagttatatatatggatagacacgggactccctcccaagtgagcttgttttaagtcactaagctttactcttacagagcttagtcaaaaagaaggttgaagagaggaacagagaagtcctcatcttcaatggttaaattttcagtttctgaatcatattctgcatcctctcttgacaaatggtaggatgagtactcatttgatttttcttcaaattaagcttcttcttctgaaccaggctcctttgaccaatcctcaatttcaaaattggggtagcctttaaccatttcttgaagttccagaatgctgttgtttaactcttctatcttgtgagttaactttccaattgtatcctcctaagctttatatccaatccagagctccaggaattcttcagcaacagaatcatgaatcaagtgttcttcttcagaagaggggttggtgggccgtttaggcactcgtggagaataagtcggaatgggggtttcctcctcactcaacaacttgctatctaggcttctttcctctaagtgaactcctttctcatcttcttgtgcaaaccattctgttgtgaaatcttcgtcctccttgatagctagtgcagtttctatcttctctggatcaatactcataaaaaacttattttctcttttttcaaacatccatagttgatctttcagcttcatcacccttgaagataatccctctatgactctgctttgccatttacattttttctcaactcataccagttatcttttttaggatcttcagtctgagctaacccttctattgctctcttcttgtggtcaaaagttctctttagcttgctgagtttagaagtatagttaactcttggtggggttccagcttctgtttcttcattaacatccatgtcctgaatcccaaaactctgacctcctgttgttgatttccctgaagccttccgatgtcaaatttcatcttatcncaatttcaaaatttacatcaatttttccattcatgacatctatgac

SEQ ID NO: 5918 - DNA, 3563 bp, Arabidopsis thaliana landsberg
  unsure (1)..(3563): unsure at all n locations
tttgctggacgttagtattgaaactaatcgtttttttttttatgatttacagcaaggaccaaggaagttactctctcggagacggaacttgagctgttaacccttctccgacgtggtcagactgactggtccactttcaccagaaatcgcatcgtagctgctcttgccgtagctccagcagttcccgtagctccagcagttcacgcaatcgttcctccagaagcacagctagatccaatcgaagaggtttcgcggattgaaccggttcccgaagctaacctgcctataggtacgagttccgctatatatatatatttttttttttaaaagtacgagttattgagacagttgcgcaacttgaattggttactaacaaatgtcgtgctctatctactcagttcctccagactccagctccacttcagaactcccgctcatcagaagaatgaggcgtccaagccttcgtgttcaacgagtcaacgcccgggctcccgctcgtgccggtgatttatcagttgcggtgactgcggctcgaaacactctagctgtttccagcgcatctgcctcagcatctcatccctcgcttcctgagctcaacatcgggacctcagctacagcaggtcaatcggataacaatcaggtcgctcaggtatttaggccatctgcagttgttcgtcctgatggtgcaccgtcctctccgaagagggctcggacacagccggaggtgaatccggcggctgagttggtcgtgagcgatcagagggtcgcctctcctagagaggagaggatggaacctgcggctgctactccggaggcagctgcgtctgcggctagacgatcctcgggcaggtcccatggcggaggacgaggctccagaggtgggggccggtcttcaaaccggtctcaggaagtgaggcagacgtccaactccggcggaggatccgcgggaagcaggcctttccactggtctttcactcacgaccgtgatcacccgatcgttgaggacgaggctgggttagcgaacctgctttgccacatcatagggaggaactgtcaggttcctggagtgaagaacatggccgagacggcggcctatgctgacatgatggcgaaggagggccatgtaattatcgataactgtctccttctaattccattcttatgctagtcgtaactttctgttttgccttcggtaggcgatagctgccacaaacaagctggtcgctctctatgagcaccgtctaagccaggtcccctcagcgaatgagctcgaagaaggaaagaccctcatccgggagctgacgtcgactgtgaaggctggtcaggatcgcgaagtctcgttccaggtatacctcggttttgatttgtttgtatataatttgtcgatgattcgatgattctgatctgattgttatttcaggtggagatcgaaaggctgaaaatggagctatccacttcaaaagacctcgagaaaggttatgatgagaagatcgggttcatggagatggagatcggggggttgcaagccgacaagcggacggcgaggaaccagattcatcgcttggagcagaggagggaagagctctccaaaaaggtgatggacctgacttcgactgcacaaggggcgaagaaggcggttcacgatgctaaggttgagttggctgctgcgtattcgaagctgctagctggggtcaaggagaagtgggttgccaaaaaggagtacacggtactggaggggcaagcggctgaggtggaaacgaacctggctttgatcgaccagatcaccaagactgctatcgatctgaccgtggagaaacctcggctgcaagcagagctggatgacctagaggcgcggtgcaaatcgaaggaggtatcaaactttactctaagcaagttggatctctcgtaggtttcagagcaacaaagacgcgtttccgggaggtctcgcggagggttctggtactgtcttcgctacgccagccggagaatcgagggagtgatcactttcgctccttgtttgttttaggattttgtgttttgttttagacttaatgcctgggaaggcttttatcctttcgtttactgctttttgaacttggtgcctgagaaggcttttatcctttgttcgtttaagtacttggatgcctgggaaggttttttttatcctttttagcaagtatgttttatctttcgttcgagtgttgacacttcgttgattttggtgtatgatcacctcgctttgtccacgttccggataataattggacttgtttcgcgtccaagttattttcagatgtgatatggtatgtttttcgaaggttaaaactttgagtgagtttgagttgttttgtcttgggaacctgttgaagtgaggtcacacaaaggaccttccagattttgggagctgggcttgtggtatcgctaggtcgcgaataaaaccttcgtttcttccttgtttactatgttatgtgttgatagcgaaagagttagatttggttgtagtaggtgagctccgatgaagccgaagtgatgtgttcttctaagtttagttcactatcgactttttggaagcgagatcacaaaatggatccgccaacgttcgggtgttgggctttgggtatcgtaagattacgaatgagttttaaatcatagtgtaaatgattgttttttgcgaaatatgataatgagtatcaaaatttccttttattcttatctcgaaatcgttaagtacaaaaggaggtaaagcaagcgacgatctggcgtaatcttacgatacctaaagcccaacacccgaacgtcggcggatccattttgtgatctcgcttccaaaaagtcgacagtgaactaaaacttataagaacacatcacttcggcttcatcggagctcacctactacaaccaaatctaactctttcgctatcaacgcataacatagtaaacaaggaagaaacgaaggtttcattaacgatctggcgataccacaagctcagctcccaaaatctggcaggtcccttgtgtgaccacacttcaacaggttcccgagataaaccactcaaacttactcaagtttgaacctacgaagaacataccatatcacatccgaaataacttggactgaaaacaggtccaattattatccggaacatgagcaaaactaggtgatcatacaccaaaatggacgaagtatcaacacgcgaataagagacaaaaagtacttgttaaaagagagaaaagccttccctggcatcaaagtacttaactgaacaaatgataaaagccttcccaggcaccaagttcaaaaagaaacaaacaaaaggatgaaagccttcccacgcactaagtctgagaaaaaaaaaaagagcctaaaacgaggagcgtacgggtcactccttcagctccccagctggcgtggcaaagacagtaccggaaccctccgcgagacctaannnnnnnnnnnnnnnnnnnnnnnnnactcatccaatccgattcgtgcccttgtttgtcgacgtcatcagacgtaccacgacatctcgaaantggaggatatcgacttgctcagagtg

SEQ ID NO: 5919 - DNA, 3887 bp, Arabidopsis thaliana landsberg
atatatatgggaaatcgatcgaggtagaccaatgttatgtaaagtagaaacaagactgaaaaaggcgtagagagcaataaggtcgtaatcaatttgtaaaacagactagaaaattccaacggaaatccaatttacattcctcttcacgacaaaacacttattaggttctgatgtgtaaaaatggtcttaaagccatatttttgaaaatgactcaaacgaaaggaaatgaaagaaaaatatatatttttattactaaaaagcaagagaaaacaagtgctagagctagcctagagatcgatccatcaaagcaaagcaaaatgaggaaggccatctaagattagcatctaagcaagaacaatataatgatattcgtccgtgtgtgtttattaagttatgcatgaatttctcagtttgactcgtgcatatatactatgttgattatttattgcttttgacatccatatctaaaagtaaataaatatagactctgcctacttgattataccagatcacaatcaccaaatcatgatataaaaaataaataaacagaagtttagcataatgactgaatataaatcatgattctaaataaccgactgaatcataagaaattgcgcaattccgtaatcattgttcaattcaaccggttatgtactcatcatcacaatcgtgttaaaacaaaacaaaacaaaatctgtattagaaaaaaatgggggagaaaaagacaagaataatgtatgggatgctcgagagtaatttgagggaaatcacaagtgggctgaagaacttgttgagtttcttttgacatatcaatagactaagaagtcacaagtgggctcaagaacttgtcgaattactttcttttggcatatcaatagactgagaggtcacaagtgggttcaagaactaggaacttgtagaaaacttgaagaaataaaataaaaagggagggaccaaatggtaaaaataaaacataagaaaatatttgctataaatagagaagaggagctctaaaaccccaaacacttttattaaagaacttgtccactgtcttcttctgcccattttaccattttgattaggctctctgtttctctttcttggttctaaaagatatccgtcactctttagtattatgggaatcggtgaagaaagcacaaagcctatttgggggagcgtgaccacacgtcttcaggctacgctctcaacggcaaaatcatgctctcctccgtgatcgttctattcgtcgccgttattatgatcctctgcttccacagctacgcccgttggttattccgtcgtcacaagcgtcgcattcgccgccgtattcgttctcacctccgcactctctccgccattacccgagaccaagctctcgaccaggctgttctcgacaagattccgatcttcgtttactcctccaagaatccaccaccaccagaagagaaggaggagtgctccgtctgcttgtcggagttcgagtaagaagacgaaggccgtcttcttcctaaatgtggccactcttttcacgtcgactgcatcgatattatggttccgttccagatccacttgcccgctttgcagagctccggttcaacccccgtttcaggtcattgaaaccggttcttcttcttcttcttcgccgttgacatttccgacgaagggttgcgagagagaaccgattgacctcgccggtatcattgtggatatttccagagaagttgaatttgaaggctcaaatccgggtctacccatcgaaaacggatcaaagtttccgggtagtcgggttttgtctttaaaaaggctatggagcatctgattgcgggcgggtaaatgggtttctatttttttcaaaaaacgcatgaactttgacacgtggaatttatatcagcacacgtggccgttactcctggggaccactgagcctgagcgtctacttctaattagtctaatcacattaatttgattacccgttcattattattagatttcgaagaaaaccattcggttgtacaatagtaagttaaagttattacaaatcgtattgaatcaggcaccactaaataattatttgattaaaaaaacaacacatgaatgattaaataatttaactaattaacatatcatatatagtataaggttggttgattatgcgatcagtccacccacgaaaggcactccggtttgtccaatccaaccttcaccaacaaggaaattggtgaccgtgaaattggaagcatcagttgcgttgatgacgtgataaccaggccaagtgactcggtttgtcgtgtcagaaccaggtccggtattattatattccgcgtagtaaagtgtgctcaatgcaaaatcaccagaccatgcattccaaccactcggttctagaaacccgtctatgtaagtttgcatgacaacggttctagaatattccttccatggtcgaccaagataagtcttcactgtatagttgctcgtagccaaatcatctgccggtcttatagtacaaccatgaattgccgtcccagtgttttggttcggatcagtacgaccttgagccgtaacctcgttcgattgacctttgcgaggttgacgtggatacaaattacagttttgtaataccactgcagcgttaccaaatataaaatcaacagtaccatagacatcacattcacgataaaactgtctgagagaatgtgtgtataacgtgtcttgataggcttcaaaactacaactgtagaaaacagacaagtccccaccactcctcaatgccacagcttggcctttggttggtcctgccgtattgcggattgttatgtttacaccaataaagttgggacctgatagaactgccatttgtgaacaaaacgtagagttagttaattattagaattaaaaaaaaaaaactataaattggactatgaaacaaaatatttgtaaagaggaaaaaaaaaaagtttattggactatggtattaggttagttgaggacacgacgaattgacgtggagtcaagactttcggtggaccatccgaccaagtcgccatccattgcatgggaaagtctatactaaaaagctaagtggacttgcaatatttttatgttcaacttacaacagttattgtttcttaattaatgatctacatatttgataaacaaaagtttctcaaacaatagttacatcgcacttgcacgaagaagccatgttttgtgcacatgtcttcatattttctaataattttaaaaatcgtgtggacaaaactctaatgctaatctaaaccgtatattatgttctaattttttcaatatgaagttggttttgtgtgattaaatgaaataaatatgaacttactaaatgtggctgaattgaaagttgtccatccatcaacgacactcctgtttccggtgataacggtctggttgatgccgtcaccgatcatcatcacatatctcttgttcttgggaacttccacgtattcctcgtacaatcccgccgttacgtagatcaagaagtaaccgttactaccgtcagttttatttggtgcagctgcaatggcggcgtttatggtcgtgaagtttcccgtcccgttctggatcaccgtcacaatgtcgctcacctgaacggcgtctgcatccgattggagaagctttcttctagtcacggtgttgtaaacggcacgtgccctttccgtcatctttaacggtaatttaccgttacggaaaccaaaaaactttttgaacctggcttgtggttgccaaatcggtctcgatctttgccttcttggcacccaacctacaaagctcaaataccaaaatgcattttcatattttagtttatatatgtacaggcacacatatttctcctagtaatttgtggttgtagtttctattat

SEQ ID NO: 5920 - DNA, 5386 bp, Arabidopsis thaliana landsberg
aaaaagcacccaaatagttatattttaaagatggattttatatgaataaaattttttaaacttttttgaaatagagagatgtcgttgttgtgtctttgtggagcgtcaaagttgaaaaaaagcgacagcccaagcgcataaatcatccactgctccttcttctctggcacatacacgctcctcccactttcttcttctttctctcgacgaatgttcttcgatctttgcgctctctcaagtctgtggaatcattagtctcggtatgtaatttctttccgatatttagctaaatttgaacagatatggtttcgattgaaatttgtcaagcggaagtttgtttgaatttaattgtgtgtgttcttagtgcgatactgtggtagctgatgatgattatgatcaggtttaaatgtgaaggactcgctcgcgcccattgagatggaatttgaattgtattagtagacttttcaataaatttggttacatagttttggaaagaaagcattaaatgtgaatcactgcggaaaaaaagaaagaaacaacaaaacggtcattgttgaggtgatacagtataataaatatatagcgggattttgtcggatgaaattgaaagtaacatttacggaagattttgtttcctttttttgtacgttagttcaaatttcaaaacttctatcagttctttgtctgtttttttattaaagcctaatttcttccttcttctacggattctgcagagtactattattttggacaaaggaggagcaaaaaaaaaatggagggtagaggttggccatggaagagaaagtcttcggacaaagccacgactgagaaaccagttgttggaatcgagtcaactcctgtttgttctttgtcctacttggcttctcttgagaatcaggtgctttaatttaacaccaaacctctgttttatatagttttgtgataatctgtcagtttttgtgagatagaaattttcatttgaagtctttttttgtgtgtttgatttgtgtgtcaggagaagtgtaaaaacacaaactatgttcagataactatggattcatacacacatatgagtagaatggaggatcaggtcaaattgtttgaagttcaagttaaagatcttaaagaaaaactcactcttgctcactctgagatcaacactaaagaatctttgattcttcaacatgccaaagtcgctgaagaagctgtttcaggtaaaatgttatttcagcatttttgtttgtttgttttgagatgttttcttttgttgcggactatagtcttttgttctttttaggatgggaaaaggctgatgcagaaactttggcacttaaacgtcaacttgagtctgttacactcttaaagctcactgcagaggatcgagcatcgcatttggatgacgcgttgaaagagtgtacaaggcagataaggattgtgaaagaagagagtgataagaagctgcaggatgtgattcttgctaagaccagtcaatgggataagatcaaagccgagcttgaaggaaagatcgatgaattgagccagggactacaccgggcagcttctgacaatgcagcactcactagatcgttgcaagaacgatctgagatgatagtaaggattagtgaggagaggtctatagctgaagctgatgtggaaaagttgaagactaatcttcagttggctgagaaggagattagttcgctgaagtacgatgttcacgttgcttccaaagaagttgagatccgcaatgaagagaaaaacatgagtttgaagtcagcggaaatggcaaacaaacagcatctggaaggagtgaaaaagattgcaaaacttgaagcagagtgtcaaaggcttagaggacttctacggaagaagcttcctggtcctgctgctatggctcaaatgaagctagaagttgaaagcttagggcatgagttcacagaccctcgagcacagagaaacatgtctcaaaatcacaatgcacacatcgcaaaggcagaggtttctactgatcataagttggaagagtgcaaaagagagaatgtatatctcacaagacgtacattggaattggaggaggagaatcagacacttatagaaaatctcgctgcccgtaacaatgagcttcaggtttcaagaaatgtatgcgctaagactctcggaaaggttaagattcttgaagggcagatacatatgtttaacaatgacaagactgccccaaaatcaaatagcagaaatctctctgaaagtctatccagtggtcatgatcataattatccgcctagtgtcacctccgtatcagatgatggatttgatgaagaaggaagttcttctgagtgtggcccagcaacctcagcagattctcataaagtgagaaaggtaagcgttaatggttcctcaaagcctaggagttctagtagactggagttgatggatgacttcttggagattgaaaagttagcagctaatgatccagatggagctaactcagcttcaaaatcttccagcagtgtctgtaatagtaaatttgtggaaaaccagtcctctagtaagtccagtgagccagaggaggatgcaacaacacttgatcagctgttagtggttctccgctcaaaaatcaacaggatatttgaatctcaagagggcattagcattgagaaaatcgttgaagccgcaagattttcgatccaagagatgcaaggatcatcaaccaaacgaatgtcaagtcgtctttttgaagttactgatgaaactctagagaaacatgtggatatccaaaacagcgaaaaggagcagaagaacaccaatcaacaagatttggaagcagctgtttccaatattcaccacttcataaaatcaactacaaaggaagcaacacaacttcaggacatgaatgggaatggacaactgagggagagcttggaggatttctcttcatcggttagtagatatccaactggtgaatcaagcctttctgaccttgttctagaactctcccgcattttggttctagctagtaaagagacatatgttgcagagagaaacgagaaggttacattgctacaaaaagagattggagagtcagattgtgatccactgggagatacagaggatcaccgtgtagataacttgatcaatggtcatgagttgaatgattcatcatgcaagagcttgttgaaagaggttgaacagctaaagtttgagaaagagaacattgcagtagaattatcaagatgcttgcagaatcttgaaagtacaaaggcagggttggaagaaaaagagcagctcatatcgaagctgaaattgcagctcacttcttcaaaagatctccaaagcttggcagaaactcagcttaaatgcgttactgagtcatacaaatcgcttgaacttcatgccaaagatcttgaagctcaagtgaaaagcttggaagaagagacaaagagacttgaaatagctttcaccgcagaaaagcatggccatgaggagactctagctaaatgcagagaccttcaagaaaaaatgcaaaggtataaaaaccataacttactaaggtcttccactatgcatagtttgttttgctaatttgacttatactataggaatgacacttgcgaaaattgttcatcatccaaactccaacctaatcaggtacacttcttactgtctaactgatatcttcttgataagattagcttcttgcatccgttttgttacatctactatataatctgcaattttcttgtttccaggagaaagacatagtatctgcaacagagaagcttgcagcttgtcaagaaacaattcacttactcagccaacagttagaatccttgcagccacagagcaaccacattctcaaatctcaatcccctgagaagaagtttcaacagcacaaaacctcagaagtaacaacaaactctgcactagatgatcttccacatgctcatatcattcaaccatctcgttctgttaagcacacagtgaatccaacggtccacgctatcatgaagtctagctctgtttcttcgtcttctaaagaagataatgagaagcatacgcgaggattaggtcgtttcttctcctcgaaatcgaagaacagtgcacgctaaaacgctaggagataacacgctcattatcttttggttcgtttgattttcctctcccttcacgatatgtgtatatgtttacatgcgttttgagtatgtgagaagagaacagttctagtgaagatcaatctttgtcttattattacttactctacacaacaacaaaacctcaccttaaaacgccctagttgtctgaattgatttaaaattgaagtagaccggactataaccgagaccgatttaaaattttgttacaaaaccgagcataaagaaagaaaacagagagccattttgtcctttctacaaaaaatctcaatgtataaaatttaagacaacatcatggagaaaagaagaacaatctctgataaagatgtatattgatatttcattatgtcaaaaatgataaatgtatgtaggtggaaaaatcattaaatggcaattatatttggtttatgataagtaattatcatgttcctgtgaagactttgaaaatttgatatacaaaagagttgagatgatagcgaataactttgttattttagtataatttgagtcattctaccatgaaaatggctctaccagaaaaataattctttttttttccaaagaagcattggtttaatttcagatgaataattattattcttagagacaaaatagaaataggaacgtgaggtccatgcaacatgaaaataataatgtaaatattcaaatggatattagaaaacataagaaatgaaaagtttggaaaaaaggacaagaaacagatcaaacagataatgctcatcaatgtcaaggagacaaggtctaaactcaaagcaacttgatagtatgggcaagccagagtatgtacagacatctgcttcttcttttttccttcatggtcttttaagtcttttatattgaataaaatacatttatcaggttttgttttcctctgaatatgatatttgaaattcacttgtgtgtctggtactctaactaaaattagaatatatgataatgcgcttattgtattaatcacaaaaaaaaaatatcagaaaaaaagaagagaagagtcaagataggagagacattgtggcttacatgttctgtccattctcaaacacacacattttcttatttcaacaatgtataataaaataacgaactttttttttgtcgtaataaaataacgagcttaaaaaattaaagtagcgactaaaagtaaaaagaaataaagatacgtactaaaatatctaattagcgtaacatatgtatatattattgttttgttgtatgta

SEQ ID NO: 5921 - DNA, 643 bp, Arabidopsis thaliana landsberg
tggttcggctcatcacttaaatataattgtctgatttgcagtctaatcatggctgcgcaagaccaagacctttggatttttagctaaggatgtattgccactactgtcctactctgctccttttgcaatatatcatcagtatttacaggtatgtcgttagaagaaaactattactaactgctctctaaccaagttagaatagctctaatctgcttcatttggtctttaggctagatacagtagacctatagctaagtgaacttgttcaaagcttttcattatatttggtagtaataaacaaactctcataataattattacagccgctggcgacatgtatgcacaagcttcaacagggtaaaatggcgatcaatctgcaaataacagaaccatggctacgcgaatatcaggtctgataatattctcaatttttttattttgtgtgtgttataataatctcactagatcatcaagaagtgtgttgaatgatatatgtatatttaaaatgcaggtgcttccttcaagatctcaccctcacatgcagatgagttcttttggaggctatgttctgagtggcatcagaatctctaccacttgactgttgttttcataaccagaaactgtggtttgatgtttggtcttt

SEQ ID NO: 5922 - DNA, 987 bp, Arabidopsis thaliana landsberg
atagcatgatattgtttatggaatgcaaaaactgctatatgatatggtttgttgctgttacagtctcctactcccgtatcatttaggaatcactccttgacagctatctgcatttttctaataatagggattatacctccgctcaaggtttacaattaatccggataaagtttatagaatgaccatgaggaagatcaacacggcagctgaaattctagaagttatgggtgctcctctgtcaggatcagatttacgagcgtatgtgatgtcaggtggtggcataacatttaagaaattcaagccaacaattaggagcaagcgctgctttcttctattccccgttcagggttctgagcaaaagggccttgttagcgttgaagttaagaagaagaaaggccaggtttcactttctcaactcctcagttcctcgtttactcaacttttttctgtcttgttcatgttgtaatcttcagagttgtaattagctttgacaaagttcagcagctcaactcttagctataggtctactgtatctagcctaggactgaatgttgtagattagagctgttgtgagttggctagagtgcagtttgcgaagggctgagtttataaggatgtctcggcagattttttggttgtagatttcgtaaggttggttgggcatttggttaagcggagagataatcttttcattcatcaatctctctatgctggtgaatttggaagaagaattggagtttcatagctgttctttcagtttcagttaaacgtttaggcttgtatatataacatgtggaaactgatattacatgacattgcgtatgcctgtctagtcttttaggtgctttcattttttcataccatcagcgaatccctattaccaatcacgctccctatattgtgagtttggtctacttcttatgttcatgtgtcttgttcttcagtatgacatgaagcttttgcggtagatattccatggcatctggt

SEQ ID NO: 5923 - DNA, 663 bp, Arabidopsis thaliana landsberg
tcagccattgcaagaaaccgcccttctggtgtgaacttcagtcctctgatggctcccatgttttctttcaggacagcgaatgattctgacgggttacgaatgtcccagagacggcatgtcgtgtcttggtttcccgttgctaagattagaccattcgggtgccaagcagatgcaaatgagtagtctttgtggcctctgaggcttgaaataacctgcaccgtaacaccaagtccaattacaacatttgaatgtggatgagaaaaaaagacaaaaagtgataagcttttaagaagttcagcagctcaactcttagctatatgtctactctgtctagtttaggactgaatgtagcagattagagctgttgtgagctaattagagagcagttagcggaataggatacttactttttcagaatgggaatcagagatcaagcattctgtactgtccccgagtacagcgagtagcttcccatccgggctaactgaggtattctgcaagaacattagagtgtttctagttagagaaatttggcagctagagacttgagatgttggtgagtgtagttgagaataaatagcctggaaactcacattgacagaccaatcgaaagttaattcactgacacgtgtaaagctctgagcatcgaatacccggatttta

SEQ ID NO: 5924 - DNA, 2004 bp, Arabidopsis thaliana landsberg
gttgtctgccatggagatgaagaagaggagttacgttcatcacgtgatgggcttgaacgtgaagagacttgttgttgggcttgttgttcacgtattgggcctagtgtaattgagcccatttgatgttgtgatccacttaagccattatcatcgtttacacgtgaatctaacatagccggttgatggattggtgtttcaggtggtacaacggtggttgttggtgtcgatggtggctgtaccggcggcgtaaatgacggcggtggtggtagtgtgatcggtgaggtggagttggtcaccggattcacattctccgcacatattgacttggcttgttgagtatcaaacgggaaactcgattcatcaaattgaacatggcgtgacacatacatacgtttagtgggaagatgaagacagaagtatgcgctttgtgaagtagagtacccaaggaacacacacagttgagagcggtcgtcaagtttgtgacgtgtatatggtcgcaaccaaggaaaacaagcgcaaccaaagattcgaagcttctcatagttcggtgagatcccaaagagtttctgaaacggtgattccatggagagcaccggagtgatcatgcggttaatgagatacacagctgtagagaaggcataggaccaatattccttcggaacggaggccgttgacataagtgcaagtccggtttcgacaatgtgtcgatgtttgcgttcagcaagaccattatgctccggtgtatgcggtggagacgtgagatgagtaatcccatgtgtagcaagaaaactccgaagcgcaacaaattcccctccgttatcggaaaacaaagttccaatcttgcattgaagacggttttcaacaagggctttgtaggctgggaatagatcgcggacatccgacttgcgtttaaggggatataaccaagtgtagcgggtgaagtgatcaattaagacaaggtagtatttgtggttttcaacagagtatataggagatgtccatacatctgtaaaaatgtattcaagagggcgatttgatatgatggttgtttgagagaaaggaagcttatggcttttattaatgaaacattcagagcaagacaaatgcttttgctgggaagaagaaaatggtaaagaatgttttgaaataatagaatgtaaaacagaagaggatgggtgtcccaatcttgaatgccaagacatgagagtagctttcggaccggaacatgagaccattgcagctgcttgaggagatgtcaccggccactcatacaactcgttattagtcttgccttggagcaatgggacccccgtactgagatccttcacctgaaatgaggcagggaaaaattcgaccgaaacccgattagtattacataatcgatacaccgagataagatttttgtgtatatcaggaaccacataaaattttatctaaaagtaaagcacgagtttgattgggaaggagagtggaaccggtgtgagtgataggcattgaagacccgtcggcaatgagaacatcatcaccaccattatatggctgatggagtgccatattgttgagatcagcagtgagatggtgagtagcaccagaatccaaaagccacggtgcggcagagtacgacgagttaaccgctaggtttgcacggggctgccatggtcgaaaaggagaactcggctggtgatttggtgcggcttggagggactgaaactgtgggcaacggcgagcgctatgtccttgtgtttgacatatttgacattttcccaaatatggtttagagactttgccgtcgaatctggtttgattgtaggaggactgccattgagagttggtgttgccattgttgctgttgtcggtgtatcgtttgccggtgttattgttgcggtcgttgttggagctgttgcgtcgcttgacattgtatggcagaggcagggaacaccgaggaggatgctgcttgcttacatagaagctttatccttaagactgagaagtctttcatggacc

SEQ ID NO: 5925 - DNA, 2326 bp, Arabidopsis thaliana landsberg
aaaggtgctgcacctccaagaccagctggtggtgtcggtaggggtcgaggcatcagattaatagatttagaggcagaaccttgtgaagttcgtccagcagtaggtgaacctgcttttaatcaagttgaagcggtagctgaaattgatattgctatggaaggtggtagcgcatagaaggtagttggtgtggaagaagattctagcacagctccagtccctgaaagggtaaaatttatgctaatgacattcaatcaccagttttttttttcatttgagagagatgctgatattgatttcattttacttgtataggtacaagttggaaattctcctgtatataagactgagaggaaactcggtaaaggaggctttggtcaagtttttgttggtagaagggtgagtggtggcagcgataggattggggccgatgcaattgaggtatattgtaaagaagcatacttgagatttttgagggatacagacgaaagaagtctaatcgttaacaaattaattatttttcttaccaggtggccctgaaatttgagcatcgaaatagcaaaggatgcaattttggtccaccttacgagtggcaagtgtacaagtaagtcttgcatgcattctatgtaaattttcctgccaaatttctctgatcaacttatttgtcatctcatctgtttctttttcttcttgttgtaaagtaccctcaatggttgctatggagttcctgcggtacatcataagggtcgtcaaggagatttttacattcttgtatgtaatttacaatgagctttgttaaatatactttcgatattgattgtgttatcatgtacaagtaatgctataatatatacttcaggtcatggacatgcttggtccgagtctctgggatgtttggaattcttcggggcaatcgtaagcactcttctcctctcaccacacttccttctgattgcaagattcttgatttgattcatgttcgtgtcatgtggcaggatgtctccaaacatggtagcctgcattgcagttgagtccatatctattcttgagaaacttcatatgaaagggttagttactatattttttcgtaacttctttgcaaatagtttcattcatttcgctttaactaattacaatgtattatctttcactgtactgattgtcatgctatgttccatccccatatcaaactaggtttgtccacggagatgtgaagccggaaaactttttactcggtcaaccaggaacagcagatgagaaaaaactctaccttatcgatcttggtctgggtgagtgtattcttatgaagaactttattctctctgatgctgcaatattttatgagatatgtaacttggtacttctctttgatgttggcattaatgttcacataatcttctgttgtttcagcatctaaatggaaagattcacactcaggccagcatgttgaatatgatcaaagacctgatgtgttcaggtatattcattagtttatctttctttttctttatattattcatatttgtttacatgtttattatgtttcaaatgcaggggaacgataaggtatgcaagtgttcatgcacacctaggtcgaactggaagtaggagagatgatctggagtcgctggcttatactttaatttttcttttgaagggaagattgccatggcaaggatatcaggtctgttttttatttctcttgacaaccttacaattatgtctgattcatattcttcattaattgcaatcagttttatgtatatattgttacttttttttgcagggtgacaacaagagctttcttgtttgcaagaaaaagatgtcaacttctcctgaattgatgtgctgtttttgtccacccccgtttaagctcttcctcgaggcagttacaaacatgaagtttgacgaagagcccaactatgcaaagcttatttcgatttttgattctcttattgaacaatgtgcactatctagaccaattaaaattgatggtgctcttaaggttgctggcttttttctcgttcttatgcttaattattcgacttgttataaataattctgaaaatgctgattttgggtctgttggtttataggttgggcaaaaacgaggaagaatgcttcttaatttggatgaggatgaacagccaaagaagaaaatcagaattggcagtcctgcttgtcagtggatctcagtctataatgctcgtcgtcccatgaaacagaggtaaaagttgcatattcacttaaaagtttcgaaaaccttcgtgaatcaaatttctcaccccggtttaatgccatttttatttgtgtagatatcactacaacg

SEQ ID NO: 5926 - DNA, 1603 bp, Arabidopsis thaliana landsberg
ttttccatttcaggtagctctaaaacttgaacatcgcaatagttaaggctgtaactttggcccaccttacgagtggcaagtgtacaagtaagtttggcctgtttcttttctaaatctcctgccctgtttctctatttccttattggtcattacttatgtgttcttttatttttttatgctgtaaagtacgctcaatagctgttatggaattcctgctgtacatcataagggtcgtcaaggagatttttacattctggtaagcttttcgtatgagcctagtcacacattgagatgaatcaggtatctttaatgaagaaacatttataattatttcaggtcatggacatgcttgggcctagcctttgggatgtttggaattctttggctcaatcgtaagtacttttatcattctatattttcttaccaaccatgctcatgcagatatgctaaatttattatttttctatttggtaggatgtctccaaacatggtagcatgcattgcagtggaggcgatatctattcttgaaaaactgcatatgaaggggttagtgcgaatttttgttgtcgccaataaatccatctatttcgaacaaaaatatttacatttgcaccaaaaaattacgccattgctgagctgactgtcatgcattgttcattccctacatcaaacaaggtttgtgcatggagatgtgaaaccagaaaactttttgcttggtcagcctggaacagcagacgagaagaaactataccttatcgatcttggtctaggtgagtatctgttaaatatttacaatcgttttatttttcaaaatcttaacatatatcatctatttcagcatcaagatggaaagattcacactctggccagcatgttgaatatgatcaaaggccagatgtatttaggtattttgattggtgtatgttatctttcctactattgttggtatatatattttgctcacatctttgttacgcttcatatgcagaggaacaataaggtatgcaagttgccatgcacatcttggtcgtacaggaagtcggagggatgatctggagtcattggcttatacattaatatttctgatgcggggaaggttgccatggcaaggataccaggtgagttatttatctatctactcacaatctagaaccttgtaagtttcagttgtagtcaataatacatggtttttgttcacagggtgataacaagagctttcttgtttgcaagaaaaagatgtcaacctctcctgaattgatgtgttgtttttgtcctcccccgtttaagctgttcctcgaggcagttacgaatatgaagtttgatgaggagcccaactatgccaagcttatctcgatttttgatactcttatcgagccatgtgctatatctagaccaattagaattgatggggctctaaaggtgctgactttggttcatatgtttatttttcactatttataaataatacaataagtactgatattttacttttgcatcaataggttggccaaaagcgaggaagattgctaatcaatttggaagaggatgaacagccaaggaagaaaattagaatcggcagtcctgccacacagtgaatttcagt

SEQ ID NO: 5927 - DNA, 2989 bp, Arabidopsis thaliana landsberg
  unsure (1)..(2989): unsure at all n locations
cactcttcgtctcttcgtaagtaaaaaccaaatcctatgtttcgcaccctacattacttaccaaaactcttcttgatttctaaccgttagatttgtttactctttccaacaggcacgaaactgattcacgtcttcgtgttcacatcactgacgcgaaacaacaacgatgggaagttccatacaatctcctcccacgagaacaaccaccacaagtcggaaaagtcatcggaaaatcaagaaaatctccaatcacagttcaagaaatctccggatccgaacttatcttcagttacacaacagatccattcactttcgccgtgaaacgtagatctaaccacgaaacactcttcaacacaacaagctcattagtgttcaaagatcaatacctagagatctcaacttcattaccaaaagaagcttcactctatggtttaggtgaaaactcacaagctaatggtatcaaactcgtacctaacgagccttatactctttacactgaagatgtttcacctatcaatcttaacactgacctttatggttcgcatccgatgtatatggatctaagaaacgttggaggtaaagcttatgctcatgctgttcttcttttgaatagtaatggtatggatgttttctatagaggtgattctttgacgtataaagttatcggaggtgttttcgatttctatttcatcgccggaccgtcgccgttaaatgttgttgatcagtatactcagttaatcggaagacctgctcctatgccgtactggtctttaggtatgttcatttactgctctgtttttttttgttattgttttctctctctcttgtcttaatgttttgtggtaatttaaataggattagtgattatgtttgtggtcctatagtgttttaagcataggttaatgtcttaatgatgagtattagtattggttcaggttcctataagtttgacttttagtcaaacgaagagtcacgtgaacatagattttgtgtatcaaccaaaccaagtgagatcgaaaactattaaattaatgttccattagtgttgatatttcattgtaaagagtatctgattttccgacacaacttttagaatagaaaagctttacccttttctgagggatattggaaagataatgaaaagtttcgctttctaattatggtgtttccaattaaaagataagaacgagagattggtctttgctttccatttttgttgatcttgataagaatgattattgcgattttatttggtccctataggatcttgaaattggaccattatatagacatggaccacggttcttgaaatgagttgaaaataaatgcaaatcttgattttgccatgtgatagatttatggttatactaatcgtttatattaatgttgtgttgtaggatttcatcaatgtagatggggataccataatctatcagttgttgaagatgtggtggataattacaaaaaggctaagatcccacttgatgtgatttggaacgatgatgatcacatggatggtcacaaagatttcacgttgaatcctgtggcttatcctcgtgctaagctattggcgttcttggacaaaatccacaagattggaatgaagtatattgtgatcaatgatcctggtattggtgtcaacgctagctacggtacatttcagagagccatggctgctgatgtgtttattaagtatgaaggaaagcctttcttggcgcaagtgtggcctggtccagtttacttccctgatttccttaacccgaaaacggtttcttggtggggcgatgaaattcgacgtttccatgagttagtacccattgatggtctttggatctacatgaatgaggtctctaatttctgctctggattgtgcataatcccggagggaaaacagtgtccgagtgggggagaacctggtgtaacgtgttgcttggactgcaagaatataaccaatacaagctgggatgatccaccttacaagatcaatgctactggacacaaagctcctctagggttcaagactattcccacaagtgcttatcactacaatggtgttcgtgagtacgacgctcacagcatctacgggttctctgaggccatagcgacccacaaggcgttgcttgctgtccaaggcaaacgtccatttatattgtcacggtccacttttgttggttcaggtcaatatgctgctcactggactggagataatcaaggaacatggctgagcttgcaagtatctatctcgacgatgttgaatttcggaatttttggagttcctatggttggttcggacatatgtggattctttcctccaacaccagaagaaatctgcaaccgttggattgaagttggtgcgttttaccccttttcaagagatcacgctgattactacgctccaagaaaagagctttaccaatggggaacagtagcagagtcagctcgtaacgctcttgggatgagatacaaactccttccttttctctacactctcaactacgaagcccatatgagtggcgcaccaatcgctagaccgctcttcttctctttccctgagttcactgaatgctacggcttgagcaaacagttcttgctcggaagcagcttaatgatatcgccggttcttgaacagggtaaaacccaagttgaagcactgttcccaccaggttcttggtaccacatgtttgacatgactcaggtcgttgtttcaaagaacgggaggcttttcaccctccccgctccgtttaacgttgtgaacgtgcatctttaccagaacgcgatactacccatgcaacaaggtgggttgatttctaaagaagcaagaacgacgccgtttagtctagtcgtcgctttcccggcgggagcatcagagggatacgcctccgggagactctttcttgatgatgatgagcttccgcagatgaancttgggaacgggaattcnncgtacattgncttctacgcatcggttggaaatgagagtgtggagata

SEQ ID NO: 5928 - DNA, 4042 bp, Arabidopsis thaliana landsberg
acacccaaagaaggttggcatcaagcatgttaaggtgactagaatacatttttttcttagtgtttgtatcgtctgcaccagtgttagccgagtgctttatcctctttttcctgtttgtagattgcatgcaggggtcgtgatgctgtgcctgataatgtctctgtaaacacctttgtcaacgaggtacttgtttcataagttcagttctcttcttgactgacgaataagttcaattcacgtgaagtttatttcctcctcttgcgttttaattgaagctcataattatagctcatttgaggacactgtcttcaggttctgcagttcgtccttaatcaaaaacacgcaaagaagtatgtcctcgtccactgtacacatgggcataatcggacagggttcatgatagttcattatctcatgcgctctatgccaacgatgaacgttacacaggttcaattctttctttcacatttgtacttgttcactcgttttattaatcctctttagaatggagattcttacctctgtgtggcctttggcaggcattgaagttgttttctgatgcccgcccacctgggatttataaaccggattatattgatgctttatacactttttatcacgaaataaagcctgaaagtgttacttgcccaccaactcctgaatggaagaggtctgccgagcttgatcttaatggtgaagctgttcaagatgatgatgatgatgattctccgcctgaccctgttcaagtaagcgtggtgcaagcaagtgcttattctttaataagctcttatgtttaaccctcatattacagaattatccgttccaatgaatatcatgcatgcattgttaagctcttacccttgtgaatacagagctcataattttacgaacggctactttttatttttttttagcttcatagctatggtttctaggtcatttatttactacataatgatcttggaaaacaacagtatcatctaaacaaagataaactgttctaaagattatctatttgtgcatgttgatgggtgcagttgagtctttcaaagctgacaaatttcattaagtgtcaatctcactttgcttgagttttctaatgagtctcttgctgatactgcctttctttactgttttgttgtttcaggaaatcaatcaggagaatgtgaagatgtcaaatgatgacattttgggtgatgaaataccccattatcaggaggaagcttaccggcaattctgttataaaatgcttatgatgaatgttggggtatgatatcaacactgcttatatgttttcctagttttgttcttctctatctatgttctcctatggaatattatgttgagcccaaatgttgtttccagcatgtatgtttcattaaaagcatgctaaatgtttttttagactaatgcaataatactaatcttcattgattggaaataatgtgagatattagtcatttgatggattaaaatttctctgatccagggaagaggatttatgcaattcccaggttcgcaccctgtatcattagacaggtcagaatctctgctttacttttggtattgcgtacaaagaggatttagcaagtgtatgttctgaattccagaggttcattagtcctagtttctcaatgtagttaaatctttacgatttttgcatacacagggagagtttgcaacttttgaggcagcgatactattatgcgacatggaaggcagatggaacacgttatatgatgctcttaactatagatgggtgctatttgatagataggagctttaagtttcggagggtacagatgcgttttccctgtaagcactcacgtgaggtcagtaattttctgtcattgcttttgtgttgatatctaaaacttgtgaattccctgacttatttggttttgggtggtagggaatttctgataaagtgcatcactacactttgcttgatggagagatggtcatagataccccgacaggtgagcaaggggaggcaaggaggaggtatctcgtatatgatatggtagcaatcaatggtgaatcagttgtagaggttggaactgtcgatccattatattatcaatttctttggaatgagttcagtagcacgagatcttagcattcattgttttccatcatgtcactgtcatttctactcggtatcaaccagtattatagatgctaaagacaacttacagttgatttaaatatctaccagcggactttttgtgaaagatggaacatgttcgtgcgtgaggtgatcggacctcgagcagctgagaagctcagaagtcattgctacagatatgaccttgagccttttgcggtgagtttgcattttctgttccatgccatattttccttctcctttatataaatttgttggtaaaatttcattgttgcccaggtacggatgaagggtttctggttactttctactgttgagaagctgttgaagaataccattccatcgctttcgcatgaagcagatggcttaatatttcaggtaaccaagagatgtttatatttcaggtcttagtcaatattttttcctgaacgcagacagacacaaatttaagagattagtataatttgtttccctggataaagtaggaagattgcattacttgagcatgacttacatttggtttattagggttgggatgatccgtatgttccacgaacccataaaggtctactgaagtggaagtatgcagaaatgaactcagtagactttctgtatgagatgggtgaggaagaggggcgtggtttcctcttcttgcatgaaagagggaagaaaaagcttatggaaggatattcagttgagtttagagatgattcggacccgtcaagttacaatgggaagattgtagaatgtgcttgggataaggataagaaagtttggtttagcatgaggatcagagttgacaaaactacaccaaatgatatcaacactgctcgtaaggtcagttgaaggattttctatatatttaggtattgcttttgtcaaatggttatattctctacatgatttctaatgtgatgttgtaacacaataggtgataaagagcataaatgataacatcactgaggaggttttgcttcaggaaataagagagatcattcgtctcccaatgtacgctgaccgcattcgaaatgatagtcaagctgcccgccgccggtagagattacatttttcaattttgtttagtagtaatacactagaaccaactaataattgttttgggcggtttctcttctctcacacttgtacagctaaataatctacatggttatacacattacatctagtttgtttcccaacggaatttgaaactagaattatttcattgataatcctcaatacgtgatatggaattattaactatgatacatatccaacggtgttatgactataacgacgacatattttaggccaaacacgtcaagatggcttctcctagcacgtgcccttcaattgcgatcagcaatctctctttcgtcacctagctcatattcagaacaactatttataaaaaaaaagtactacatatcattcaaatcagataggaaaataataaaacgatgtagtaccgtgtgaccaatcttgggtttatcatcgagagcaaaaagcttgaactgaaaacggtgaccgtgactaggtaagagaggtccacgccatcccggaatcttgtgatcgttgttcccttcccgaataccggtagtctgatcctcattgccggaatatccttccggtaggcctttcatctctggtggtatgtcgacgacaacccacaccgtccatggcaccagcgggccactaggatcaggcgcatcgatgtcttccaccaccaaagctagcgtttttgtaccttctggaacgttgtacctacaccatatcaacattcttactaattcaatgcaatcctttgggtcggtcaataaaccacaaaataattaaaaaatggaaacatgttacttcaaacagaaaaaaacaaacaactaggaagccttgtgaattgtgataattaacaaatcgaca

SEQ ID NO: 5929 - DNA, 367 bp, Arabidopsis thaliana landsberg
gaacaacttttgtgcattaactgacggtccctcgctaccaatttgaccaatacgatgtttgatactacgatgtggaccaagatatccaggactggtgggatctccgatgtctacaagataatactttccattcgggggttgaaagaaaaaaggtatattccttgcacaataatttaaaagctttttttcatgagctctacgaggtacaccaacctatgcgtatatgaacttcatatcataattacatattataagaacaatcattggaggctctatcttacatcaagcgctcctacacacactattagacatgggtattatcgatcatcaatcttcaaacacggtttactgttgagaactcacaccc

SEQ ID NO: 5930 - DNA, 607 bp, Arabidopsis thaliana landsberg
atgctgtagcaggttgctttatctttagatttctttgcttgtagattgcatgcaagggtcgtgatgcagtgccagataatgtgtctgtcaacgcatttgtcaatgaggtattcttttgtagccaaaatgaatcataactgttttcctgaagttgtattttattttctcttatgttcttgtgtaagcagttttgtttactgttagtagctcactaaatgaaactgtctgcaggttaatcagtttgtcctaaatctaaaacactcgaaaaagtatattctcgtccattgtacacatggacataatcggacagggttcatgatagttcattatctcatgcgatctgggccaatgaatgttacacaggtgagtattttcacttctctcattgtatttgtgaactttatgtacctcctatgagtatagaatcttataacactatggtttctgtcaggctttgaaaatcttttccgatgcccgcccacctgggatctataaaccacattatattgatgctttatactcgttttatcacgaaataaaacctgaaagcgtcatttgcccatcaactcctgaatggaagatgtctactgagcttgatttacatggt

SEQ ID NO: 5931 - DNA, 1614 bp, Arabidopsis thaliana landsberg
actgttctacgtcccaagatagagattggggatcgtatgattccattggttcattatttttgaatcaagctcttgacttattggtccatctgtcctccaaatgtacgtcccttcggtttcatgggggacgatcgaggcttcggcttattgaaccatccatgttttcgatctggttctttaacactacaaccgcccatggtttactaaccgtttacccgtatggtccatggtggtcgttacagcttccggtttatcgatccatccatacaatccgaacgatatccttatcacacctaagggcccgtggactcatccatcggatcatagtaggctagcccattaaatcctttttccgtcgaccttacgtttgctcgcgagtccaacatccgttttgtccatcggttcccaccgtagactttcccgttggttatccgtcgagtcaccctttggtcttatcgttctctgatcggttttacaatggttgaggagatagagacatgaaggcggccgcgatattgatcctatagggtgaatcacgttccttacccattcttggtgatttcttccttttaccggtaagattccatccatgggcgaccttttggtgtatttggatgcacttctccttatgcttcctcgaacaccattcccggtcttgtccgatccgtctcctcgttagatccgatccgtctgtctaatgatcggtctaccagatccgattcgtctctaagacgatcagtctaccccatccatccgctaaactccatcaaaccgttagaccgggaggtagcatgcacattagttcgatcgagttatactagccgagccgtaccttctttccgaccaacaacttcgtggtgtatttggactatttgtgatgtgtggttgatctcctaaaggccttgggcgtcctcccttatatatgggcgaatggatgcttcccgacgcatcacatccgttccttgcacccttccgaagtgttgcacctttccaatcgtagctgttcgacctattccacccttggacgatgcaaccgttcgttggtaaccgctcgaccttacacattttggccgagacacctcttcacccttgatctaccacagtccaccagctcgagtgtcagctgactagaccatccacctgggttagtactcaatcagctcaccaagctgattcgagctatcggtcagctcacctagctgagctagctagtcttccagctggtttagttcacctagcttagctagctagttcatccagcttgtctagctcacctagatggttcagcttgaactttctcgttcttccgactaagtcttttggtctgttcctcgaccatgatatagttttctcctaaaacaacccggcctctttatgaacgcgggacgcggtcgttacaagtctacccctttaaactgaattcgtcctcgaattcgtcgggtgtaagatctcggttactccctaactcagacacgcgcgttacaagaagcctccccgtcgtgaacatcactgtccttagtgattgagttggagatatgtcgagtaggcagctctcaatcatgacaaatagtgatagcgtgaggagtggcgtattctttcggtttttgtatggac

SEQ ID NO: 5932 - DNA, 1495 bp, Arabidopsis thaliana landsberg
taatattagggaggttggccataaaattaataaatatttagggggtttttttaccggggttaatttgagtcgtgattgggtgataattctaattccatcaaacattaatatgaattccaaattacacatattcaacatcaatccgattaatatctaaactgcaatctgatttaaattggagggatcgcgaatggtaattaaatgtgttattttcaacacctaactttggaccaatgtctgcagaggtagttggacgcgggtatcgataatttttttttgtagcccgagcttgggtctgataatgacactcgtctttttttacttatggtttgttattggtccaatctcacgttcggattcaaactactagtattggtgtattacgtagaataaatgactcaatattcaatcagacgtcatatcgaacaactctcaatattctctaatctctataccgaaaatatatatgttcctaattaactaataataccaagcattcaaaatattcgacccggcccaaaaccaaaagcatgcttcaaaaaccaaaatatatgataaatctagccacagtatatacggattataaattgtttttggtacgtctgtaaactttttagggttacatcgatcatttgggtagtgaaatcaatcatccgcctaaacggaatacttgaaatttatggtataccttttaatctacttctatagaatatcaggtgcattgactaattaagcaatttttaaataccatctaataagcattttcgttgtatagtggagtatgttttaaaggtgtgctcctgattacataattatacgtaactaataaactactattttaaaattttggtacggccggtctcaatagaaatttagacggattcaatcatccaaaaagatgatatgatttaaattaatgatgtgttactaaatagtaaattgaagaaagggtactttaacgttgctttcacataaaatatgcctagctagacacacacacatatatcttttctgtataaatctcgagatgaatcatatctttggctttcaaaacaagggtatctcatattaaaaaaaaacgtgagcccactaattaatatggtcacttcaattcaaattctcctactctctctctatatatctctcccgcatgtgtgtgtttagtgtttacacatgcgttcgctcatctctctctatataacataattcatttctctaaacttatccatcctccttctgtttctcctaaaatggtgaaggagtcccagaaaatcgtggccgtagatcaagacattcccgtgatagatatgtccttagagaggtcacgagtgtccatgcagatagtaaaagcttgcgagacctctttttggtttgattcttggagctctcttggttgtatcatcgagaagcttggtgaacgcgggtacattgatcttggcataccaaaaacagccacagttggggaggtaatggcaatgcaaagaagaagacatca

SEQ ID NO: 5933 - DNA, 1897 bp, Arabidopsis thaliana landsberg
tagaggatcccgtgttaaacggaattaggcttacacctatttcctaaatgattttggtggttgaattgcccaacacaaatctttggactaactagtttgctctagtctataagttatacaggtgcaaaaggttcacacttagccaataaaaagaccaagtattgagttcgaacaaaagagcaagggtcaaccgaagtgtgccctggtctggcgcaccgaactgtcggtgtgccaccggacagtgtccggtgctccaccggacaatgtccgatgcaccagggaactccaagctgaattcaacacttcgggaattctcagaaccggcgcgctataattcaccggactgtccggtgtaccaccggacagtgtctggtgctccaacgaagacgctgctccggaactcgccagccgcaggatttcatgaaggctgctccgctataattcaccggacatgtccggtgtgcaccggactgtccggtgagccagcagacaacggctacttcggcgccaacggtcacctgcaggcgcattaattgcgcgccagcgcatgtaacgtcaggcacgcgcgcgatggcacaccggacactctatagtgcatgtctggtgtgccaccggacatccaggcgggcccagaagacagagctccaacggtcagaacccaacggcatcggtgacgtggctggcgcaccggactgtccggtgcgccatgcgacagacagccttcaccaaacggctagtttggtggttggggttataaataccccccaaccacccacacttcaatgcatccaagttttcagccatcaaacctcatacaagagctatagactttattcaaagacacaaccaaagagatcaaatcctctcccaagtccggaatcactccaaagaaattagtgactagagagagagatttgcttgtgttcatttgagctcttgcgcttggattgcttttcttcttccttcttttttgtgctcaaactcacttgtaatcaaaacaagagacaccaagttgtggtggtccttgtgggaactttgtgttccaagtgtttgagaagaagaagctcactcggtctgagggaccgtttgagagagggaaagggttgaaagagacccggtctttgtgaccacctcaacagggattaggtttgcaagaaccgaacctcggtaaaacaaatccacgtgtctcactcattatttgcttgcgatttgttttgcaccctctctcgcggactcgattatatttctaacgctaacccggcttgtagttgtgattatttttgagaatttcagtttcgccctattcacccccctctaggcgactttcaaaggcgctgtgtccatgcgactatccttagtcacgtggtgacaacacatgaccccaccacgtggacggctcaagggcctccacgtagccaggaaggacaatatactccaagatggcgacagtgggtccggacccccatgggaaagtgccggacccctggacgcacagcccaggcctccgggcgaggttcaagacctccacaagtacaaaccagacccctaggatgggtcccggacccttcaggaaggggtctgggctactcgtagtggggtcccgggatcccaaggcaaagaatgcctaggccttaatcaaggttgggcgggggtccggtgctgacacgtgtccggaccataccgcgggcgctcccactccccgctcaggcggagacccgatgctgccacgtggactgtcgcccgtgacataagccaacgggcggagcctgacgtaaggcctctgggccgcgctgcctctgcatttattgcggagaagacgcgccgcttgtctatcccgctgacaggcgatgtgccccctcagcatttaatgtgtcctgttcactccgctggcaggcgg

SEQ ID NO: 5934 - DNA, 2722 bp, Arabidopsis thaliana landsberg
ccttacaactagaccttaaagacttctaaccaaacctctgattttcgtttttatttttccttggtcaaccgagagagggtgtctaatcctgttaaggttgtaattttccttacgcattttaattttcttatcatgatacatgtctcattcgtaacatgtatgctatagctaattactaataacataatatgaagacaaaattgaaacaagtacccaaaaacactgaaaaatcaataagtaacagtaatatagtatacaactttatattcttttgcttcctttggatagggatattatacgggatccatcagacaatttttatattgtgaacattgaaaaaatttcaatccattcgtgggatgcacaccattggaactccaagataccatttaaaagaattaagaataataatagcatagaagattgtgacatttcaaatagaagaagcaatagcatgttttatatctatgaagaagtagaatccttcttcttcctctgcacaagattcttcatccaattgacaccaataaatacaacaatcttggctttgttaatccctgctttggtcttgccggactttttcccggtgacgtcttttttgccgtcagttgtctcctccgcagccatcaccccaattcctccggtcccccattgatccgcccaactaggtgcttcactcgccattttataatgatcccaatatcttatgtacctatcagaacatattagttgaaatcgaataatctatgaatatataagcatgaccaaacaaacaaatacctctgattcttggagctcttcttggtaaagactaaagagagaatgaccgattttggatgagcaagataagtggaaatgtggagaatgtagactaatagtggatgggttgtcaatcttttgtttttaatgtaatataattatactatatattccctatttgcttgtcgtctttttatctaaagcttttattgtttgatacaaaatgtttaaatatgatttttgggttgtcatggaatggacttgccaactcaagttagttcgtttccaacttgcaaagcaaacgttgttttggaatctttcaactttatttataacgcataagaagaacctaatcatacgaaatcattttttattttgtagttccataatttactccacaaaacttgttctatttttataactctaaaagtcctaattccactttctataatcatggaagaaatgtaaagtttaaacataaatcaatgtttagggtatcaaaatgtctcaaacaccagtcactggaaatatcgcaatttttatatgaaaaatcgatcggatatatatgataaaatatgcatttacaaaaccgtctaaacaagttaaaatagcgaaggacttgtagcccctaaactgtggttaatagacatcaaaatcatctgtgtaaaatgtttagattaattattcatgagtgacgagtactttgttttacaacaaacacaaaaataaatcacatagatatgttaatgatctaagtctaacgcttaaaatatcggcttataacactcgccccatattttgttcctcaacaatatgtattttgccaaatttaaatccgaataacaacaacacaatgacaatactatcacatactactaactacgtatgcatggtcccaagatatttatctttttggaaaatttactttagcgcatccacatgatagtgttattttctttttacctacaaaataaatgaataaaatagcatcatgagacatattattgttatgaaatgtgatgaaatacttgtatttgtgttcctttctagttaggaaagattaataagataagcgtagagaaatgtagtattctattgtttaaaaggagtttagtgaaatatgttgaaaaggaaatagaggatctatccttgattagaaagattgaaagaatgtgcatgaaattgtcctatctatgtattgatcagaactatcaacatctaaatgacttctagtagactcaatagatctctaattaatgttacaattacctgaattatctgagttactagtccacttataccctgttggtatcgtgaatggatccaccacttgttcctcatccaccaaacgccgccgtgagctcttgccggtggcattgatgttcagtctcaaccaagaaggcgttgaaaacgatggacgtgaacttgagattcttctatctaatttttcatcatcgtgcacgtcatgttggtcttccattgcagctaatagatgttttggacttgagagcggtgtgtagaattcatccaacggtggaagagccacgaacttgctgaatgtcatgactacttttactgttgggatcaccggtatggacaactaaataccaaaaagatggaaaaaaaattgatgtgaaaaagcaaaatctaaaccggttttggattttttacgtcccaacaaactgtaatcttttactgttagtaaaataccgaatctcaaatccgaaccaaaccaaaccatataaatttgataacctaaaagcctaaaccaaatcgtaaacgattcattttgttcctctgactttatgaggaatgtcacattagtgcaactctaaacatcaaccaatgaaattacgacacgtttgatagaatgttcatgatacttaaaatttctcatgcaaaacgcttaaaataaatttgagtaatgttcaagaatgccccttcttaccttgaccggaaaagt

SEQ ID NO: 5935 - DNA, 1580 bp, Arabidopsis thaliana landsberg
tattttaacatgatcaaaataggcccactgtatctgttattttgtaaattagagacggttttgcatttgtgaaaggaaacaaaaaaagagaggttgtgcatgttgttcaacttcttaattagtcattatgattcattagtcattgcttgaccacaacacttaattcacatagaatacatcacttatacttaattagcctttttgcattgactgattattttttgatgcaaatatatttctgttcctcatatgaatcccattgctttatctacaaattcatgcaccatttctctgtgcttttgaattgtgaaaggatcttctttgaatttgaataacaatctaaggtttagtcatttgttgccaaaacaaagatctaggatactcaattttaaaaggaatttaaacaatggtcaaaactgtgaacaaaaagattatggagttttaattttgtatttacgttgactgttgtcagagataaatatgaaacataaactttttattaaaaagaagttattcaactctctcctttagagttttaataacagtcgccggggaaaacatggcaaggtcttcgccggcaaatattccggccactactatagatgattatgctcacagtcccgtccactacgccgtcgttgtaggagatcacgccggtttgactcgtctggtttcgtctttgcctaaactaaccgacccggaacaaatccacaccgagtccgactcaatgagccaagagcgagtcgcggagaaaatctccaccgtcatcgaccgccgtgacgttccctttggagagacgcctctccatttagccgtacgtctcggcgacgttttcgcggcaaagactatatcttccgccggtgctgatatcacgctccaaaacgccgccgggtggaactccttgcatgaggctttgtgtcgtcggaactcagagatcacggaggcaattctccgggaccatcaccgttcggcgtggtgcaaatggagacggagacttcctcatctcatcgccgtactcagccgcatgagagatttctacatggagatatcatttcacttcgagagctccgtgattccattcgtcggaaaaatcgctccttccgatacttacaagatatggaaacgcggtggagatttacgcgccgatacttcattagccggattcgacggtttcaagatacgccgcgccaatcagagctttctctttcttagtgatggagatgagtttcttgatgtgtctcctggtacgttgcttgtgttaaacagagacgataaaacgatcttgaacgctttcgaaaacgctaaagatccgattagcgatagcgatatagctggcttttgtggtcaatctagcttgtaccgtccggggatggatgttactaaagcaaagctcgttgagattacgaattggcgacggcaagcgaagattgaaactgtcggagagtggaaagctaaagcttacgatgtcgaaaacgtttagttttagttttaaatcaagaaaagtcggaaaagagcagggtttgcgtttggacgagactcgtcggagtgtgtcagaaccgttacggccgcataggcgggag

SEQ ID NO: 5936 - DNA, 1082 bp, Arabidopsis thaliana landsberg
taagtaaatcttggtttggttttagtgaaatatcagtttggtacaccttagatgtttttgttatgttttttttttttttttgggggccaaattaactccttgtgttagttagtatttaatagttaatacactcatatagtttcatattcacaaatagttaactatggtgcaggttttgtttaaaataactttttcgttacctttatactcttttcttctggaatttttttgccaaattaacctcttacttttaactagtattaaatagcttttttattttttttgaacaacatctcttatattagaaattaggtttccatacaagaagagagaagagaagcttttgctaatgcatcggcactctgattgttttctctaggagtgaaattaaaagaacaactgatgaaattagaagataaggcaaggatgtcgtagagaatcccgtgaagttccttcggatggagcttcgaatttaaggctttgacaagtagtaacgagtcggaagcgaaagagatatgggtcagagctgattcaattgcaactcttatggctataagagttgctaaagcttcggccatgaggggggatcccacatgggagatcgatagggagcctttgctgaaagtgcgatcctgtctgtctttgaagatccatcccagtccagtccgtgagtcaggcttccaagaagcgtcagtgaagcaagtgaacggattaagcgagaggaggggtttggggatttggctcttgctggatctgctaaagccaataaagcttgagcttgttgccattccttagcgcggataccagtccaagagcttatgctggaggagtaccttttttgctgaaaatcaattagaccaaaagatccagggggaaagagggccagtaccgattcccgtaggaggtaagcaaatcaagttgttagctgcagtaatccctttggtagtcgaaagaatcaaatccggattgaaggaagagctgaacggggcagatctccagatttgggcagcaaagggacaggtgaagaagagatgggtaattgtctctctctgatcacaatggggacacttaagtgaatcaag

SEQ ID NO: 5937 - DNA, 3726 bp, Arabidopsis thaliana landsberg
cagacgggccagcgccggcctccgcgcggaggcgtcgtgccgggctggccgtcgttcgttcgggcggaccgattcttgggcgcgtgacgccaacgcgtctccggccttcagcgtgagccacatccgagaccaaaagcgccagcgaggtgtcctcggtgccgccggccataggctgacggcggcacgaggcaaacgccgcgggcgctctcgagccgacgagccgcaccccggggggtgagctcgacgaaggcaacgtgtatcgagcacggcttcccgtgggacgggtagcagcacgcaagcacttctcaacgcagcaggcacgggatgcccgcacgagcgatgggacacgggcgccgggagtcggccgcacggcagcgggggtcctccaagcagtcacgggtccaagacaactcatgcgccacggtagccgctacgatcgagccatccaaagcatccctccgcgctgggcgcggcgggtctgcttgcgaggacggcgaccgaaggtccaccgagcgcgggagaaacggaaaacgcatcgagcaacgggccatcccacggtgcagccactcgtccagggcgtctggccggcggtagccagccatagccggtcgtggctgcgtcacggccgaaccacggccggccaggcagccaacagcgccagccggagctgggcgcggtagggtgccgaccggccacggctaggccgcgagggggtgcggggctcggccgaggagacctggaggagacgctggaaacgctatggtttcagcagcgtttcgcccgggtttcggctgcacgagttccctaccccctactatacctgaggggcataccccctcccaggacttcggggagttctgccttcagaaaaccagggcattttcccagtaccccacgaaacccatctaagatggctggacacagcgtttttgctcagaatcaggggtttcgctagcgtgacccgttttccctcacgggtgcacccgaacttccacgtctcacgcggggggaccacgggagggtcccgtgcccttccacgtgcccgttttcgcggccgtggccgaaaatccgtttttggcccgttcgccatggcgaacccctcgttttcacccgaaacgcaaggccgaacagccctgccgcccgttgccttgcgtctcctcccgttttccctccgttccaccgtgcccttcaaccgagacctacgtagcagcctcggtgtctttccacgcgcttggacttagcccgttttcgcggccgtggccgaaccgtttttttcggcccgcgcgccatggcgaactcctcgttttcagcccatacgcaaggccgaacagccctgccgcccgtcgccgcgcgcctcctcccgttttccctccgttccaccttcaccttcactcaagacatgcgctctaggttcggtgtctttccacacgctgggacttagcccgttttcgcggccgtggccgaaccttttttttcggcccgcgcgccatggcgaacccctcgttttcagcccagacgcacggccgaacagccatgccgaccgtcgccttgcgcctccgtgccgttttccctccgttccgccatgcccttcaatcaagacatgcactttaggttcggtgtctttccacacgcttggacttagcttattttcgagttcgtgcccgagcctccgttttcggtccgtgcgccatggcgaacccctcgttttcagcccagacgcaaggccgaacggtcctgccgcccgtcgtcgcgtgcctccgtgtcgttttccctccgttccaccgtgcccttcacccaagacttacacattagcttcggtgtctttctacacgcttggacttagcttatttccgaggccgtggccgaaccgttgttttcggcccgcgcgccatggcgaacgcctcgttttcagcccaaacgcaaggccgaacagccatgccgcccgtcgccgcgcgcctccgtgcccgagcctccgttcgtcgcgtgcctccgtgtcgttttccctccgttccactgtgcccttcaccaaagacatagactttatgttcggtgtctttccacatgcttcgacttagcttattttcgagttcgtgcccgagcctccgttttcggcccgtgcgccatggcgaacacctcgttttcagcccagacgcaaggccgaacagccatgccgcacgtcgccgcacgcctccgtgtcgttttgcctccgttccaccttgcccttcactcaagccatacatacaccttagcttcgttgtctttccattccacacgcttggacttagcttattttcggggtcgtgcccgaaccttagttttcgccccctgcgccatgggcgaacccctcgttttcggcccaaacgcaaggccgaacagccatgccgcccgtcgtcgcgcgcctccgtgtcgttttgcctccgttccaccggtgcccttcactcaagacatacatacaccttagcttcggtgtctttccacacgcttggacttagcttattttcgagttcgtgcccaagcctccgttttcggcccgcgcgccatggcgaacccctcgtttccagcccagacgcaaggccgaacgcccctgccgcccgtcgtcgcgtgcctccgtgtcgttttccctccgttccaccgtgcccttcacccaagacatacacattagcttcggtgtctttctacacgcttggacttagcttatttccgaggccgtgccgaaccgttgttttcggcccgtgcgccatggcgaacccctcgttttcagcccaaacgcaaggccgaacagccatgccgccccgtcgcctcgcgcctccgtgtcgttttccctccgtttcagcccagacttacacattagcttcggtgtctttctacgcgcttggacttagcttattttcgcggccgtggccgaaaatccgtttttggcccgttcgccatggcgaacccctcgttttcagccaaaacgcaaggccgaacagccctgccgcccgttgccttgcgtctcctcccgttttccctccgttccaccgtgcccttcaaccgagacctacgtagcagcctcggtgtctttccacgcgcttggacttagcccgttttcgcggccgtggccgaaccgttgttttcggcccgcgcgccatggcgaacccctcgttttcagcccatacgcaaggccgaacagccctgccgcccgtcgccgcgcgcctcctcccgttttccctccgttccaccttgcccttcactcaagacatgccctttaggttcggtgtcattccacacgcttggacttagcttattttcgagttcgtgcccgagcctccgttttcggcccgtgcgccatggcgaacccctcgttttcagcccatacgcaagccgaacggccctgccgcccgtcgtcgcgtgcctccgtgtcgttttccctccgttccaccgtgcccttcacccaaaacatacacattagcttcggtgtctttctacacgcttggacttagcttatttccggagccgtgcccgaaccgttgttttcggcccgtgcgccatggcgaacccctcgttttcagcccaaacgcaaggccgaacagccatgccgcccgtcgccgcgcgcctccgtgtcgttttccctccgtttcagcctagacttacacattagcttcggtgtctttctacacgcttggacttcgcttattttcgaggccatggccgaaccgttgttttcggcccgcagcgccatggcga

SEQ ID NO: 5938 - DNA, 5195 bp, Arabidopsis thaliana landsberg
  unsure (1)..(5195): unsure at all n locations
atgaatgtggattttaatggtttgcatcgcctggagatgatagcatttcacatggtcaatttctaataatgacccacccaatacagctagctataactacaagtgttcaattcttaaaatgcgaaaatctcccaaacacaattaaacgaacttgaatttgatcttctgaaaccaacaagataaatatcttttcctaaagtgaaaccagagtaataaaaaggttcctgaggataaaaatcctcaataaagaaacacttagagacgatgagaagagtaccaagtaaacttgtgaacataaaaaaagtgagacagatggagagtcaactcttataagaaatagatgacctttgtctaaaagtcatcatcgtcttcctcagccatatgcttagcaagctcttcttcctgttgcttcctctctctcctcttctcatcgctttctttctccttgtgagtgttaggaggaaacctcaatgctctgacagcttcgttatgcatgttgaggcagaaagcaattcttgagttgaacgcagtttgtggctcattcgtcgagtagatgtccccagtttctttggagaccatgcatccgtttttgtgatcgattgaagcatcgatagctccgtcgcgtatggcctttgccacgatgctttccgcatcagccacagggttttcagagttgagcctcagctttttggcaacatcgggtaaagagattctcgagtaggagatacttatgttccgcagtccagtcctgatgacattgtggcggagtcgcacgatgagattgtgcgttctgtcttgagcaaatgtgtccaagaacttctcctggactgtcctaaacaactccaagtccccaatcctaaccgcctgtaaaatcaaaacagagttttaatagtaagcctcagatcaaaatcagtatcaactatccagttgcatcatatatctctaaaaagcaacagtaaannnnnnnnnnnnnnnnnnnaatataattcgaaggagcagaaaacaacagcagcaacaaaattgtgtttcaagtgaccacagagagattttaacagaagaggtgtataggccagtaagtgaaaagtaggaaccggtttaaaatcagaagtgaagtagcaagatcacaagtgaccacatactaataccagtttagttatccgctcataaattaatgaatacatgtcacagcagcaagattatgaaagtggactcacatttgttagctcgaagtagggtctgagggccttctccatacccttttgagtgaagatagaacgctctggtatctcacccagcagtagacgaaccagaattgcccatttattacattggatcctgaagcccaaagctgctataggggctttcctggccgcctgaagaaggctctcttttgcgtccgtatattcgagctgaatagtacgaatcttcccgagatagaaaaggtacctacaaagctgcaaagtataatgttttagacaagtcatcttgctgtttattcatttgaaacagtaacaattgaagggttaaaaaaagaacaaaattcatatgtagcagagaaaaacacaaggtagatcaatggtaatggtaagaggtggtgtcagaagtatgaaaaggacaggcaaaatggacacttcaagtaagttcagcaaataattagtgattgaaaagaaaacacaagagcctcctagatgtagataagactgcaaatggaaaatgctatagcgaatagaaaaaataattctctggaaagattgcagaagtggcattggagttttcatgcaaatatagaatctagagaaccgagaaaacttaagagtatgaaggaatagccaagagctacctgttggtttgaatgagcctcaaagcgaggtgcctttgatcttagcttctctgcctgatcatagaggttgtaatgcaaatagttacgtagcaacaggttcagaagggtttcctgcattcaacatgataaatttgaataagaagcaagtaacagtttcaaaataatgaatgccgactgcatgagctaaacaaagacatacctgacccagctcatcgtgccttagcgttgcagaatgatgcaacgcaagaagagtactgcaggtagaaaaaatgaccagattattaactattgagctactgattaatatgaggtgtaagacaaagtacaaaactaaaacagtctttgagctactaacccgcgaatttcagcaagatcaccggtttgctcataactcaaagaatagtaaaagtagagtcttgatgctatcacatcaatggtccttcggttgacgttcttgagacgagcaatgcttgctgaagaacaagctttagcctaagagatgattaaaagcaactcatcaaaattaaaatcacaacagaaaagtaacttatgacaaaacacaaagatacagcagtagttacctcgttgtacttcttctgatcaatcagaaaaagaagaacaatgaagtagcagtagatctcgagctctgcaggtagatgcttagaaggagcagcttgtgtggccgatgaggcagtatcaacttccatgtcatgttcatcaccctaaaccattaaaagttccaatatttcagtctctaagccagttgtatgttagataacttgccattcacaacatcaaaagaaagtataacaaccataacacgaatctaaacaacctaaagccagatgctaaaaggaacaaccaagttgagaattctgaaacatcaaagtgaagaagtaaaacccacaaataccttaggaacaaaggaagagaggcgagagtgagcttcggatcctggaaccaaagcaaaatccaggaaggaagagagcacagagccggtgagtttctgcctaaggcctatagtgagacgcacagcacgagcaatacgacgaacctccttcgtgtaagacccagtatcgatgagtgctgcaatctccttcaaatctggtaaacaaaaaacaaaaagtgtcaaaacccagaaggaacttagcaattatgaaatcaattcgtgaattgaagcattcagatcgagatttactctgcatagtagaggtcgaagaagagataatcgattgagaaggggtgttattatctttcatctccacgtcctgagtcatctttgcacaaatctcgttactcttcacaaagacaaaaagaaggttagggtttttgcagaagtatgcaactaagccggtgagatttcaaggaaccgattgaagtttcaaccaatttgttgactgagaaagacggagagataaagtcagagagcttactaaatcgataaaacggaattcgccgggagaaagtgacgatgatggatcagatttaaggacgagctgatgctgctgagactcttttctttcctaagtattttcctttttttggacccaaaaaaaagtatatttctttttgttcaagacagcctttttccatattagtatttatatgttctacattacgattgagcaacaaatgtcgttgtagtatagtggtaagtattcccgcctgtcacccgggtgacccgggttcgatccccggcaacggcgattaactttttggttactagttttgtttggacctctcgcttattttcgtacgctttcttcgaatagcccaaaacacaaccagcgcaagttgggtgaatttctttttgtctcaaaacacgttggaacttggaattacaattttattattcatgaatttttcttgttatctttttatgttgttagaatatataatcaactgatatacgaaccaatggaaaaaggcaatgccaaagggggttgtttacttgttagtgtcaatacgccgacgaatgtatttggagtcaaacaaatatccaaaactcaaaaaagagacaaaactagaaaactcttagaaggaataaaaacttgaaaatccaagatccataataaaataaatgaggatatatataacctaaagcgacatgaacgaaagattattctacggcaacaagttgtttttgaagaacagagacaaaaacatgagaatgtaagagagatccaacttcattcaatgaccctggtcgctcatgcagcagcctggataggtgctccatttgatctgttgaatccaccacggcctcctcctcttccacgacctccccttccacggccacgtcctgttccaacaatttttaaacatttacaactcatcattatttaatgagaaaacatagtgtaacaaaatcatcaacgtaccacgtccctgaggcggaggaccatcatatccatggtctgctggaggagcaacattggtgtatccatagtctcctccatcttgttgagcttcatagtaaggtggtggggggccattgtaacctcctcttcctcgaccgccacgtcctcctcctctcccacgccctcgtcctctgccataggacctgtcctgctccatgcctccatcattatactcattgttcacattcccatatccacttcctggcaaatccgaaagaagaaatagcacaagccaatcaaacacttgtccacagatcacatgcaaatatgctaaaaggtgaaactaagatttggaaagaaatattctaaagcaattctacctctgccgcctcttccccttcctccatcatcatactcattgttcacatatccgtttcctggtaaatcaaacaaaaaaagaaatagcacaacacattcaaacccttatccacaaatcatatgcaaaatcctaaactcaaatacgatttggctaaagatatcctacctctgccacctcttccccttcctccatcatcatactcaacattcgcaggcccatttcctgataagtcgaaaaaaaggaattagcacagtccactcaaacgcttatccacaaatcacatgcaaaagcttacaacgaaactacacactgaataaacaatttctaaagtaatcctacctctaccacctcttccccttccccttactcttcctactctacctcttcttcctcctctgactttaggagatccgcctacaagagagagataatttaaaaacttaaaaaagacaacagggcagggagcttcaaaacttcattaagagtgagactctaaaataccttgccctttgagtaaatctcagccaatggcttcaccatttcaatagaaatcggacactgctacctttagcatttattaataagatatattagcatttgaaacaatgttcctttt

SEQ ID NO: 5939 - DNA, 3187 bp, Arabidopsis thaliana landsberg
cttttggctggttctaattaatacgctagtgtaccaattttggctggtactaattatacgctactcgagatacgaatgagaacatcaacaacacatctacatctacgtccattgacaacttggcataataaaaaaaaaaagacatggaatggggtatgtggtccggtctagctcctaattttgtgaagagcggtgcacacttaatatttaccaaataaggaaaacaaatacacagaaaaattcatgtgttgaatgttgacttcatctttcatcctccaactttgatgatttgcgaaaactccggcgatactcttcgttgttccctgacggctccaccatatcttctgcaaagctcactttctttttctttttctttctttcgttagtaggaggttcgagcttgtccatgtaaccagagaggagacgcttgtgaagctgagctgcaagaagcaccacgcttccagagacggcgaagactgtcatgaacccaattgagctctccatcttcttgagattttgttgctgttaatttagatgagagaagaaagagattagaagatattgtgacatgatcgaagtttcgaggaagggaagcattgtgatgaaattaataactctcttcttttccaacttatgaaacagttatagaggagagttgaaacttgaaaaagaacaaaagaaaataaataatggattggaagtggaaggttttgaaattaatggttggtggactttttttttttgtaggaatttgtaatcttctgtcgacgtttttagtaacaattttaaaatatcaaattacgaactttgactatttggactaatgtgaatatgaaaactaaaacaatattaatggcttcgtaacatagcaacgaactaaaacgatttgaggttgtctactaggagtacttacttaagatatgttgcacgagtcttgtttcttctataattactgaatttttgtcatgtatccacttgagcttagggcttgtgatttttgttcgtccaatttcaaatctctcaaggtgatttttttttttttttttttttgctatgtctttctataaggtgaataaattcttttataaggggattacactaattcgtaatccaattaggaataagcttttccgaagtccaagtggagtagtaatatttgagagaattgattataatagactttagacctttaaatatgtgattttatatgtaaactaatactaatgaattgacttaatcaattcaaaaaaatgccaaatggataatatcatatactataaaggggtatacaaagaaaactgtgttaacttggagttatagataatatggattgtagaatgagttttgagatccaagttttatgaagacaatgttttattggatctcatgtgtttttataccgaagttccaatgatttaaggcagagatcataagacgagaaagagaagaagaagtcttaatctgtagagagatgatgttactcagatgatccagctgctatcatccttcaccattgtttctttcgaccaggtttgttgtacatgttcccacaccaatccttccccttcctgcacattccgcgatatcgatcatcaacaaaactctaagagctactcttataacacaatctcatacctttgaggtgaatttgacagttgttgtgcagcatcttcgttcgtcccctgcaagagaaagtattgttatattctgatgggatttgagttatagatgatgccggtttaggcaataaggtttagcttaccatcttgctcccatttatcaagctttactatccatgtcccaggagtagtgtctgttgccaggacttgatctgcccaaacgcgaaacttcttcccttgtttgtctccatggtacttgcgcagctcatcgatggtatctctcagagatttttcagtaccagatggatggacaaacacaccaccggggtgctgaaagaggttgacacaacaagagtcaggtatttaatccaactgcaatacattatctaaattcggttatatactcacaactgaagctttgaggcttgctgtgtatgcctcagagttctcaacctcgccacgtctccatctctcgtagaacaaaaaaaacttcacaacctcgtgaccagggttcacattctctgccttgatctctaagaagtcagagacatctcttggagaaaggtttggaccaagcttgaagtgaccaatggcttgtataatcccacctgcacacctctcctttgcatggattaccttagggttgtcttttgcattttcagcatgccacttcaacagctcttcttgagcattgcttacctgggaacgaactaacagatttcaacattgcgatgaaaatataatatttcagagacatggtgaaccatgattgaagagcaaccaaccataacaccataaacatcgggaatactaaacagctcagcatcattcccagagtcgccacaagcaagagtattgacagggagtttcccctcagtcttcagtttcttcagcagatatgcaagcgcttgtccctttccggcaccttgtggtaaaatatccaaatccatacctccactgtaaattattttgacatccagctgatacaaccagcataaaccatttcaataaagtcacggtatctcaaggtaaatcacagttcctacaataacattatcaaagcaaactcaccccacgtttcaggaacctctgtgatagctccttagtaacttcctgagccttactcttttcaacataaaagctaaccttgtgtggcctctgctcagtttctgcctacaagcagcaatcaaactcatgtcattgaaccattgcaagattgtgagacaaaaacactatgtttcgagccaaagagtacctgaagctttaactcagggaagttgctagcttcttgtttgacaatacccaaatcccatttattgttcagagcctcaacccaaccatgatcaggaaccatagagttaccataagtaatctcagttcctacagacataatggtaatatcaggggtcaacaaaggtttctcctttctcagttctttatacaatgtcggtgatcttcccgtagaaaacacaagaagagagtcatggcgataagcgtgttcccacaacgaattgaatctcagcagagatagattctcaggctcatgatgatcaacctacacaaacaat

SEQ ID NO: 5940 - DNA, 814 bp, Arabidopsis thaliana landsberg
gagtgtggctacgagtatgagcagacttaccccttcttgcctctgcttcctttcttcatctcgcttctctctcgcacaggttttgtaatttagatatctacccatttgattccctactttggttgtatcatttcgttagtaactgattctttttggattcagtttttgcgcctttggttccattgataggtctttgagctgtgatggtgttgtctggttccactgttagcaacttggcgttcatatttgctgctatctatctatttaggtacttctttgacattcatccaaaatcgattattgtgtctagaaataagtcaagtcaagagtcttttgagctctacaagctaatggtgtttgctattcaccgtgtcttacaccagtcgttgctaacagtgtttcagttattgtcttgaaggatactgaagcatcattcagagcttcgattatcttctgtttcaacccggcgtccatattttattcgacaatgtaatgtgtttaagccaatgatctcctgaaagtaaatatgttgttcaatgttatcaaaatggtaactaactgaagaacaaactgtttctttgtgacttccagatattcagaaagtttgtatgctcttttctctattggaggagtgtatcacttgttatctggtagcagcaatgtaggcgttctttggtttgctctctctggttgtgcaaggtccaatggaattcttaatgctggttatatctgtttccagacaatgcatcgagcatatgaagctttatatcaggaaaggcgtgcttatgtaagttatacatatttcattcaaatt

SEQ ID NO: 5941 - DNA, 5134 bp, Arabidopsis thaliana landsberg
  unsure (1)..(5134): unsure at all n locations
agatcgctcagtatgtgatgtatacattttattcctatccagggccaagagactagctcttgtaagagaggtatggtaaccggcaaatactgtcaagccaccaagttctttcttctcttcccatacctcgcgtttaaggttaagtttaaacactgaggcttggttgttgtagttactgaaagtggagataacataaacgtctccttcatgctccatcatcaacactcgcatacccatcaaacttggctgacgaaaagctaaacaaggttccagaggaagaatacaaggtttcacaggaagaatattccaggttgctctgtgcgggtcgaaaaccctgaggtaaccgcaggtactgagacaaaagaacataccattcgaaaaaacacatttgtcccatttgcgaccgcgtatgtggttcccgaagcaatgggtggtccaaacggttttaccaagacgccaagtcatgatctcaaaatagtagttgacacaagcaaccaaacaactagttgatgtaggagcggctgagaaagccccgcaacagggtaccaacagcggtaagtagacgcgctcacgggtaaaagggttaagaaagaataatgccccggggtaatcatattttgacacaagcagccaaccatctttataactaaggaatttatggcaccctaaccctggaaactcttgcttatatgattgatttcgtaatgggtcaaaaagaatgtaggtttcacaaggagtgtcgggatcagtaaatccgcgagatgagcattttagtggataaagcagccaaggacgaggctgtaacttcctgatagaagcagctgcttcacaccatgacttgcagacagcggaagcttgtatgttggctcttaactcaagacgggacagtatctcctgctggagatctgagggaatcttttgatcccacaacagtcatgtattacacttcttcttcttcttcgattgacgatctcttctagtgtttattatactgcatctgacaattatagcaacaaggagaatataggattggtcaagaaatcacaatggaattggacacttgtcattgatgttccaatgttgtacatactttaatcgttcgttcgttcatgcatcagtgaaaaaacgtaagaacacaaccctagtcttaattcagagaccataaaccttcgaattctgataaagaggaatagagataaataggaatactcacgactgcatcattctcggtcacttnnnnnnnnnnnnnnnnnnnnnnncggtggagttgcgtagcagccggcagtgtaatgccaatcttcggtaattcacttctagcgagaatgatgcagtcgtgagttgttttccaatagggtaaatctttcggtttgggttcggtttcgggtccaattttttgggtcggtttcggttcgggtaatcggttccggttttttttcccagccctagtcaattgtactttttcatatttaagaccagatgtggtaatcctggacccggtcactattttgttccggttctattttttaaaccgcaacttatctcgaattggttttttttttgggaaaacccgcaataaccgggaattcaaagctttatactatcatctagctggaaattcacattcaggtttccctcttataaccttgacatgctttctgattaccagactcaagttttataaggacaggccagtaccatgtctgttaaaacctcacaaaatttcaaaaggaagatgacagtgtcactaagatggagtgacaatcctcatataacatgtgaacaagagagaagaaatcattaccatatcactatttcatcaattttctcattcaatggtctgtgcaaaagtgcatgtatctaaaacaaacaaacaaaactttggactctagagctacaatatatttgcgcatcactatctacttccactctctgaaactcttttgcacatttgcaaaaaagttcaattgtagcaataagaattagataatgtctactctgcattactgaaacataaaactaagagagaatagttcaactactgaaaatactagagctacttgttgagattttcaccaagtttgtctgagatctgataaagctcaaaccttttcttacgtttgttgttgtttgttttgcaagaaagaaacaagacacgagatttacgagttcccaagaccaaagcagtcaaggtacgtctcggagagcttcaaccagctctcaaggcactcttatctttaaaccgaacagaacaatctctcaatgtctcaccactctcacccgttacagagaaaaacccagaacccaagaatcttacacaagacaacactcaagagtaaggtaactctccaaaccgtgtttctctctcaactctctctctagaactttctctgtgaatagtgacagaatggcttaacctccaagcttgatgtcgatgtccttataagttgtgccttcccgttcttttgcaggtgctaaccgacaacactgtacaaccagtgtcctcaaaaataaccaaaacgaactcacatctgccgtttccttttgctgggcttaagtcacttagcagactccgaatgggcctttaccggcccattcactatgactcagcccacctgtccaagtccaatcacctgaaacgacaatctccatcttgattggttttagacagaacaaccggagaatttacctcctccagtcaactctccgactttgccgtgtcggagatccagctcccttttccgagctagtggtggtgcctaagcaccttcaagtcactcaaagcatcttcaaatttcttcaccgggactgattttgtgagtatatcaaccgacttctctttggtgtttatctttgagacctttagagtaccctcctcgatttcatctctgatgaagtggtatcgagtgtcgatgtgcttagtacgttcgtgatgaacgttattcttcgccaagcagatggcgctttgggagtcacagaagatttcagcttcatcttgcggaaatccaagctcctcagtggatntttttccccggggggggcccccccccaaaaaaaaattttttttttttttcccccccccaaaaaaaatttttttttgggggggggttttttttttttttttccccccccttttaaaacnctgttcttattaaacactcggtcgttgaactagttgtcccgcacggtggatgcttacaagtaatgatgattttcttgtattcgtaacattcatttctctttggtattgatatttgactgtatactgattgattttcttcatgtaggctatacttcctagtgatcttgaagaatatcagaggttacggtgtagagttgctttccacggtttacaatttaggaaagaggttcaagaactttccactaaagtattacaaaggctagttttcgttaagacccgcccgtgtgcatcgtttgttttctttctttacgatgttgtgactcttcatgtgttatggtacaggctgagaccgttaggacgacctttcatagcttatgatccagggatgacaagagaagctttggcctatcatggttgtgctgaactgttccaggtactttaaagtttatagtattgtctagttttggaaagaaatgatttcttagtgtattacgatttacgtgtttattgcattttggagctactcaaaggatgttcataccgagcttattcaacataaacgcgcttggatgattaaacgtgggattgtcaaagggaagctctctgttttctcagccgagcaacgcctcgcggggttatgtcctctaatgccagaagaagtaagtaatagtataaatatttacgggttttcgctcgataaagtaacgaaaacgcgctttaaatgcttcagttgtctctcaggttggtattcttttacgagcttatggatactcatgggatacaattatttatgtcgctgggggagaggtttttggtgggcagagaacgttaattcctttacatggtatgtttgagaatgtcgttgaccgtacttctcttagtactagctgggagcttgctaaaatgtatggacgtgaggcaaaacataatgatatcaagaaaatgacacctccttctgtcgaggtagaaacgaaacatgattcattgaaaagcacaagacaaagacctcaagcgcttccacctccaccagctagaccaaagtactacaacatcgaaggttggtggggttgggtagccgagagtgacaacgagcccgaaagcacggttattgagttgagaactaatgcccataagttgttgtgggaagcgatagattacgttgttagcgtggaagcagatgtgtttatctcgggttttgatcgcgatgggaaaggacatccgagtttcgctagtttggtcatgggacaccggctttatcagtctgcttctgctaaaacatttagaccagacaggtaatataatgaatgcatcattctatttagaagatattaacagattatgtaatcttgaaatttctcatacttgtaggaaacaaattgcaatgcttttggaagagattcgagaccatatgtacgaggcgaatcacacttggataacatcagttaggaagctactaaagagaagcatactcgagggtctaatggaatcttccaaaagatcaaaagcatttagttttctttcccatcctgtacccgaatgttcttgcattacgcgaagccatccggtttcaaatgccacaaatcttggggtgacacaccgttgtccgcaatgggtggatggtgctgtaagcgaaagattaaaggagtataagaacgcagagaaagaagaggatcttgatgaagaggacttgtcttcttcaggattgttctttggtcacaaggaaagtggagggaataataatggtaacaatgagactgtaaattccgaagctaacaataaggaagaaggtcagcttgaagatcaagaagaacttgaaggcagcgaaagataaggcttgtggttgaagatgcaacaatgagcaagtcgcagatagatctaaccttttctcaaaatagtttatagcctggttattacttattaggggtgtgtattagaatatgtcttttttttttgatgatcaatttacaacagtttagtgatttttaagaacataat

SEQ ID NO: 5942 - DNA, 591 bp, Arabidopsis thaliana landsberg
gagggaaccccatcctcgtttattgactcaactctcttcactcaccttttctgcgccttcgctgacgtcgactcttccacccatgaagtcactatctctgccgcgaactcataccaattctccagttttaccgaaaccgttaaagagaaaaacacggacgtgcaaactctcttgtcgatcggtggtaaagatgcagacaaagctgtgttagcgtccatggcaagtaacaccaaaaaccggaaagcgttcattgattcctcgatcgatatcgctaggaagaaggatttctacggcctcgacctagcttgggagtatccaagcaatgacgtggagatgaccaactttgggaaactcctggaagaatggcgagcggcggttgtggaagagtctgacaaaactaatcaactgcctttgctcttgacggctgcggtttactactccccgcaatacgatggtgtggagtacccggtaaaagccattgccgacaatttggattttgttaacataatggcctacgatttttatggaccggattggtcgccggtgacggggccacccgctgccctgtttcatgatccttctaacccagca

SEQ ID NO: 5943 - DNA, 989 bp, Arabidopsis thaliana landsberg
gctagtttaagaggtgattggttaggacttttgatttagacttttactttaacattatactattgaagatgttgtgttgactgagttttagaagctatctcaacatgtcatgagattaaagatgatacaagaagtgactctgataaatgaatcagagataatgaagcattacttgtatcagttgttcacacaaagaagagaagatgatgtgttgaatcaagaaacttgcagtcagttatatcggaggatgtatcagacgtgtgaataagttcttgtgctacttccgacattaatacatggaatagtacatgaagctgagttgtgtgactagtttgaagagtttgaatacagaagtttgggccaacttggataagccaagaggcagttgctgagctagatgaacatcttaaatatactattcaagatggtaacatgaagataaatttccttatttataaagaatttttttttgtcaattcttatttgttgtaaaaaagggaaattcatattagcgaagaatagaaaaattgtctattctaggggttgatcaattgttataaatactaagatggcgcttcatggagaatgcacacgcctcagagtactcgagagatgcacacaaagtgtgtggcgtcgtccaaccagatatgatgtaagatttattggtggtttattcatctagaaaagaatgataggtatagtaatgtagtgtatcatacgcaattgtaattgtaatcttgttctagtggatttgttgtggactaggtcccagggatgtaggataaaccgaactcgttaataaactctttgtgtcgtttactttgtgctcatacgtactcgcactcgaacatacacgtactcgaacatatagatttagccacaaatatgtgttttcaactatgacttttatgctgtgatttttattttaaaaataaaactatgatttaaaaaaaaatgtcacatataggttgtgaatggtgagtgaaatt

SEQ ID NO: 5944 - DNA, 2127 bp, Arabidopsis thaliana landsberg
  unsure (1)..(2127): unsure at all n locations
gattcaactgtttctttacgaatctatgaaaattttaggatctcgtacttcagttcaaaaattatatattgactttataagcgattatcgatttatttttattagaaagtcgcaagttctcttgcaatgtgtaaaatttcagagagataactcgtaacgtgcagagcggaaacaaaagaagaaacagcgattccgaaatgccaaactcgaaaatttgcgtgatttccacaattcaaaggagctggagtcccatcctagttgtcacgagcaaacccaactagaggcccgtccacaaaatctccggatcaagagcatacagcttctccgcaaactaacgcaaaaacgcgatgacaacaatggannnnnnnnnnnnnnnnnnngttataagagcatctacggaaaactagagaaaccacctccggtcgccattcttataaaaacgataaaaaccagctctcacggataagcaatgccacatagaccaaaacgccgcctctattcttctcaagaaatctccgctcagacaagacatgcacctccaaaaactgaaagacaaaatcaaaacaccaacatcgaaccactgtaacagagaaaagggaacctgatgaggagccacaaacaagcaacaacggaagacaaaactgacaccaacggttgtcattgtctgttctttctgtagatttctggtattttttcgctacttgtactctttgtaatttttgtcgaaactttgaaaatggtataaatactttatattttaccaaaaaaaaaaaaaaactcgtaacgtgtagttgtctcaaaagtttcggtcttgacttttgggacttgagagattgtatagacttttcttcaaaaaatgtgtcaaaatctgatcgactaaaaagtcaagaagtattagactttacatgttaggttatacttatacatacatattaaatatatgtgcatataatatatgggtttttctttccttcttcatttatgaaacgcaaaaaacattattcccctctgtggtctctctctcacgagcatcgtttcttcatcgatctcatagttaccggcgttgttttgaggccactaccgtcgtctctctccgtaatcgtctccaacatcatcatcttctcaatttcgaaacattttattctctaataggtaaagttatgtaattttcgtttacaaacaatgttgaaattgtagaagttggaatttagaaactgctttttatcaattcattagcttttgtagtatagtcaatggtggattcattagcttttgactcaagatataaagcttattatatattgcataccatgtgttcgatgatatgcctaaatgaattctgtccacaaaactctttgattttgtgtttagtttcagagaaatatgtattgcttgtgattctaaatagtagagtttcagtcaattctgattgcttgttggaaaatgtaatcgaaaatggaaaggctgcaggatttggtcccttaaaagatggtttcttgtttgaaacctcaactggtttatcaagaatgtgagtttcagtcttgttcctttctttgtcaaataaagtgaggagaggagagtcaagaaatcgacttcaatctctttgtcaattgctcagtgctctctctatatctgggttcgtgttcgtctggaagagacctggaaaaacaattcaggaagacgattagttgtgttcgtgttcgtccctaatccctaaaggtgatgtgtgttcatgtttgtctctaattaacgatctgggttggtgttttcttatacgtatgttggtgggttcatgttagattatcgaaaattttgtgttatgacttatgagtagcttacttagcatgttttgtatccaaggggtgtgacaaaatcgtttaaaagttgcagcggataaattctgaatagagccaattttttctgttcttggtactaaatctttgtctccatgtttcattgtgtatgtcaggactcaggaatgaatctttctccgttcaagagagatatcgatgagctgatagacgagtttgtggaggtattttttttttttttttccctaatctttgttataccttaaggaaatctttgaaattgacttctcttccatcttccaatttggcgaaattt

SEQ ID NO: 5945 - DNA, 1513 bp, Arabidopsis thaliana landsberg
ggataattattcaacaatgaaactaatttaaaccactaaacatgcgtagcttagaagagagtcagagtagaatttactaatcaaagatttagtttaccttgttatttgttaaagattaaaattatgtatatgattatgaatagaaatacaaaaatctcgtatagatgaaaacgacagtgttttaaaatataagtcatattcatgaagctgaaaaagtcattttccattctcctaactaagtaaaaacatggtcttcatgtaagccgtcacatacaaatacaatagaagaatttggtttgtgtttgttcttcttaagtagagcattgtcatctggcccaatcattgaaaattctcaagtacatttcgttccatcactaattttttttcttgggtcaaaccatacattcaatttattagggcctgataggcccaaacttctctaggccaacaattaataacctacaattagggatgttaaaatgggctaaatatttaaggccggcccgagtccttataaaaaacaaaagccctagccctgggttggtgttttcttatacttatattggtgggttcatgttagattatcgaaattttggattcgaacgtgtggatcgctggaaaaaataaactttagggtcgctagattacgattgcttcgctttttagtagtagtaggctacaatcgattggcaaacatctctatatcggccataactccgtcaagctctgcagaggctgcttcatcagtattgagagacttcctggtgattgattctcatgtctatgtctgagtttggcattgtctacgccatccatatcatcaccgtccaattcggctccgtcgtctcggtaaattgagaaacccttctgagacttgtgttgaatttataatctctgtataacgaatttggttttggttgcagaaagtttgtgaatgtcttctacgtaaaggacctctttcctcacgagacatctctcgtttagctgaatcagatatcaaccataacaaagttaaagatattctctatctcttgattcagcacaattgtgttcaagctttctccattgaacctcctggttagtctctatattggttgattagtagcaacacacagaaatagagaactcaatgaaagtaattttggatgttctttttttttactttgtagatggatctgagagcaaagctatcgcacagtgtattgagttgtttaacaacattctgcatcgtgtgaggtataacaagttttcgcggattgtaaacgaagaacttgactccaaggcttaatcgggcttcttcttctctctgtacagggttatgattagttggttcatgcttcaagactctaatgctaatcttatacttttgtttgatttatatgtttagtgcggtgcagatcttgatggcttacttaattacggtaggcttaccttgggacaacttatcgaaagagatagaggcgaaccgtgatatcatatgtgcctcctatggtaaggaaccacagttcacact

SEQ ID NO: 5946 - DNA, 5898 bp, Arabidopsis thaliana landsberg
tcatcttcacattggcaacatctctcatgatcggctctgtcttttggtttatcggaggtaagagatcaaacgtacaagatctaacgatggtgatcggagcaatctacgcagcagttgtattcgttggtataaacaactgctcaacagtacaaccaatggtggcagtggaaagaacagtgttctacagagaaaaagctgctgggatgtactcagctataccttatgctatctcccaggtgacttgtgaactaccttatgtcttgattcagaccacgtactattctcttatcatctactctatggttggattcgagtggaaagcttccaagttcttgtggtttatcttcatcaattacttctccttcctctactggacctactacggcatgatgacagtttccctcacacctaaccaacaagtagcttctatctttgcatcagccttttatggtatctttaacctcttctctggatttttcatccctagacccaaaattccaaagtggtgggtttggtattactggatctgccctgttgcttggaccatatacggtttgatcacttctcaatacggtgacgttgagactcccatcgctctccttggtggtgcacctggcctcactgttaaacagtacattaaagatcaatatggttttgaatcagactacatgggacctgtggccggagtactagttggcttcactgtcttttttgccttcatcttcgcattttgcatcaagactctcaacttccagtctagataaccactatacactctgttttcttgtgaaacatttcttgcaataaagctttgcttcctctttttttcttttcttctcttaatgtgagtttatttttgttgtaatgtaaaaattattcatcaagaagaacctatttagaaataaaagttgcaactcaaaaacagagaagaagtagtactttgaatgttataatgaaactttttttagaaaaatcgcttccacacacgtgatttcgatttcatgcaacctaggtttttcttccacattatattttcttatcttatatttttttgattatatagtaaactcaaatattgaaagaaaaaatttcatataagaaacatttatagaatttcagaaaatttgcattaaaattaaattttatatcaattaataactaaagatttttggtttcttctcatagtggcttttgtgaagttatgttggacggatagtgaagtaaaagccttttaaagcccataaacaaaaagatttggtttcttcttctaagggtttcgagcaaaatttctgagcagcggcgacgatgggagacaccgccttggagaagacagcggaagagctacggcatgagatcgatgagcttcaccgtcaacagcgtgaggtactatctccacctcaatctcattctcactttacaaatctctgttgacggcgattgtttaattctctatcctgttcagattacggagaggcttcgtgaccctcgtggactccgccgtggaggcttctcaaacgtcgctcctcgcaaccaaggccgtagagcctttcctcgacctgtaagtcttctctatctctcctttgagatgaaacagattgcggtaattgattattggatattgtgtgtttttgaaggcggagaggaatgacgtagaagacgagcctcctgctaaaaggagattgtcatccgccgttgttaaggtaatttgtgttcggaaagtaattgcattctcattgatagatcgaacgaagtggttacttaactttaacgggatactttaggtcgacggtgaagatgttagtaaagatggagaatttccagttgatggtaatggaacccaggttaaagttggtgagaatgggacttctgatcaaagtgacaagaagcaatctggtcttcatcgtggaagttggtcccagagagatgcagaacaacgacggaccaataaggtaaatcaaattcctcccataaatcctttttatgagaacgaagcgactgtttactcagtggttgttgttattttgctcttatcagcgttacgaagcttttgcattgccggagcctgcaccaagggttttacctaagaatgaggatcctaaactggttaataggaacagaagaatgctagggaatcttctagggactttggaggtatttgctgagattcacatgaacctcttgtctcatggattagcttgattcatgttcagttagatttttcattctttattcaatttattggattctcacttctcactctttatttttgcagaagttcagaaaagaagataagcagcgttctggaacagatgcatacgcccgacgaactgcagctctacaaagggtaagcacacaccatattcacttggagatattttatgaagcttgttactgtttttttaagggaaacgccatatttttgtacgtgaattgataatcttcatcttccttcagtttcttttgtacatttttgtactttaaactaagacagcatcttccttcagtttcttttcgcttaagtagcgttgtagggaagcctaaatctctctagatatgggtgtctatattggaattgggtataggtataggtatcattatatgtccagttaggagtgcgtttattccttagcatcatctttagtactacaatgcattagcagtgtttgttcattgtatccctcctactcttataggcggaggaaaaggctcgtgaagaaagtgaacgactgaggctgcaggagcgtgaaaatttgactgaaaagaggagaagagatcttgtaagtggccagcttaagtttttttctctttgcataccattccaaatggcagtcttgtgtagtaaagatctgatatactcaatttaactggtcaatcagactcttcgggctcgtgttgctgctaaagcagaacaaaagaaattggaattgcttttccttcaatggagtgagcaccaaaagaaacttagcaattttataaggtagtgttgacatgctgttactgcgtgtgatttagttctatagcgtacccttacttactctgcatgatgagtctcagtgatgagattgctaactgctatgtatttcatttgcaggttattttttatttcggtccaaaaagtgtgcatattgacaattttatagaggcaaagataagtttccattcacgtgcatacaaaggcaatgtttggtgctataggtagaaattggtagctgatataaaggtttctgtcaaaacttatttaatttgatttgcatgtggacgggtgtttcaggactaaagcagagccacggatatactatgcaccagtgaagcctttggaagaagatacaagtgaggtagaacaacagaaagagcgggtaaggtgttgtagtttgtaaatgaagaaagttttgacatgcatgctatgggatatttgatgtgactggttttgtgttgatgcagacattcttagaatggaaggcagcaaggagacaagaagtgagtgagtatcaaaaggagatagaagagcagtgtctgggtaatgttgagaaagagctggagaggtggcaaaacgcaaggaaggctaggaaagcaaacaacgagggtatgaatttgcaggaaacgatggacaaggaattagagactcataggatggagcatgggccaaagaagagaaagatacctggaggaggagtaggagatgaagatgaagaagatgaagtagaggatatcaatggtggagaggatgaaatgataatggatgatttactggaggagggagggagatggaaccatcaaggaggaagtggcaactgatacagttaaagcagaagcagtggaggaagatattaaacatgaggttctctaagtcatatagtttgtttgttcttgaaatttggtgggagttgcgagttagaaaactggtcaaatctattttggagcgttgtaacgtgaattatggcaatttctaggaaagatttgcctttgtgctatataatttgttttgtttatctgctagtgtcgtagcctcagctttcatgcatcggctactgccgcttgctcgacagatgtctcttcactggcatattcattgaaagattgtatttggtataagtcggttaaattcggttaagaatcaatctgcgttaagaaattccggaggttacatttcaaatttcactacaaaaggaaggactctttttgcaaaaaaagaaaaacaaaggactcttttgaccaaaaaaagaagaagaaaggactcttttggctttacaaagagtcaaagacacgtgctaggtgttttacagagatttcgacacgtgtacatcaaaagccgttattcctcccatctaacggacctccttcatcgcctacgatgaaatcttcttctccccacgacggcgatggtgaaacttcctcaacactcggcgattctgctggtgaaagatccataaaggcgaagtaaggctctggtgccggtgaaaatcttgaacctaaaaaccatggtgactttgccagtgccgccgaatcttccacgagacgattgggggatgaaggagcagtgaggggaagaagatcggcgagaccgtgtacggcaatatgttgaccatcgaacaaaccagggatgagaagttgaacgccgtcgagaaaaatggaatcgttggaggaagaatgcttagtgagaaggagacgatgagatgggagaagcgtcgggagagaggaggagttggggagagatcggagaccagaaagtgagagtcggagaggtaccgagtggaggcggagagtagaaacgtagaacggaagagaatgagtcatgtcgagatcgaagagcatggaatcggtgggggcgaagagagtgagagactcgtcggagagtagatcgaagagaagatcggaggtgatgatggcattggcgaagagagcacgacctctgacgcggaggatggcgatggctctttctaactcttccaaaggaacgccggtggagggatgagggagacagaggatgatgagagctccgagaaagatggctctgaaacaagaagcgctcgagattttcgccattgttgtgatttgtgaggtcgaagagagtaaaatggaagacgaagaaagaaaaaagcggttatgattgggttttataggggaagcgaatcttgggaacttctggattctgttacagtccaagaatttattgggttttagtttttttccgcgcttcctataatgctagattttatatgttgagctaatatatgtctaaataatatctgcttataagctgaatcacacacatgcctatgagggtcctctattcgaaggtaaatcgcagtgtcaaagttgtatgaaatatatgttattcctttactcgacagtctatgggtgcctttaaaagccatgttgccaaggttcaggagcttttacaggttcgagtatttcaatttactcttgcaagaagtaggactagtgacaggagatgagatgctctcaatttggagataggtggtggttgcattggtttactagctctagaactaccactactttgcctctccttggatggtgaatttgatcattattctttcttgtggaacacataaaagactcttttgcatcttttcccgtggcaaggtatatttgaatgttctttagaagaaggatgcttattactactgatgaaaattgtgcagtattattacaaccaaaccttccaataaccacaaagtaacatacagcaattcgtctgctacaaaactggtaaaaccggaggaacctatgctcactatgatctttagctgttctgcagcgccttacgttccataggccaaagccattcgatttctcgctttatcggcctacagtaaaaatatgcatccaattcaatatctgtatgtttatttcacaagagaaactagtcatgaa

SEQ ID NO: 5947 - DNA, 2390 bp, Arabidopsis thaliana landsberg
  unsure (1)..(2390): unsure at all n locations
gaaacagaagacacctgtcactactccttccctgtccagtttcttactcacacacaacagacactccacatacttgccacctcttgtaaagaaagcaaacgatactttctctggatcttgactggtcacagcattgttcagcacaatcccaaggtttacaaaggcttcttgattctttagacgacaacatgacttctgcgtcccaaatacttctcctaagagcattttgtcaatcacttcctctcgcttcaaaccggttaactttgacattgctggattccactctgtgcaccatccaaactcatcggtaccaaatattggcgggatcagcgggtttggattttggatgattgccttgtaatcaccttcaatccgcgtaaacttgtccatcacagtnnnnnnnnnnnnnnnnnnnnnnnnnncaaaacacaccccaaccacgttttcatggagatctctacttgcgcatgcatttacaactaaacttattggcccagcatcagccctggacagatgtgtcttgatctcaaactggacattctgctcctcagttcctgcatagataagcaagtgaagttatagactcggcttcagtgtttgataaaattggaaaacaaaattccatcattaagaaccaaaaacaacacattgcatcaagtttcttcgaccacgatactcaattggaacttgaatagtgaaatctagttggaagattcttagcaaactcagcataacttaggaagagagtttaccttctaatgcgttctctagcatccttttaacgatttccactgaagaatcttcaacaagtgtgaggaaatgcttcccgattgcttcatcaaccgaaagaccagtcagctcagcaattttcgtgttccaaccattaaccagtccatcagaatcaaccgccaatattggcaccgtagcagtctcaattaaacgaaccatctcactggtcacagcttctagttcttgtataccatcaattttgagatcatttagcttcgagtaaatgacctttgtattcacatcagtagtttcactatccttgaaagcattcctcaaaataagttgcaaggagtgtatggcatccatctcatagtccttccaaggtaaactccttgtcttgaccacttcaaggaaagccttgaacgatgaccttgggtgcattctccttgcatcatccctatcatctggatcatgcttcgcacctccccatctcacttcaccagcggtatgagaacggaaccagaaaatcatgtctttcgatgatatcctcacagctgccatcccacataccgaatccccgagagatagagccctaggaaacccggcgtcatgcaaactatcagtgctcaaacccgttgaatccatgtggtattcacacaaccatgaagctatctcctgcaggtggaactcacttggagttgttcccagtttccatatcttgtctttatacaagagagctgctccatcacatttcacaaggtccattatgttggggctttgcgacacaatacccagtggagcatcacgcatcagcatatcgcataagagtgtctgcgtgcgcaaaatgttcttctccaccatctggttatcgagttccacctccttattgacgtgtatggcaaacacttgagctagaaactcacaggcatacctgagaggaaatggaacaaacctcggagtcgtattgtgacaaaccactaaaccccatagtctctttctcttttgaggctgtgtagtagcatcaggagcatccccttctccatcttcctcgttaactacaaccgccataaccagagatgcaattgaatccatgttggccatgtactgcaaatggcagctgtgcggtgctctaagggtggagccacacaaggtaaggtcaaaggaaagcttttcatcttgaagcaccctagcatgttttgcattgcaatcaactatcatccggaccttgttcttcataaacagaaaacgggctgcttgagggatgtcggtggcaggataatgcagcccaagataaggctccagcccaggttttgtaacctcggagacaacctcaccgtgatcatcttcatgaaacttataagccatcaccctgtcataccccgtgagttcaaaaacctcttgaaccattgtatcacaaagcctttccatactcccgctgggtaaagattgcagcctagtgattgctttggcagcgagcttgtatgattgtaaggcaccagcagctgtcatggggacttcataaggcttcacgggttcaaagtcgatgatgatgctccctgtaaccctgtggataatcgcataaaagggctttgcagaagtcctgcaatgcacaaagaatgggattcaaaaagagagacattcttcaaatcccaaggggcttt

SEQ ID NO: 5948 - DNA, 3880 bp, Arabidopsis thaliana landsberg
atactaccgttacatctcacgttgcagtccttgaagagttctttgacctcaggtttgaatactatgagaagagaaaggctagaaaaactgaaactatgattcaagtcttttagaggttttacggcaatggtctaacattaacgttctttatgatgtgtacacaggaaaccgtggtgaagaatatggaaattgagctgttgaaactagaaaacaaagcgaggtttattcttgcagttctcagtggagaaatcatagtgaacaagaggaagaaagccgatattgttgaggacttaagacagaaagggttcacaccatttccgaggaaggccgagtctgtcgaagctgcaattgctggagcagttgatgatgatgcagctgaagaacctgaagaaatcttagtggatccggagtcaagctccagttatatacccggctcggaatatgactacctattggcaatggctatagcttcgttgactatagagaaagttgaggagttattagcagacagagataaaatgattattgcagttgcagacatgaagaaaaccacaccgaaatccctctggctcagtgacctagagtctcttgacaaggaactagaagtaaggattcacactatcccttatttataccgcttaaacataacaaactatcacaatttgtcattgatacatcattttcctcatattgcagaaacttgatctgaaagatgctcaagtccaacaggctatagaggcagcacagaaaaaaatcagggccaaatctggagcagcagtaaaggttaaaaggcaggcaccaaagaaaccagcaccaaagaagaccacaaagaaagccagtgaatctgagacaacagaggcttcctattcagcaatggacacaggttagtctcttattcaagtgtttacattgtgttatgttttctggttggatctaatatacattggaaattttgtattgattctataagataacaacgtagcagaagtggtgaagccaaaagctagacaaggagcaaagaagaaagccagtgaatctgaaacaacagaggcttcccattcagcaatggacacaggttagtctcttattcaagtgcttacattatgttatgttttctgggttggatctaatataaattggaaactttttattgattctataagataacaacgtagcagaagtggtgaagccaaaaggtagacaaggagcaaagaagaaggctccagcagctgcaaaggtaattgactgtataatctgtaaaacttgtttagtttttttcaaagtttgtattctgattatagaaacgaagtgattaaaactgtggtctgtttgtgttttgcaggaggttgaggaggatgaaatgttggatctagcacaacggcttgctcaatacaatttcggctcagcacctgcggattcaagcagtaagtcagtcacataattgacaaagaaacattgctctaacacaactgcttgtatgtattgctggttcctgaagtttatgtcttgtcttttctgtggtttaatcaacagaaacagctgaaacatcgaaagcaattgctgtggatgacgatgatgatgacgtggtagttgaggttgcaccagtaaagaaaggaggaaggaaaccggcggcgactaaagctgcaaaaccaccagcagctccgaggaaacgagggaagcagacagttgcttcaacagaggttctggcaattggtgtgtccccggagaagaaagtgaggaagatgagatcatctccgttcaacaagaagagtagttcagtgatgagcaggttggctgataataaggaagaggagagcagcgagaatgtggctggaaactcgtcgtctgagaaatctggaggagatgtttctgcgatatcgaggcctcaaagagctaataggaggaaaatgacctatgtgttgagtgattccgagagtgaatctgcgaatgattctgagtttgatgacattgaagacgatgaagatgatgagtagagagagcgagaactgactcggttcttaatatgatttagtttcaaacttgtagtttctccctctggtcttctttggatttggtattactctgtagaaagacatatttctctaacgttggtcacaaaactcttacattgtttaagcgtttagtgactttttggtcagtcattctgtttttatttttattttttggctggcattaatttctctttggttgatttaataatagaaataactgcatatggatctttttgttgtagcatataagcgcaggattgtatggtggcatatctaaaattttggtcttttttatgagccagagcagagggacttcgaaattttggtcttgtatagttctttatatacaaggtagaggcaaaagatagcggataaataaggtgaagtggtaaactgactctaggtaagcatgttgacaaggaaacttgaggacatggactagcagaagttatagggcaaaaaagtttggcacttttatgttagaagtattaaaaattttgatcttccataactggacagtgtcagaaaatgccaaagtattacaacaaagtttctgacgacaatccacgaacacattaaggagatcgaaacgaaataaaaaccgcacaaactcttcatgaaacgctaagttgtggagtgaaggtggttcttggtactcaagtttgagaggattcattggaatgaagttcttcactgttttgctgcaccatcaaacctgaaaggtagtagaagtgaagaactcatatgaagacagggtaaggacttaaatcggtaagcacgttgaaattaccttttacctatagaatccagatgttcctatgacttaagaataatccttttctcctcaatctgattttcaagttcaaacatgtgaaaaagggtgtataagtaactaggcagttaagtggtagagctctaatctttttctattaaaaccagaaatgaactaatctctacacaatataaagcaacaagaagacaagtagtggcatgcaaagaaagtaagcaccaaaataacttctggaaatttttcatgttaaatcttaaccactacctacaaaattattcagggacgggaaactataatcaaaaggacagtatatgatgttttagttttgccttagcgatagctcagtgcttcctaccacattaggactaattaatcaggccaagcaagagttggaacaactggaagattatatgtaaacagatgaaaattttgttgagataatttatatgttcacacacacacttcttctcctagaaataaaaaccgcaccttaaacttctcatcatcatttgtatcaccctctttccctggagctgctagatggtggattctcttttgacttctccacatcctaaaataagaatcacagaaccgtcaaaacaaagttttttggttccagggaaaaaacatttactgaggaattacaaggcaataatctattcaatccactaacctgtgatgacatcgaatccaatgacaataaatgaccttcaagattcctttcctgctgactagaatctgtcgagttcataaaagaaagctcctattataaggatgattaatatcgatataatgcttctccattaataaacttttaagatacctgaatttgcatctccatcgtcaactttctcataatctgagtggggtttctctttcacagattttgatccagagtgtcttttcttgatcttatgatcctctgaactaacaggagataatgatctatcgccccgtcttttgtcacgtccaggagatgatgaccgcaatctttcatgacgttttgaccttttatctcttgaactgttctttttctctattgatcttgacctggagtgccgtttatgtcttgatttct

SEQ ID NO: 5949 - DNA, 1359 bp, Arabidopsis thaliana landsberg
atatacatggctccggtctcgttgcctccaggttttaggttccatccaacggacgaagaactaatcacttactatctcaagagaaagatcaacggccaagagatcgagctagagattatccctgaagtagacctctacaagtgcgaaccatgggacttgccaggtaagaattatttagttaaccataaatcaatctatcagtatatatttggaatgagacccttttatggtctaagcgctgaataggttttgaacgtataggttcgaaagatagagtgaagaaaagaaaaagaatatatatcacaataacaggacaactataatatagaacacttttaccaaaattatatgtatacatttatattggtttgcatattttgattgatttgaaaatcgaagcaaaattttgaaatatttctagaattcactaatcatgaggattttaactaatatttagaaatccctttaaataacaaagagttttgtgataccatgtgttttttttttggtactagctttgactttttcgtatatatcaagaaatcaaaattttaacaattaaaatgaatcaattcaacgtttggattagtttttgtcaattcaacttggattggaagtatatgatttttctgaatatattatataacaatatagccataatactatagtagtattgattagagcatacgcaattgtaggattccctctggtcaaatcctcaaatacttttcgttaacctctcatggaccaccacacttttatgatagtctacactttgtactttagggttttatcttgagagataacatattttacaggggacagaataaaacaaataaaaaccatatatagagaaactcaagttgaatcgatattttgtattcaaatgttattgtttactaatatactcaaccatgtcaattggcagggaagtcactgattcctagcaaagaccaagaatggttcttcttcagcccacgggacagaaagtaccccaatggttcaaggacaaaccgggcaacaaaaggcggttattggaaagccacaggcaaagaccggcgggtgagttggagagatcgagccattgggaccaagaaaacattagtttactaccgtggacgtgccccgcatggtattagaactggttgggtcatgcatgaatatcgcctcgatgaatccgaatgcgagccttctgcatttggcatgcaggtttacttactaaccaaaccaatcatcaatcatctactttaaagtattagatgtattactagggaaaactatattctaacaagattcttgttctattttcaggacgcatatgcactctgtcgcgtgtttaagagaatagtgattgaggcg

SEQ ID NO: 5950 - DNA, 5328 bp, Arabidopsis thaliana landsberg
tcaagaaaccgtgatgcagattgtatatgtgtttatgagcactggaagcccacatcactgggttgattatttaatgatgcctcaagacacaaagctttcaagaaccacaagtgactcttctgatgaagctgtgtccaagtttcatcaactcatggttgagactcgagaagtactcatcaggtaagtaatgtctatctgctaagataaacacacaatttttcctctttcttacactcttggatgattgtggggaataaacttatctcttggtgtctttcttgttgcagcactgaattcacaaatatagtcgaaatttcgctcaagtgcttcacggatgcgttggtagaggaaatggaaacgcagactgaagcaggcggtttggctacagggaaaccattggcaaaggtcttaccacagattgagaagacaatgaatgtgattacagctgaaccaagcaagaaccggttcttacaaatcatcagagatctgcctgaagttaaactcttttttactcttttatacgctaatatgccgcaatagcaacttttgtttgttctcttagaaattccccaaagtgttttgctatttgctttctttgtaggggggtcttttagcttgaaagaaatgcaggaattttcgtgttttgagcttgtagaaccaaagttgatttcatttatttgttttgattagaaaagaagagcatttgtttaataggacacttggaactttgattagaaaataagtaaagcaacttgcatttaaagtgtccacgatccctccactgcgttcgtgccttgcacacaagtcaacggaacaaaggttgacttttccaatctatagctgctacaagcgcaagattttatacacatccgtaattaatgagattaccggagaacaaaagtgtaagagttatcgcaggttgtcggataaaatgtatattcagatgacagatggagttcctccgccaccagagcaaagttcgttagaccaccgggttggtcagatcaccctttcattcattacccatttgtattaatctcatcggctttacttacgaagactagtcttggttttccatttttgattacacatagattgacgagcttgagagacagaaagagatcgatgattggcttccgataacttcatcgagaaacgcgaaatggtggtactccacgtttcacaacgtgactgccatggttggagctggcgtccttggtctccctttcttcatggcccaactcggatggtacacaattttgattgttttcaacacattatcttttaacttgtttgcttttgcatttatttgttaagttttgttcacagaagtaagaagatatatattatttttagttttcatcaaatctttgcaaattttgaacatacaaaaagatgtaatttgaatacatatgtagttttttcttactacataaatttacttttgatttgattagtaatattcgtgatattacaaagtcttgttatatatgttaggggaccaggcatagcagtcctgatactatcatggataataacactttacacgttatggcaaatggtggagatgcatgagatggttcccggaaaacgctttgatcgctatcatgaacttggtcagttcgcatttggcgaacgtcttggcctttatattatcgtccctcagcaaatcattgttgaagtaagcattccagatttgatagtacaaactattgacataaaataaatgtcatactaccattttttatatatagtcttgatattggttactctttaacaaataaaggttggagtatgcatagtttatatggtcaccggaggacagtcgttgaagaagtttcacgaaatcgcctgtcaagattgctcaccgatcagactttctttcttcataatgatatttgcttcttctcatttcgttttatctcatctcccaaacttcaactccatctcgggtgtctctcttgttgcggccgtcatgtctcttaggtatacttaataaatcttatattctcatagttatatttaaacatgtgcatagtttatgacctgaaaacctgatatattgtaaatgatgaaagttcaagtatgcttctaaaatatttttacattttttttcaaaaagtggtacataattcatcatttatgtgtgtttttagttattcgacaattgcgtggacagcaacagccgcaaagggcgttcaagaagatgttcaatatggttacaaatcaggcacgaccgcgtcaacagtcttaagcttctttacgggacttgggggcattgcgtttgcatatgcaggtcacaatgtggtgcttgagatccaagcaacgataccctctacaccaagtaacccttctaaaggtcctatgtggagaggagtggtggtggcttacgtggtggtggccttgtgttatttccccgttgctttggttggctatggagttttcggaaacacggttttggataacgtgttgatgtcgctcgaaacgcccgtttgggccattgcaactgctaacttgttcgtcgttatgcatgtcattggtagttaccaggtcagtccaataatttttaaatcgatccatggtagtttcattgatcaatcaattgagatctatctgatttctgaatggacacattacggtccaaaattcacttcttaaaagttagtctaggttttgaactacatgagacacattgcgaaattttgatatcctaaatataaaatttccacttgcactcttgcagatattcgcgatgccggttttcgacatggtggagacatttctggttaagaaactgaatttcaaaccctctacagttcttcgtttcattgtccgaaatgtttatgttggtaagtacgttggcatgtactatatagagtctgcattatcaacttaattaaacaacattcgtgttaaaatataattgaagatctagactttgtcttgcatgattattaatgtattcaagaatatatctgaattagatatttgattaatacttgtaacatttttgtataatgtgtgaggacagctttaacgatgttcattgggataatgataccgttctttgggggccttctcgctttctttggaggatttgcgtttgctccaacatcgtattttgtaagtgtatctattggttcttaaattttgaacttaacgcagattaattttcatgtatagtaaatttcaaatagtgtatatataaactttgtatgctttacaatttgttatgcagcttccttgcataatgtggctgctaatctataaaccaaagaggtttagcctgtcgtggtggacgaattgggtaatatctctttttttgggtccaaattcgttaattctttagaaatacattatttcaaattagtgcttaactttcaaaaccggccttggactttagcttaaacaagataaatttgaatttgcttcaaactaacaatgagattcttatgtaacaggtatgtatagtgcttggagttgttttgatgatcttatcatcaataggagggttaaggcaaatcattattcagtccaaagattacagtttcttctcttgattaatttctcccttctaacacaatctacaatagaaaaaaatgatttttctttatcatatacatatattatcaatttttcatcatgtatttatcccgaataagaagctgctaactgcaagtgcaaagtcttctaactcaaattaatcgatcgaatgatgaatgattgaatacacagaaggaaaaataaacagtttagaagaagctacacaataaaatattgaaatctctggttaagtatcttatattaagattaatatgtatatatgtgtatacaatgataaagaagaatcataagctctaagtaaggcttaaactaagacaagaacagagacataacaagaccaatcccacgagcgactctctttcgaccttactactcgaatatattgcaagaacctacagagcaatatgttagagagctgtgaagtaacttcttggctgggttcttgattcttcaactgagccaagaactcgaataaatcatctgcaaatctgaaaaattcaaccaaaatccaccaagccctctcaactcagtatttcgtctgtaagaacctcccgactcttttttttgtgcaacctcccgactctttctgacaacaaacctgagagattatgaggttggtaataatccataccatcgcaggttcacttttcgctttggttatctcctatgaaccgttaaccccatttagttgatgccttggcgtggtttttacttttgttcttctttaagagcattgacatgtggttaagatcattaagacttgacttggactcgccttgtaaccacaacaaagcctcatgagctgcatccttctctgcatttttcttactaccacatggctttcccatgaaatccaatccattgaaggtaaccatagagcggaactggttgttcttaagctgtcttgtcttgtacacaggtgatccgtgtcctgctcgggcaagtaatgtctgaagttggttcttgttgttttcaccaccgctgttctgaagctgagcccctacatcttttaacttctttgttggtgtagggcttagagctttccggccatagacgaatctgccctcacattggtcctctgacacaagtaatctaatggcagtcataagtttgtcgtatagttgaatatcaagttttggattcacaagctgtagaaaagacgagaaacaaactttgtcaacgagggtaaaaacaacaaaaggtgtatactaaagactacggttggaactgtaccttattctgaataagttcgtcgagctctctttttaacgaaaggtatgtatatgctaaagtaggtttcatgaagaactccagatatcctccaagcattttgagatgaccatcctatggggatcacagagacgacaagatgtaaatcagatgtgaaaataagaacaacaaggaaggaaattgacaaaataggatgtgattataacttacaaatccaccggaagagattttatctccaaacaaaagaagaacagagtcagatacagcagtagagtctcgcagaaacacagaattaactttcactttgtcgttgaagactagccaagggaagggaatcattggtacattgccattcacagaactctgaaaaatacaaaaagcaggtgttggtcattcactaaagatctctataggggagtttgaagactggtaagctaaaaagatggactcaccgagtatagaagcacttgaccatcttccattgtcttgagcgtaattgacttttccttattctgcgagggagaattgtttatt

SEQ ID NO: 5951 - DNA, 525 bp, Arabidopsis thaliana landsberg
gttttaggtcggagattaggcaatggaggctgcgtttgaccagtagtttcgttctttttctttgcatttttatgccaattctttaatgcctttgacgtttgatcatcaaacaccgatcgcttcatcgttgatcccatctggaaaaaaaacatgtaaaatctttagagtgtttacaatggcggctttttactcttattggaagagaaagaatgaagtataaatcttttgacatgcctgagtcacgagagcgtaaagaggaagtgtgatgtaactgcagagaaattgtactcccaccctgcatttagaactcaagataagattcttgtggctcaagaaaaccaaatatcacaaaagaagattcttgtagctgaagaaaaccaaatttcacaaaagaagtactcacccaagagcaacccttatgattattagcgcgaaatggtgatgaaaacaggaccgtaacccgaactcatactgcaacaatggaaggagagtgagagaagtatagagagatcatgggaaaagaga

SEQ ID NO: 5952 - DNA, 516 bp, Arabidopsis thaliana landsberg
gtttgtacatctcatggattcaaatgggaaaatgcaggcaaggttttttattggcgaagctgaatccatcagcgtcgtacaacaatgcaaacgagatgtctacagggtcagatgtgatattcacagacgacgtgagccttcaagtcttctttgagcatctccagaagctggttgtgcagtcttgagtagtccatttgtttctttactttacattaaattaagcttcactgtacacgattttttttttatcatcttactttcatctactatcattattttgttttttctttgataaattttctgtaacatcattacttttctgtttttgtttcaaggacttaaatatacaaagtgagaagagatgaaatcttgattccaagagagaaaagttaagaaaagcttcactacacaaacttctttcagtagaaagatattacactatgatctttatcttaaaaacctagctttgattcttattttccaaatgagtttgctcagatgtctcatgcatactac

SEQ ID NO: 5953 - DNA, 4513 bp, Arabidopsis thaliana landsberg
tctcttggctacagacaagaataactaattcagtaaatatacaagtattaaattgtatgtattgattccatgagtaatgtagctttgttgtttggttaagactttccatttcgttccacacaaagtgattgttgaggaattaccaatctatgataatgatgtagaatccatgtatccaagatgatgaggttggaaatgctgagatgaatcaattgcaccaactattgaacataaactgttaatatcaatgtcagaagaaatctgtagaaccattatcctaaaaaaaatggtattgccaacactgtatttatcaaaaggttcagaaaaaatgattcaaagtaggttcaaatgttagagattacttacttgtaaattttgcagaaacgtagtgtcatttcacaaattgatgaccgactaacaataacttttacattggaaaaagcaatatctttaaccaaagtctcaagcatggcttcctttgtctttccaaagttatgtacctagaagactagaacccaaaataaaggagaaaaatagtcaacaattaaaaacacaaccatccttgagaaagacagttacaaaggatgccatgttatgcaagatttgttcaacctggtctcacctttgcatttttcaaaggatgcctaatgttacctacatcgtcacttttaaagacgataccacagacaacgcaagatttgcgagagtctactcccaatatcttggcaacatggacatcatcaatgttcatgatcattgcattcgttaggacttaagagcatacatgtaaatagatgaaccattctattgcaataacactgaagaaatgagaaataataaaaaaaaatcttacatgaataaaatacctcaagtcctaaagaatttaaacttttttggttaaactgcttgctagttatcatcctcattcgggaaagaaaagtctcttgcacaaccatagtctctcagatatcttaacttgttcttgaagtatctcaagcgcctaccgaacaaaaaaacaaatatgatatttatgttttaactctagaaataataaatagtaataaggacgcatcattcaccttttccaaggattttgtatatcccgaaatgttatcagtctcatctcttttaaagaatctttatggttgagaattgatctagcaaaaggaatggctaaatcatctctttcatctttctgctgcttagaggctatttcggatatgataaaaagctcatctatcttattaaggattgatgttgccaagcataaaaacaacacagagataagttacacttacgtattacaaagagagcaaaagttagagcaaagttagagatatcaagtaataaatgaaaaaatatgtatttcctaataagtaattaataatttaatatgaaataaaaactatatgaaaaatattttttatcatacaacatatgctataatcactgatcataagtcataactagaaatataaatttctatatgccgttgtggtagacgaaacaattacgagctaactatcaaatcaaataatatatctcttagttacttgattttcctttttctattttacaaaccgtgagaaaactttaaaaactgtacctaaaccataaacaaaaagatgataatgctattataattggaaaagggtactttggataattattacacaatcgggggatgaaaactataaaataaataaatttaggtactatcgataacaataataaattattggggatgaaagtatcaataattaaagaagaaactggtctcaatccgaccgttgaaagccactcgcaatttctggctaaatgaccgaagatcagtcagagagagaaatatgcgctgccataaatggcaaatttattcattgctttttcttttgaaacattctttgagatttctgtcgaatctaatattgtaaggttctgtttaactcacgcatttaattctttttccatttttttggatttcacttttctgggatttccaaaattttgacaaactttcgaactatttttttaattcaatgtgtggaatttttagttccaatcaaaccgccattgatgtgaatgtgataatgaaaatcaatgtgcttaattttgtagttgacgatgagaaacacgagacctattcatgttaggaataagagtacggaaccaggaacaccatcttcgcctatgatgacgtctcctctaatgcatcgtcatacacgttcaggatcaaatgctgggccagcttcgaatgctaagaaagctcagacaaaagcagctgctcagagacttgcggctgtgatgtcaaatcaaacaggggacgaggaagatagtgatgaagacctttcctttgactataatgctaccggaacagggagcattggactcgcagctggaagatctcatccttctcgctctcctgtggtaattaaaattaacagactcactttttcactgtaatgaagggattttatgtgacagagttttctggattgacagattaggaatcctacggcaaggcgtcaacagatggcaactccacagttagttgatgaggacaatgaggatgatgatttttcagtggatgtaacgagcagtagaccaagtattggacttcctggtggaagagcaatgagacctcagtttcctgtgatggtcagtctagttttaagttcttttgcctgccaagtgtatcttggtttcagctttcatatgttgttactcttttggtgcagacaaaaattgcacctccgagacgtacacaaccaacaaatgaaggaaataagaatgacggtaatgatgatgatgatgttgtttctatagattatacaattggtagaccaagtattgggcttggaagtgggagggctatgcggccacaatcttctatggtattgatcgactcttgaaacttgttgtttctaggtttttttattattttcatattttaactatttctcaaaatttcaatattttggaaagcacagaacaaaacccaaccacaagggcgtccggtgatggcagctcatcagcgagcagatgaggataacgaagatgatgagactccatatgtttatacaagcagcattccaagtgtaggacttcctggtggaagggctgcacggtcacgttctcctctggtaattagtttgttaaacacactcgttttgaatcttgtagttgtatagcagctataagaatgttgagagtcatgttgttagtagtgaaatttctgatatccttactattcttgctagttattattcgttaaacttgatatttcactttgtgtattacagactaaaaaccctccactgaggcatccacaggcaatagctcagccaccatccaatggagaaagtgatgttgattatgatgagtcgtatactagtggcatgccaagcattggacttgcaggtggacgatcaatgagacctcgcactcctttggtaattttagttcgtagctattctgtctcacattgatactttctctatttgaacttagtctctataatgtcccctctaatatgaatcctgaactagtacatgttttactacaatgatattttgctagcttttcagaaatctgtcattcaagaacatgtttaatattccaaaatatcatagtactagaaaactgtttattggtgttttgaagtttgtaaaagttttatcagcattaaccaggaaagaaaagtgtgtagttaacgtttttgagtatatacatcagcattaactttatcacgcctcaaagtgttttgttgcttttacgtcttctaaaacttactttaatttttcattagtcaattcgtactaaggaacaacctcagaccggacttccaacttcaggtagccgatcttcattatatgaggattccacagaatcttcagctatgtcaactttgacgcatccatctcagacaacaaaccaagtggagcaatctccatctgctcgttctgcaatctctaacaaatcatcccagtctctcactgctatggaccaacctccatcagctcgttcatctttcaatggtcgtccaataaagacagttcctttaatgtcatcttctgtgcctatatcactcaaaccagtgactcctgcatttcaatctaacacgccaaccaatcttcgaaaagataaaaggtaactagccatcattcttcacattcacctactcatttattgtcagtgtgtccttaattagtctagtgatttctgtctattagcaggttttccatggatttgggaagctcaggcaacttaagagagttagggagccaacgttctacttcagctttgcaagatgaggtttgacttctctagctcatgccttttatattttagatttcttaagttcataaatttttgacttttcgtttcatttcaggttgatatgctacaggaagaaaatgaaagtttgttagaaaaggcgatgcccagaaattttcacagttggcgtcaagatgcattacattctttgtgaaagtagataatcctatctaaaattttt

SEQ ID NO: 5954 - DNA, 4137 bp, Arabidopsis thaliana landsberg
cacaaaaacttcacttcactctctcttttcttgtgatcctcacactttcaatctttccagaaaaaaaaaaattcaaatcgccaaatgaaaacagaaaatcaaataaaaaacaatgaaaattacgtttctgtcattcaccttctgaaaaatatctcacgcttcttttttagtatatactgattctccgtagtatcttctcccttataagctctgaagtgttggctcatctctttccagattccggtttcgaaatttggtaattgctccataatcttctgcaattcttttgtgaaatcgtattcggatttcactataattttcgattttttttttttgtgttaagcaatttttgaatactgtggttgttttagggagataagcgatggcaaacgccaatggaaaagctgcgactagtttactggagaaaatctcggctaaggcgaatccggaggccgatgatgctacggagatcgctgggaatatcgtctaccacgccaagtacagtccacatttctctccattgaagttcgggcctgagcaagctctctacgctaccgcagagagtcttcgcgatcgtctcattcaggtaaccaagtaatttctggactgtttcataagttccgtttgatgaagatatgctggtatagaaatttatggttttccgtggttatatccatctggatttgcagttgtaggagctaatctatatgtgtgtgtgaatgtgttctttgtgtttatgtgagagtgatataaaatttgggttgtgttgcagctgtggaatgagacttatgttcattttaacaaagttgatccaaaacaaacttactacttgtcaatggagtatctccaaggtcgtgctttgaccaatgccattgggaatttgaaccttcaaggtccatatgctgatgcactgcgtacgctgggttatgagcttgaggagatagctgagcaggtacattttaagttaccatttttctctttgaagacttgggacctaaataaattattttttgatctctccatgtttgcttgtaggagaaagatgcagctctaggaaatggtgggttagggagacttgcctcgtgtttcttggattcgatggccaccctaaatctgcctgcttggggttatggtttgaggtacagacatgggttgtttaagcaaataatcacaaagaaaggtcaagaagagattccagaggactggcttgaggtgatgattgtcagtgtggtgatttcaacttatggttttctgagaactgtaactcatcctctattaatgggaatttgcagaaattcagcccatgggaaattgtgaggcacgacgtggtattccctgtcagatttttcggcaaggtgcaagtaaatccggatggatcgtaagtattattgttggaacttacatgacttagcatacgtctgtacttgaaatttctgtgcatatatacactagtgagttttgctacgttgttctctgacttttcatcgaccttgctattaagcattgtagtggatcaattgactattttgcagaaggaaatgggtagatggtgatgttgtacaagctcttgcttatgacgtgccaatcccgggatatggcacaaagaacacaatcagtctccgtctctgggaagcaaaagctagagctgaggatcttgatctttttcagttcaacgaaggagaatatgaattggctgcacagcttcattctcgagctcaacaggttatgacaagtcatctttacctactgctccatcttcttttgctttgtggctttttgtttctctctaacaatgtagctatatatatgtgcagatttgcactgttttatatccaggagatgctaccgagaatgggaagttattacggttaaaacagcagttctttctctgcagtgcttcgcttcaggtttgtcaaattggttttaggttcctttcatgttcttcatttttcttaagccataatgtattgattaacttaggactctctgatggatgtcatggactgtaaatgttaaatagctggaaaataaaaataagaaaaaattcaaattggcatgttaattagaaagagaatccaaaaaaactactacaagtaaatttaccttcgattgagtcataattttttatatttcctcttcacaatatggaaatccattgcaggatattatatcaagatttcacgagaggagcaccactgaaggcagccggaaatggtcagagtttccaagtaaagttgctgttcaaatgaatgacacacacccaactcttgcaatacctgagctcatgcgattgctaatggatgacaatggacttggatgggatgaggcttgggatgtgacatcaaagtaaaatatttatgcatgaacctttcaatatttcccaacaaagttttcacacttttctgttgggacttatttatatggtttacaggaccgttgcttacaccaatcacactgtccttcctgaagcgttggagaaatggtcacaatctttgatgtggaagcttcttcctcgtcatatggaaataatagaagagattgacaagagggtattttgctgatcattctaaggatttgtttttatcatatggtgcaataataaaatatataccattctgcagtttgttcaaaccattcgcgatacaagagttgatctggaggataagatttcaagtttgagcatcttagataacaatccacaaaagcctgtggtgagaatggctaacttatgtgttgtatcctcgcatacggtaagtggtcccactgtcaaagttatgttatattgtttcttcccatgtagtcttggtttcaagtactcattatgagggcctttttgcaggtgaatggcgttgctcagttacacagtgatatcttgaaggctgagttattcgcagactatgtctctatatggccaaacaagtttcaaaacaagactaatggcatcacacctcgaaggtggttacgtttctgcagccctgagctcagtgatataatcacaaagtggttaaagactgacaaatggattaccgatcttgacctacttaccggtcttcgccaggtctgattttttatttatctgataaccagatctgcaatgggtttttatcttgttattctgatgttatcttttcttcttctagtttgcggacaatgaagaactccaatctgaatgggcttctgcaaagacagccaataagaaacgtttggctcaatatatagagcgtgtgactggtgtgagtatcgatccaacaagcttatttgacatacaagttaagcgtatccacgaatacaagaggcagctgatgaacattcttggagtagtatacagattcaagaaactaaaggtatacttggctaacccatccatgtggattcctagtagtttttctatgtttccccttgcgttaaatgttatggtagacctgtaaaaaagtttagatacttcagcgtattcctttcctccggctaaattttatcttgagtttttataccttaaccaaggaaaaggttcttaaaccaccacaattctaatattaggcggcaatgcatgtatttcttgtgtgacattctcttgtgcatctgaatgttacaggagatgaagcctgaggagaggaagaaaacagttcctcgtactgtcatgattgggggtaaagcatttgcaacctatacaaatgcaaaacggatagtgaagctggtgaatgatgttggtgatgttgttaacagcgatccagaggtcaacgaatacctaaaggtaacttagaggtggctaagcgtgatgcttgctcacctgagattgtttttgatcagaaactgtcaatattacacatgtatgcatctctcaagatgaactaggtttcttttcgtgaagtcttatgctactcaagcctcctttccgagagcgaagctttcttattgagccaagcctgatgcaaatgcaataaatcactgttctccttttattttccgaacatagcttgaagaagttttaactggttctaacgcatttgcttctccaggtggtatttgttccaaactacaatgtcactgtagcggagatgctaatacccggaagtgagctatctcaacacatcagcacagcaggcatggaggcaagtggtaccagcaatataaattgct

SEQ ID NO: 5955 - DNA, 516 bp, Arabidopsis thaliana landsberg
ctataaccgctacagctacacagtccaagacggtgggacggtggcttaaggaccggagagagaaaaagaaagaggagactcgggctcataacgctcagattcacgctgctgtctctgtcgccggcgttgctgcagctgttgctgctattgcagcagccaccgctgcgtcttctagctgtggtaaggatgagcagatggctaaaactgacatggccgttgcttctgctgcgacccttgtggctgctcagtgtgtggaagctgctgaagttatgggagctgagagagagtatttggcttctgttgttagctccgccgtcaatgttcgttctgccggagatattatgactctcaccgccggagcagctacaggtttgtttagttaatgggttttgatgaagttttgattttgatgaagaaaacgctaaaattgattgactttgggttcaaacatgttgaatacttcttgaccctgtaatgaggattgctaaagttttgattttgatgaagataatgata

SEQ ID NO: 5956 - DNA, 1952 bp, Arabidopsis thaliana landsberg
cgatgatgctaagtctgtggagttgagaaacaagctgtccaccttcacacaaggttcagctgaagctttcaaggctgcttgggttcctttcaaggagtaccaacgagactgcccacatctaggtaccttcttcagaggagtcgattggagatacctgatggctctagacggattgaacaatggtgacttcaatacacgttacccaactgatgctacagccatgatagagaacctcgcttgcagcaacagtaccaagaatgctgattttgagaggaagaagattgcgggaggtatttcagttaatcaaatggcagaggtgaatgctaagcttgatttggttcacaacttgcttataaggaagaaacatgtccactttgcagctgaggatgagactattgagcctgagcctgagtcagaggaaggagtcttctacatagatggtcgggatacaagaagttttggaagccacatggcaactttagtggcaacaggtttacaaagaaccagagttcctccaactacatcctaaagcctgctttccagaaaacttttccttaaaacaactttcagaggacctatggtaactcagcctaccaaacccccttccaccctcagcagagacaagaatggaatcgatgcttgagcagattcaggagagccaaacaaagcttgttgtggagtttaatggcaagtttgatgctgtctacacaaatcttaatggaaagatcgataatctgagctctctattgaagaagttggatgtaaaggtagctcaaactgcacaatcgatcaagagacaagagggctttcttcctggtaattctgatgctaaccaaggaagagctgtaatgccatcttgatcagagaaggagatgatgtgtgggaagaattagacactgaagacgagttggagcttgtagttgcagagatggtgtcgactgacaccttccagtgtcgatcgacaccctatcgaacgctcttctcagaaacgattccttacgaaggtgtcgatcgatacccctctagtgtagatcgacattggatctagactgcaccttgtgaggtgcgaataccgatgcagcccgagtctgtttacactcctcctatcccttatccgaggaagcatcgttctaagcaggagattcatgctgctaagtgcacagccataatggagaagatcctcctttctcttcctaaggatgcatctgagacagcttctgccccactcaacaggtatgtcacgtgactagttgacaatgagtattggctcagatgaagcttcactgctgacacgggacatcaatgcaatcatgctgcctaaggttaagaaagagaaggcacagagagtggacattgttgagtagttccgcaccatcactcctgatcagaccactgagaaactccctgagccaggtagctttgttcttgattgctctatctccacaggcaggttcagcagctctttatgtgatctgggatcgagtatcaacctcatgcctaagtttgttgatgagagactaggcatgactaactacaggccgactagaatcactctcctcttcgtggatcgttccaaacgcatccctgaaggaattcttgaggatgtttctgttaaggttggtaactccctaatccctgctgattttgtggtcctggactacgataaggaacccaaggatcctcttatccttggaagagcattcatagctacagctggtgctaggattgatgtgaagaaaggtaggatctctctaaaagtttgtgatttggagatggagtttggcatggattgttcagagttcactacgactattagtagcattgcctctggcacaaacacacctcctaaaactgctcagaatccccagacagagacacacacaatgctcccatcagctcagctcgccaatgaaagttgcagagcaacgatgtcgatcgacactatccctcct

SEQ ID NO: 5957 - DNA, 2642 bp, Arabidopsis thaliana landsberg
caccattattcgcacatagctaagacctttaatggtttcctctctctctttatctctatctgtctttgtaatttgtttaccgactacaatggtcaaaatttctctactcctataaaaatgggtcgccttgtttttgatcaacggatttgattcatttttctttttacctttcttcctgctttcgtattcaatttgtagttgaccagttcaaaagtctttataccagaaaaaaaaatcgttttttattatattataagacttttcccctgaaattgttgttcctctgtttcgagcgttcgttatgagtactgtggagagtagcaaaccgaagatcatcaatggctcttgtggttatgttctagaagatgtaccgcatctctccgattaccttcctggtcttcctgtatgtttacctctctctttttttaatctgatttgattaaagcttttgcttttgagctttaactgttgcaaaaggttgaaactttgatctatgttgatagatatttatatatcaattttttcagctgaggactgtttagtttttttgtttggaatttgagatagatgaaatgaatttcccagattctgattagtataagatagcccagggtaaagaaaaaggggtcttttgtatttgggtctcaagaattatgaacctggatcaaaatctgtagcatggtttaagagtttttgtccttttaccatgttatttttgggatcgaatgatggttaagttttgattaatggtcaattttcttttggttttatgttattgtagacttatcctaatccattgcaagacaatccagcttactcagtggttaagtaagtcctttctcacagatgttttggtgactaaggttcctaattgtgtcctatggtgattcaatcattagcctgcagttgttacattagttttttttttttggaaattttcaggcaatactttgttgatgctgatgacagtgttcctcaaaaggtatatatttggttgggttctttctataatatcagggcatcctgagaatttggagctcatgttttgtcttactgactcttctttttgttgttttagatcgttgttcacaaggatggtccaagggggattcattttagacgagccgggccacgtcagaaggtttttcgtcgttttatcgaattgctttaaagtcctttttccatttcaatagggtctgttgttgacttagttctctgcaggtatacttcgaatctgatgaagtgcatgcttgcatagttacctgtggaggtctttgtcctggccttaataccgtgattagagaaatagtgagcagtctatcttatatgtatggagtgaagagaatactgggaatagatgtaagtttctgtgattgtaatctccttcttaccaaaacaaacacggtattcgtttgtttcattttcacatgcttgagactttttcagggtggatatagaggcttttatgctaagaatactgtctccttggactctaaagttgtaaatgatatccataagcgtggagggactatccttgggacctcacgaggtggtcacgataccacaaagatagttgacagcattcaagatcgaggaatcaatcaggttttgataaccatcacctctttacaccgtgttctgttccaagagtacatacaaactcgttcttgatgtagtttttttcatcgttcaggtttacattataggaggagatggaacacagcgaggagcatctgtcatatttgaggtaaatttcacttctaccttacaattctacaatttcagtgtttactgatcttttggtggtaaccatgtaggaaattagaagacgtggcctgaaagttgcagttattggaatcccgaaaacaatcgataatgacatacctgtatgtatctctttctactgctttgtctctatagaagagctgtatttcttatgtggagaaattgagaacttgacttttgtatttgtgcaggtgatagacaaatcttttgggtttgacactgctgtagaagaggctcaacgagctattaatgcagcacatgtggaagccgagagtatagagaatggtatcggagttgtcaagcttatgggtcgctacagcggtgagaattcactcttctacttcttctttgccttatcaagctctcttattagactatttcacaagtttgttcactgctttaacagggttcatagcgatgtatgccactctagcaagcagagatgtggactgctgtttgattccggagtcaccattttacctggaaggagaaggcgcactgtttgagtacatagagaaacgactcaaggagagcggtcacatggttcttgtgattgcagaaggtgcaggacaagatctaatgtcgaagagcatggaatctatgacactcaaagatgcatctggtaccaaacttcttaaagatgttggcctttggctgtcacaaagcatcaaggtaatccataaattacagagacagcatcaaacattgatgcataggaaaatcagactaaactcacctactattaaattttggttttactcggttgtaggatcattttaatcagaagaaaatggtgatgaacctcaagtacataggtacaatttatatcccctgcattgcattctctccaccatgag

SEQ ID NO: 5958 - DNA, 585 bp, Arabidopsis thaliana landsberg
  unsure (1)..(585): unsure at all n locations
agttacaggtaaaaaaggattatgcttgaaaattaccttctcagggacactatcatcagcatgaacaaagtattgcctgataaaaaacatccaaatgagaacaaaaactatgaactttaagcaatggaaacgtctgaaataggtgaagatacttacttaaccactgagtaagctggattgtcttgcaatggatttggataagtctgcaataacatcaaaaccacgaattatcaccattttattaagagtaaaccagaaacagatcagaacattgaaacccaaagctaaagattcctcctttgttaactagacgatatcagattcgatctctttgtgcaaatcgagaaattttcaaatcaatttagaaccaatcagagatcaagtgaaacatacaggaagatcaggaaggtaatcaatgagatgaggaacgtcttgtagaatataaccaccaggaccgttgacaatcttcggcttgttacttctcggactagacataacgctgacgatcaacaaatcagatcaaactctctccacgaagatgaaatgacaaatcgtgaatcanacccgttgatccaatatacttgg

SEQ ID NO: 5959 - DNA, 3200 bp, Arabidopsis thaliana landsberg
atcaggacatttgaagaagaatgtggtaactattttagtcaaggaaggcatgaaagagaggattcagtctctaaacagatttacttgacatttccatctgaaagctccttcactgatgaagacgtctcaacctatttcaggtaaatcatgtgttgtgatataatcgggttatagatgtaaggaaggactctgtttggtgtacatttggattagggagtcatgtttctttgttttgactgtcatgtttttttttaatgtgtagagattttggacttgtggatgatgtgaggattccatatcagcagcaaaggatgtatgggtttgtaacttttgctaaggctgaaactgtgagaaccatattagctcgtggaaaccctcatttcatatgtgactcacgtgtgctcgttaaaccatacaaggagaaaggaaaaatccttcaaaagtaatgcttggtccttgttactatttatcatgtttttttctttctcttgggcgttttcttattatagtttggtgaaacaatagcaggaggcagcagcaacaactacacgagttgttggagagagggaactattcaccttcttcaagtccgtctggaaaggactcgagggaactatatgaatgtcgcttaggttggtttcaatttgttaaagagacttcagaaaaacaatttcttgtttccttcttactgagatagtaactcttcattctatattcgttaccaggaccaaggatgttttcaaagaagacacaggagatgttgcgaagaaaaaccgagcaagctgatttacaacatgccatagaagtagaactccaaagatgaaggttcttgaatctgcaactacctgacatggagaataaatatattcaccatcaccaccagcgtagtccttctattggttctccctctcatttcccacctcgattcaatcatagtcttctctttcaatcaggaaacaacaacgaagaaatcatggaaggttgttgttgttgtgctctctacgttttaagctttctttttctcggtctttattcattcttctcctcttttgttatcctttggtcaggcgacagtgatagaagtgagaaagatcttcaacaagtagcaaccagcaacgaagaacgtggttacaataacggtttctacaaagggtaaatgaagtgataagaatcaaggcttttttaagtcttcttgttactgaaatatgatactttagttcttacagacagttaactaattatttctctaggcaagagacgagtctggagaatactctccctgatagcttgtttggttctccaaaaaaatctggcgaaacctaccaaaccgagtctgataccgagcataataataaggaagcctcatcaaatcagttagcgtagcaatgggtatgtttaaaatccctagtcattttacctcctaatagtcatcaagaacatttactcaagatttttcagcctccatataagcagaaagaagcatgtgtatgaatgaaaaggtaaacaatttccgccatggatcaacctgaaactcctaaaaccgtcacgttttctaactctccatttcgtttttttgttaattgcagaaaggtgtagaagactgataaaagaatgaagtagaagagaagaattgtctatatatagtaaaagctaagaggtcacatggaacacaagagagaaggttaaagagaacagttttaggattataatatcatctacaataataggattttaccactaatctcagcaacatatgaatacagatcaacacagtaactgtaactcacaagtaggtttctttttggtaatttctttttaccttatcggatacaacacagttaccatggttgtatgaaatgcatgtgttttttcttaaagctctcttgacaggttgatacttttaagttaaaggtgcacattttaattgaactaaaccggactgaaatcatccaaatgttgtgattctgttcggtttacttttgatcggacccggttaagcatggttagatttgtatcaatctgattaaaccagaatctgttgtatatttaagagaactcagagaaatttaatgattagtttctttctggtaattcgtcttcttgatcatcttctgtggtaaacataaaaaacttttcggccaccatgcaacccggcgacgcaattgcgactatcattaaaaggatcctaactttggaaccagagcacgctttgaaaatcattggctatattctgtttcaggactttggacacactgaattgattcgacttgctttttgccctgcattgcattacaaggtcactgtgaaaaagctaaatccgctttgggtctttcgagacccttcaatctccatcaccattcattgtctcagtcttccccaagaaatgagttcttggacttctccagaaacccttaccctttgtatccttcgttaactcgaaatacattaggatattaccctaactttcatgacggttcgtcgcaacaacaacaatggagtaaccattttccaattcccagattttgggtacccggttatcagtttccaccaggcggtttagctgttcctcctagtgtttttggtcctcccagtgagagaatatctccaaatcagcaacaaagaatgattgctactcatggctctccagtgtcgaacatgtaagattataatttatgtttgcttgatgctttctcttgatatatgtttggttactagtaaagaaacgcaaagactttacagaacaagtgtagtagcattgtagcttgaggcaagtttgtttaacttggtgtttgtttattctgttgtttctgtatcaagaagaagttttgaactctggggattggttttgcttatggtgattcttcttttagacaaggatcaggacaatttggaatagaaggtggttttgggtcgccgagtgagcaacaacgaatgattgctcctcagttcatgggggattttggctctcgaatgtcgaacaggtaagattgggatttttgtttgatttctcttgatatatgtttggctactagtaaagaaaggcagagactttacgcaacaaatggagagtagcattgtagcttgaggccaatttgtttaacttggtgtttgtttgttctggtgtttctgtataaagaagaagttttgagctctggggcttggttttgcttatggtgattcttcttttagagaaggatgct

SEQ ID NO: 5960 - DNA, 4693 bp, Arabidopsis thaliana landsberg
attacaattattattttatacattctttgtgagaagtaaacacttctacgtgtgtatatgtgattggattgacatttttagatttcatgtctaattttttgtataagtatattttcattaaggtgcatgtagaaattgcataacgaaatttgtaatacacattaacacatggcttcaatcgtatatatctagaagtagaagactgcgtcttgaattagatagcgagttctggcatcaacaacaatccagtttgcaaaatgtgcaatgtgattaacattttaattacatgtcctaacgcttgagttattagagaaacattatctctgttcttcagtcttttggagaatatggaccctcaagctactcttctttgcctgttaaaagaaaattatctcaccattttagcctatggagcttccacatccaaattgaaccaataaaaaacaaacctttcatgtgatagataaaactaccggaccggcacatggtataatgaaattaggagataatgaattaccgtgaagagaggaatggataaaaggctctcgtccatttcttcaaaatataacaattcttgattgaacatgccgatcaattctgtcagctcatagaggattatttcaacctgctgatatttaatcacccaagacattcttaaattaatttcttttacatgtatctatacaaaaaaagttaggaaaatgatctgtatagataaagtggacttactcgtgggagaaacttgatgatgacgtcttcgatctcgtccatgacttctatagctatgaccatttcttcatgtatcgacaccatatctatctgtaacttccaaattattagtttctgctttcttgacaaatacacaaaatgtttataaacaaattggtttcccaaagagagaaattctaaccgtggcaccatgtacgaggggtaatcggacagacaaagcatggagttttcgagttagcttgctcaacgcttcggagttttttgcgtctatttttgaccactcattaagtaaaggcatttggaggctgagaacttcacgtactttgatatcttgacggagcctttgaatttcaatcaaattttctacaacgtagttcctcattttgtatatcctaagccaaacccaaaacaactgatcctgaaaccattcacagaaacaaattaatagatatttataagatacaaatttaaatatttttcatatagtttttgtacctcaacgttgatcttaaggttagccatagtggcttcagttcttgcgttaacaaacctccattgaagtaatctgttttgaaaaatcctaaaccggtgataatcctcctcttgtaccggagatactttcttctgcgccatgaagtacttcaaaactcctgccaccgctccaccgccaccgcttcttatcttggccttgcttacgggtgactcaggcggcgtcatgcacattgaagtcgtcggagctgagctggacagaggcgtcttcatagtcgaaagtcttccaggagacaacgcccacgccgatggtgagctggctcccggctttacccctctcgatgaagcgttactacgaggactaccacgcgtacgttgctccaagtaccgagcaaacgactctctgcttctaccgttgtttatctcttgagatcttgatgcgctgtatctcgccgggattatgttctcgccggatttagagtcggatgatccgatgggtctggaggatcttgttgtggactgtgatctggttatcacactcgtatgcttgaattggaaggcgaagaggaagaagatggagaagtagaagcagataacgagggcgtttaagacactgggagagagattgaagagcttatagtccggctccggttattattgggcgatggaggacggagtctccgaccggtggttgccattttcttctttaatatatgacgacggttaactatatgactatatcatacaagacttatattcggtttcgtttctcgactcactttcccctgtccttaagactcttacagtaaagctggaattatatggttcaaggaatcgtctagtctatatacactggtttgaacaattgtgatatataatatagttaggggtatattatatttaatctgttagataacggttggggtacttgaagatctgtaggagttgacagcacgtagaggcagaggtaagaacacttctgcatgtagtgtgtctacataataaaatatagagtgtattttttacacacaccaaaaagagagattataattaatgtattatgtcaaagcatatatgaaggtcagcttagctagagacacgtcttttgtttatctctcgactaaacaacatggcgttttaataaaatcaaaacttaaaaggtccaattcagaacggccccatagtatatagtctacgttgaataaataaacctcaagatagcgtcaaactctttagtctttacccaaaaatattgttttggataacgtcaaaactctaagtcttgacctcaacaccaatatatatttgccttctccaatatctgatttttttaattgtttatccgagtcttcttggtcttttcgaatgtttgcccgaaccagaccttcccacgttcggtggttggtggccgcctcggcctttggttgatttctgtccacattttggtccttttcattcatgtaccatgttctagggtcatttgacttgttgaccataaatctactaaaacaggcctaataccgatgggccgtagcccgttaataaacaagacaatttatatttgtttcacttagcttgggagccacggatctctagaaacatccagagaaatatcaatctccccacttctccagaacattcactcactgacaatatcccaccttcaacacttaactcctgtatatagtcctcccctgtctccagtttcgtcgcacacagttctcagataaatactaaactcactgttaaaactttctcaacaaagcttcctgtttctctacaaatggcatctgctctcgctcttaagagactcctatcatcctccatcgctccacgttcccgtagtgttcttcgtccagctgtttcctctcgcctcttcaacaccaacgccgttaggagctacgacgacgacggcgaaaatggagacggcgttgatttatatcgccgctctgttcctcgccgccgtggtgatttcttctcaggtaacaaaccaattgtttcgcttttcctccagatctatgtctctctgttgttaacgtagcgaaaatctagtaagaaaacaggtattagcttacactgagctcaaaatcttgacatgattgattgtgtctttgtgtagatgtgtttgatccgttttcgccgacgaggagcgttagtcaagtgctgaatctgatggaccagttcatggagaatcctctgttatcagctactcgtggcatgggagcttcaggagctcgtcgtggttgggatataaaagagaaagacgatgctctgtacctgagaatcgacatgcctgggctgagcagagaggatgtgaagctggctttggagcaggacactctggtgattagaggagaaggaaaaaacgaggaagatggtggcgaggaaggagagagcggtaatcggagattcacaagcaggattggattaccggataagatttacaagatcgatgagattaaggcggagatgaagaacggagtgttgaaagttgtgatcccgaagatgaaagaacaagagagaaatgatgttcgtcagatcgagatcaactaaaaacgtcgacgtttttttctgttctagttttgttgataggtctttgaataagaagtgtgtgtagtttggcacggtcgatgttgagtcatgtagtctctaaagactaaaaggttatatgtttctttcttgagacggtggttttttgtcttgcttaaaccaaaatttgcattccaaatcaaagcactaattaaataagttcctaatcgtgtattcttttagctaactcggtcggtttacatgcctttgtggttatgagactggagcttatggaacgtatttgggtttaaaaattttctgtagactaggaactaggaagactttaagacgaattctgaggctgcgtaagttgtcgacggactggtctattaataacgcgtaaaagtgttaggcccgttcgagtagaatagcgcgttggacagcccaacttgaatgaatcgatcgacttttattaaaaaaacaaaagtagggcaaaaaacaaaaaacagaacctcgacattaacctaaacctaagagcaaagcacattcacggcgactggaaagtagaaaaccttattgcttcccgcagatctctctctctctctctctctcgtaactgtttgttcgatggcactgaagaaggctgaagaagtgatcgagagccctcctacttcaagtgaagaagaggaatctggctcataatctgagtctgaaggcgaaactgaatcggagctcgagcccgagtccgagcctgctaagacgatcaagccgatgcctgtcgtgaccaaaccaattccagagacgtccgcgaatgtacctgagacttcaacggctaagcgtcctttgaaggaagctgctcctgaagctattaagaagcagaagacatcggaagttgagcatgtgaagaagtcgacaactaatgatcaggttagaacatgcggagagg

SEQ ID NO: 5961 - DNA, 1546 bp, Arabidopsis thaliana landsberg
acctgctggttttgcaagaaagaaggtcatgttaagaaagactgttttgctagaaagaagaaaatggaaacagaaggtcctggtgaagctggtgtcatcatagagaaacttgttttctctgaagcactaagtgtgaatgatcagatggttaaagatctatgggttttggactcggggtgtacttcatacatgacttatagaagagactggttctgtgattttcaggaaaatggatctacaaccatactactcggagatgatcactcagttgaatcgcaaggccaaggttccatcagagttaacacacatggaggatctataaagattctaaacaatgtcaagtatgtgccaaacctgagaaggaatctcatctccacaggaacacttgacaagttagggtatcaacatgaaggtggagcaggaaaagtgagatactttaagaatcaggttactgctttgtgtggaagcttagtcaacggtctgtatattcttgatggtgagacggtgatgactgaaagttgtgcagctgtggactcacagagtaaaacagcattgtggcatagcaggttagaccacatgagtttaaataacctgaaagttcttgctggtaagggtctattgaacggtaaagaaatcaaggatttggatttctacgaacattgtgtaatgggaatgtccaagagactgagtttcaatgtgggaaaacatgatgctgtggaagcactgagctatgttcatgcagacctctggggatcatcaaatgtatcaccctccttatcaggtaaacaatactttctctctatcatagatgataagactagaaaagtatggttatatttccttaggactaaggatgaaacttttgataagttttgtgaatggaaagaacttgtagagaatcaggtggatagatagattaagtgtttgagaacagataatgggttggaattttgcaatactaagtttgacaggtactgcaagactcatggtattgaaagacacaggacgtgtgtgtacacaccacagcaaaatggtgttgcagagagaatgaacaggatgatcatggagaaagtgagatgtttactgaatgagtcaggtctggatgagagtttctgggctgaagcagctgcaactgctgcatacatcattaacagatctcctgcctcagccattgatcataatgttcctgaagaactatggctaaacagaaagccgggatacaaacacttgaagagatttggatcaatcgcatatgttcatcatgatcaaggaaagctaaagccaagagcattgaaaggagtgttcttaggttaccctgctggcacaaaaggttacaagatatggctgcttgatgaaagaaaatgcgtgataagtagaaatgtgatatttcgagaagatatggtctacaaagacctgaacaaagatgtgaatgatgcagtagcagaagacgctgaagcatcaacatcaaattctgatgttatttcagaattggtcaagaagcgagtcagttctaagcaaggtggagtaattactgagcacgtagaag

SEQ ID NO: 5962 - DNA, 955 bp, Arabidopsis thaliana landsberg
tcctcatcattatcagggaacaaatactttctattcttcatttatgacaagacaagaaaggtgtggatttacttgctcagaactaaagatgaaacttttgagaaattctgtgaatggaaggaattggttgagaatcaggtggacaaaagagtacagtgcctgaggactgataatgggttagagttctgtaacacaaagtttgatgcctactgtaaaacacatggcattgaaagacatagaacttgtgcatacacaccacaacaaaatggtgttgcagaaagaatgaacagaacaattatggagaaggttcgatgtcttctaaatgaatctggattagatgagagcttcttggctgaagcagctgctactgcagtgtatatcatcaaccgttctccatcttcagccactgatcataacattccaaaagtgttatggctgaacagaaaaccaggatataaacacctaagacggtttggttctgttgcatacgttcatcatgatcaagggaatctcaagcctagagccttaaagggaatcttcttaggctatccagcatggactaaagggtataaagtttggttgctagaagaagaaaagtgtgtgatcagtaggaacgttgtgtttcaagaagaagtagtctacaaagacttgaatggaaaatctgaggtaacagttctagaaaacttagaagctccaacatcagaacctgatgtgatacctattgcagtcacagaaccctctcacactaagcaaggtggagttacagtgactgagcttgaaattcttgatgagactgattcagaagaagaagaacctgttgagttgattacacaaaatcaatcacctgtaaatagggggttaaccggatatcagttagcaagagatagaccaagaagacagattgtccctcctgtaaagatgaaagactactctcagtttgcctttgctttgatga

SEQ ID NO: 5963 - DNA, 974 bp, Arabidopsis thaliana landsberg
tcttcatcttcaccttcaccgggctcatcgaatttgtcaccctctttgaactctggtaatcttttcaatctggataacctttaaagctcacagataatctggcaagtcttcaatctaatgagttttatctagcagggagcgaggccatttctactccaaacgtggtagctaatagctttgatgcagcgttggctagtgagaacgaagtaattgtaaatgaaattgtccatgacaatagcagtagttttgctgatagcctcgaccctaacactggggatacaagcaaccttcaggtacataaatataagctagttaaggctgtgactgatgcattttgacttcactattctgattcatgaagttggaactataatattttcaactttactcatatttcttcacttctgtgatatccaggtgagggttaaggagacaatggaaaaggctttctgggatggtgtcatggaatccatgaaacagtcgcagccagacttcagctgggttattaaactcatgaaagaagtcagggatgaactctgtgagatatctcccaaagactggagacaagagattgttcaaactatcgatacggatgtgctgtcacaggtgcttgttactacagtcttgtctttaattattggtacaacagatacgttatgtacttaatgtctctttcttttcttggcatgattcagttactggcttctggtaatgtcaacatgggttatcttggaaatattcttgagttttcccttggcattttgctgaaactctctgctccagctaatgaagaggaaatcagggttactcaccataaactaatgacagaacttggagagatagttccaactgatggccattcgaattcgtcatatgcagtcttaatggttaaggggctacgctttgttttgcagcagattcaggtatgcacattttttccttttcgtactttgtggacataatgattttggtcg

SEQ ID NO: 5964 - DNA, 2664 bp, Arabidopsis thaliana landsberg
  unsure (1)..(2664): unsure at all n locations
tatataccccaatataggaatatgtatatacaaaaatacatgagtgtacctttgataacgagaacctaagatgtctttttgaccgtactttcgccaagtccatagatctccctcgtctatagccggtatggaaaccactttctttaccctactttcgctatgtttcttctccctgcatccaacgtcgatataacatatatcgaaacccatgtgattatatactgtgatttatagctagttctgtgatcaatgttagtgtgtgccatgatcagttcggttgaagataaggttttgtggaaaaaaaaaaaattccattcgccaaatttttgcaattttaccctctacctctaaaatgcagattaatcacacaaagtaaaaagtaacacgtaatgtaaccctcttttgctatcgacacggagtttaactctacttttagaattttaaaaatctaatttttttttttttttgtggcaaagtttaaaaatctaatgtatgttaccataaaaatgattacaacatacgtataaaggttatttttatggcatcaaaaaagtttttaacatgataataagaagtaaaacaaaagcaaacatcaattgaaaattgaaaaaaaaaaaaaaaagactaatgattcccaaatctttgtgggtgggagagaagttctataaggaatgtaagaattcagaaaaattcataatgcatatatgtctctcatggtttcatgaaagtaaaaagatacatagatatggaaacgttgagaagtgggtttttgttagataaactaacatttccttgacacatcttatgtaagagtatttttcaaaaagatgaaaccttggtgagtagctcacaatcaacttttctaaaatcctcacgaaaaaaggatttaacaaagaaagccgagcgaaaatgccaaatgtctctagagattttacctctgattgtaaattaatgtctttttcacaacaaatctaatatttcattaaataaaaaataaacttttctaaaatcttgaatggagaaaaaaacggatttttaaattaatctaaaaagtacaaacatgaaaaacctatgttattaagcaacttggaaaaggtagcatactgatacatctctaatggctttttgtaaactttagttcaatctaataaattacacgttttttcattgcacctaatgtgattatatgtactcaaatattttcaaatttatttaagtctacggttgtatatgaagctgatagaaaaagagaacttacttttttggtacgtcagacaaattctcggtcatggaactctcactctcacaatcagacagcagcatggattgtccatggaggatttctttgcccatttgtctttgcaaactatgcatcactatttccccattggatgatacacttatgagagacacatcggctaagaccttgagcccagagctaacatccaagtcaataccggcaataagtggtgccacaaaatcaacatcctcgtcattgaacaaagacgctatgtaaagaaatagaactttatccatctcctgtaaatcatcatagctgactctcaatacttcataaccagaaacctccactggatccaaagacaaaactagtgatatgttctcaacacttgtattgccagttgcaacatttattacacggactccacatcttgtcactgtgaacctatcatttagacactttgtctgctgattgataggaaagaactcaaatacaactaatccagcccagatatcagggtcatttccttcaccggtacttgggcgcatgttgacatcactaaagacaaacgtatgatcctttcgaacttttggaacaactttccctggtgcccaacaatgaaaatttctttctatcctacaagagcggccttctttgttgctccatctgcaaacacaacttatgccaacatctgtagcatcacagtagtcctcgggaaatgcaacttccaccagcataccaaatcccacaagcgtgttcctccatgaatgatttagtcgtgtcattacagaagatcctggttgcagatcaaatgtggcgttttgatttgtatgtgagggcgcactgaagctgaaagtcggagctttgttgatgagttcctgttgcaatacaaataagtcagatatgatatgaggagggtgtggttgggtgtacataacaggcactatagagagcgggagacataggcggacagagaaagagaaaggattgagggggtgatggaaagaaagagagctaatggagaggtaagtagacaagagagaggcagaaggagagagagtattacctgcgtataccctcttggtatgtgttttacagaagtcannnnnnnnnnnnnnnnnnnnntgaccacttgttgagatagatcgaaaaaattgttgaacttgtaatgcataggaagcttctccgagtcagaaccatgtgcattcaagacctctaggcttaaaggaagttggggcacttctcttaacgtagtgccagcaaaatataactcttttaggttccgaggaaaaccctgaatagtctcgagctctgagcaaccagagagatcaagaactttgagaaattctaaaatagccatgtttggcagacttcgcaaacaagatccatgagcattcaagatttctagactataggaagttggg

SEQ ID NO: 5965 - DNA, 3078 bp, Arabidopsis thaliana landsberg
ttatggacaacgaatcataatagttactaaaataatcaggttaaaactaaaaccattaacagaagtcaaatgatggtgttctgtatttgctaagtctgaaattaaaatcaaacaccgttttttggttaattaagtttgttttttcttcatgatctcctaaaactcctctttattacacgaagaggagaacaaatggagattaaaaagaattttcaaatcatagaaatcttttcattttttttattgttttgattaactagtaattaatggtaaaagcaatggagcaagaacaagagacttacaaatcaagattgtttcatttcaagaacatgaacgaaaactcagcttcaagacatgttaaaagctggagctcagattgtgcaatgagaatggatggttctgacaatttggatgatgatgataatgacatgatgatgtttaggagtcaacccggaaaatgtggcagcgttgaccgaccttctttgcctataggcggagtaacgcctaatcgcaatgacaagcttccgagagtctcttcatcggattccatggaggcactaataatattgcaagcaggtaaaatctaatgaactggctcatatcttctaggtttcttggattgcaagttaggggcaaagtactaatcttggattgtaagttagggcaaaaactaaagtatatgttgttgttattacagcaatggagcaaatgaaagagaaattttcgaaattgcttcttggagaagatatgtcaggaggaggaaaaggtgtttcatcggctttggctttatctaacgccattaccaatctcgcaggtaagctcttttcccaaatctttcagttccatggaaattttcaattttatcaccaatttgatgttaagttctgtaatttttttgttgttgcagcgtctgcgtttggagaacaacggcgtttagagccaatggcggtggatagaaaaacgcgttggaggagagaaattggatggcttatctctgtggctgattatatagttgaattcgctccaacacaacaaacaaacaaagatggtacttcaatggaagtcatgtcaacaagacaaagaacagatcttctctgtaacatccctgcacttaagaaactcgatgctatgcttctcgtaagaagaacaaacaacaacagcacaaaatatactaatcaaaggctgttaaataattaatctcacatttataatcattctcttgcaggattgtcttgataaattcaaggatcaggatgagttttattatgttaaaaaagattctcctgattcttgcgagacaaggaacgatgagaaatggtggttaccggcagtaaaagtcccacctaacggcctctcagagatatcaagaaggtttctacagagccagaaggaatgtgtgaatcaagtccttaaagctgcaatggcgataaacgctcaagttctgtctgaaatggagattcctgaaagctaccttgagtcacttcctaaggttatttaataaacacataaaaacattcatcaagaatctgttattgatctagtccttatcgatgttttcgtgtgttgttgagaacagaatgggagagctagcttgggagatgtgatatacagaatgataacagtagagatgtttgatgcagatcaattcctaattgaaatggatttatcatctgagcacaagattcttgatctaaagaacagaatcgaagcatcaattgtgatatggaagaggaaaatggtgcagaaggacacaaagtctccttggggatcaacagtgagtattgagaaaagagaacagtttgaagaaagagctgaaaccatcttgctactattaaaacaagggtttcccggaatctcacagtcctcgctcgatatcagcaagattcaattcaacagagtaatttaaaactcttaacttccaaatacattttgattgtgttttctctatggtcatgagaaaatctcattattggataattgttgttgcaggatgtaggacttgcgatattggagagttactcaagagtgcttgagagtttagctcacaccgtgatgtcgagaatagaagacgtgctttacgctgatcagcttactcaagaacctacaaataatgcaccttctaagaacagatatagcttgaaggagaatgagaaactaagggaggaaagactaagtttcacagaggatatggcttcaggaacactttctgatgttatgcaatggggtaacaaaaacaatgaaatgaagaaagaaagctttttcggagatagagagaaaccgttgttgtcgaaagtcacaggtataatgacaaacaacaagaagagttcttatcttgataatcttggagctatgaggagtccaaccgcaagatactcctgagagaaaccggtttcttttttccgttcttgttaaattagggtttcctactgcattttcaatctgcttaaagattccacaaaatgcaccattgtgtgttgtagcagacttgaaatgcaatttcattgattcatcataactgattttcagaatcactagcttacaaagcaattaacacaacacagtacaatatacataaatagggttcatagaattggggagaaagtttctgactttttgaaagattttagaaagctaatttaaagcttgccgcgaggaccgagcttaggtggctcttgaggacctctcttaatcggaagaacatcgccggtagagttcgcactaacatatgtaagcaaagagcctcctccaagaatcaaaaatttgagaagcaaacctctctttgtgaaaggagcagcaaatgtctcaaagaacttgctctgcaagcaacataatcacaaagtcttagaatttgaagaagcatatagatctaaggatttaagagtgtacaaaaacctgaagtgggttataaggagaaggagcatcagatccatacacatcccattgtcctgttgtgttacccaaatcttctaaatcaaagtatacacttttgtctccatacttagccaccacagcaccagctctacacaaacaatcaaaagtaacatcctttttttaataccaatcctcataaatgtcaat

SEQ ID NO: 5966 - DNA, 2078 bp, Arabidopsis thaliana landsberg
tattctaaaaatcacactacactgccaattatgttaggttgtgaatatgttacagatggaatcacctggccatgactattgcctttcctctctacattcacatatgtaaatattagcactagtcgaaaccaaatgagacacaacggtaatcgaacttttcttttgggatgggttaaaattaactatttatgttgtgattttttttatatattttgtcgacacctaactcctaagatcagagctcaaattaaaagtggtggtgattcacaaatctatctataacgtgattcagggaacttgccactggctggagtttttagtaaacctaaaaaagtattggggttttttccaaaacaaaatcataaagaaggggccctataacaaaataagaagacacgaaatattttagttaaaaccttgagataaccttatcctactagattccacgtggcattttccaagtggcgtaagaaaatccccgggaggaaatcagttgccacgtgtcagaagaagatcaaaactcgactcattgtgaccaaaggctattatttcctacacaaaattcccactcaccacacacaacaaaagaatagtgatcgaagctcatggcgtctcttgcaaccgtcgccgctgtgaaaccatccgccgccataaaaggactcggcggcagctcactcgccggagctaagctctccatcaagccttcccgcctgagctttaaacccaaatccatccggtaactaaaacttttcatttattcattaattaggatcaaaatgccactataaccacactataaattcaaaatatattaatagatttttgctggctgaagtgtgttttaaacgatagatatagtgatgattaattagcttaaaaaggattaaattctgataatttcatctcttctttgtgattaaattagcttgaggttgttgtgttcatgtgtaatagggctaatggtgtggtggctaagtatggagacaaaagtgtctactttgacttagaagatttgggtaacacaacaggtcaatgggacgtatacggctctgatgctccttctccttacaatcctcttcatgtttcttcatctcataacctaacttgacttttctacttcaatcaaacactattctgagaagagattctcttctactttcgttacttgtagagcaagttctttgagacattcgctgccccattcacaaagagaggattgctcctcaagttcttgatccttggaggaggctctttgcttacttatgtcagcgctacctctaccggcgaagttcttcccatcaagagaggtcctcaggagccgcctaagctcggtcctcgcggcaagctctgatctatattcatgttacctttctcttcttccttctaaaactcatcaacatttctcaatactgcaaacccttttaagtaattttatgtatattctgtttatctgttacatttgaaacgttttttcttcccctaattttacaaaagaaatcttttttttttcaagagtatcgccccgcggttggacttcttgtggttccaagagattcaagataagaagtagtcttcttgttgttagacatgatcatgcttgacactctggttaaaagtttcttgtcgctcttttctttcctcggttcattggtttcgatattccattgcattacctcagatagtgaaatggtaggcttctgctttttaggtctatcttctaaaagacaaaaatttggctcttcttccttctctggactctctgtttccttcactatatggatcttacacatcgcgagctcagggttttgtgttagctgatcagcttcaagaacatcttctattcttgacattaccgtgtgagccaagctttcaagaattctcgaataactctccactatagctaaccctatatcctgcaaaaaaaaacaaattaatgattttcgtaaaacagaagacaaacaattatatgtctaatgtgactttaatataaagttatatgattgattactctgttgaattgaatcttgctgatgtcaagtgtggattgagagatccctggccattcttgtttgataagt

SEQ ID NO: 5967 - DNA, 2988 bp, Arabidopsis thaliana landsberg
atacttggcacaatcaattgctaggcgagttgcacgtccaatactttccctggttcttgataaggtctctaacatgccttcaaaagcatcccgagaaatagcagcctcagtgctacaactaagtgaacctccaactgacttatgccctgaactaagtcttctctcttcattatcatcagtctcaatctgatttcttgataaggactgatgcccatgatttgacggagaagaaccttgttgatgatgaccttgaacaactaacggcattgagatggcagcagaagctgaagcattctgaaccataaatgggctatggctcctcccctgtgtatcactgatgctcaagaaactagggttcaaattcccaaaaattgaattttgtgtatgtgcaagttttctttttgcctgcgcagcagcaattagatccttcatagatgcagccgaatctggggtctttgcactggtaaatgtagcactccccttttctctattgaggtcaagcctgcaagaaaagaataattataagcagtaggcgacatacacacaaaaagatgacagatagaatgtgacatacatagcagcagacaagtcctcagacatgtctcttgaaccagagtcattcaaacgtgatgcagcttttgaaaccactgttagcctctctccaactgaagctgatttgtgtctctgatttgctggctgagactgagaagagcttattttgtcagatcccgcaaccgcctccttacaagaatcactttgaggcttctttgccatcacaacaccagaaactttcaccgatgattttacaactttatgctgtcctgcaacgtgcttgttagttaaaaccagctgaggggacatcttcggagattgcaagatctgtttgacatcctttggcggcaattcattaatgggttttaccacaggtaagctattagtagaattctccgcattgcttggtaatacacgtgatgcatcctcacaatgtttacgcagagggaactttcttacttcagtactctctgtagatccagcagatatcttagcttttgtagaagtactgtgacacacattagcccttttaggaccatcagtcaaaacagatgctgcttggggaacaatggctggttttccatgtaatggggtttttggatcttcatcatcatcttcgtcgtagatacaaacagccctccgttttttcagcgactgtgcagctggagccttaacattacgaacaggagaggaacggtctttctgttccagatgacctttcccagatttatcacgagacccagaaaaagaaggagaggtagcatgctccattgtctgtctctggcgctttgtatatgcaactgcttctttatcatattgaaaatttccaccgcgagcacctaatcctaaaacaatttcacgcttaatatctgatacagtcccagtagaatcagatccatcatcaatttcacactttactttattgtctgcactttcacatcgcggctttttagcagcacgtgagctttcatctactcttggtgcaagcttaccttgttcactttcaagcctccttttctttccggaaaccccaaccttgatgccaggtgaattttcatgcttatcagcagacactttggagctggttttctctgtcaacagacctttcgattttttggaatcagagttaccactggcagttcgaccaccaggcacatgtgagttattgcttttgtctcgatgaactgtatcttcaccttttctatcagagccacctgcttccttcttaattctcttaccgttagccagcttcttttggccattaccaaaatgttcattgcaagcactaccgtcagttcctttatcaaaatcttctttctttattttagggtcaaatgaactatgctccagtgactcgctaacaggggatgtggttttgacctttgattccagaaatgaagatgaatctagcttccttatctcagcctttctctcctcaccattattctcatctaatttggggaagcaaggatccaccctaaaattaaagttatcagttctctcagactcaatgacaatatgatctgttccatccactatctcagcctttgtcaaaccaggttcagtagcatccagagaatcctcatcgcccaaagcatttgacttgtgattctgcaacccttcaaatgcagtgcagatttgctctacagcttgtgcaaagtacttgacagttttaccttgacatcttgctaatagtttgctctttgcctcactagtgaaggcttggatatcaggtggcgcaacaaaagctctgcagtaaaggaagataactttgtcaatgatcagtttgtaaaagacaaaatcaactccaaagatattgtcagccaaaaagaaaaacacttggtaacatgttgaaacacctgataaccgaggtctactacttaattcctagcaacatgatatactgactaaagttcatatacctttctggatgagaaggtaccagaatcaaagaataaaagagaatagcttacatttcctctgttccaaagaactgaacaaagtacttctttgggtctggcgcacgatcccaatcttcaggccggctgatctgaaactcaaaaccaaattacttcacaagagagactaactaaagagaattgtattagagagattcggaagctcattatttatcgagatgaataacatgtgtgtttcataattcaaccatggaatctgaccgagtaactagatagatgagttaactgactttcaaaccaacttaatcatgaagcctagtatctcaacaaaaagaaacagaacacactagagctcaattcgacgaagttaatgtgtattctagaattcgtaacgataaaaacagaagacccaacaagttaaagatgatgactatggacttaaggactatatgataattcaattagagaagaagcaaaaaaaacaagaatctgtgtagaaaaataaaacccaatagac

SEQ ID NO: 5968 - DNA, 5118 bp, Arabidopsis thaliana landsberg
tgaacctttagcatttgtaaagcggatcaccattctacacagattacttcttttgctgtcacttcttccattttgcctttccaccacctgttgttaagagtaaaaccgaagccatgttagaggaattacttagagagctctttgaaatatgaataaacattaggaaactccatcagtatgttttaacaaaggaatctatcaatgcagttgaactgttgagtagacaacaacaacacctcttcgagaaaccatctacgagatggactgagagcagccttccaattgcttatcatgctgttttgctggattgtgaagatgagttggtgcaagttgaaaagaatcaggttcattttcacactgtagaggtagtgtcggccgataccgaccactggtgtcgctcgacaccaacaactatataagagaagtcatgctgtgacaaagtcatttctaccagactcgacctcgacaatgtcgaccgacaacacctgggtgttgatggacaccagcacgaaacaaacgagctagtcttaacgtttgacagtgtaggatcggtgcaagacaatagtgtcgaccgacactcacctagtgtcgagcgacattgggcacatgctgcacctatcagccttgagtttccactggtccctaaacaagtctacatgcctacaattcccagtccaatgcctcaaaagtctaagaaagagattcaggaggagcggtgcaagggtccacataagcaggaggacaaaaggtagacattggttgtctcggaacatattgtagagctgaattgtagacagactaaggatagtcgagttgtagcacgggtgtcaatcaacaccaccacctgtgtcgataaacaaaaataattatatgttacctgataagtgtgtattttgcatgttttgagaatccatttgtcatcattttagcatcatatcatcactgttttataccatttcacatcatttgtaatcactttgcatgtttaggatagttttgcatgcttgttgcatatttgtgttgatttcaggtgatttggagctgtcgacgagctaactggaagaagcggacctgatcatgtcaaaccactcgaccccctggtcgagtaggagcttcaagatctcaagagatcactcgacccccggtcgagtagaagacaccgccactctaccacaacactcgacccccaggtcgagtgtcttcatctccatctcctgaccaccactcgatcacatcactcgacccccaggtcgagtgacttcatctccatcttctaaccaccactcgatcacatcactcgacacccaggtcgagtgacttcatcccattgccagaccttcactcgatcactctaccacgaagcggagtaccaccatctctatcactcgactgcatactcgactgccagcttcagagtcttctccattcttcactcaaccagacactcgagcacaaggaagaaaagaagactccagcttatcactcgaccactgactcgaccacctgggtcgagtaccgttcttaatccgtcccaatactgcgtcgttttgagtattagggtttcagaatattttgctataagtagcatgtactttatattttcgagaaaaagtttttatctagttttattttgtagataatgtgttcttgaccttttgtaatccggatttctcttaatctattcagtattcagtattcagtatttgttcttgattttgtctactgttgttcatcctgttatcatcttgctattactctgttgttatcatgtcttcattccattcaacgtttatgttctctacaatgatgtttgagtagtgaataggtttctgaggatgggttagagtagtttagaattcttagtatgctaggtggttgagtttgattgatagatcccttcaggattagttgttcttaatgcctattgctttctgatcaactggaatttgagcccagacatttccgcgcccaaaaggtgttcgatgaaatgtctgaaccactaattccagagattcgtggccctgtaccaagttattggttgcagggagcgttttggctttaaattgttgattctatactcgatcatatccttagattttccaatagcatttccgggttttccggaaatggttttttgatcttgcatcggttcttagtcttctccttggatacgaagtttctcccgagccgggtcaagttggtccttgggtcgcggtcgggcggctcgtgtcctggagatacgcctgagccggatgacgtttacatgaggcatttcgagatccgcttcaggatggttctctgaaatgacgctcgagctttttcaaggtcagatcgggataactccataacaacgtccgaggcgtttctgggtcggctcgggatggctctttgaagtgatgccagagacgtcttggggccggctcagtgtggtcctttgaaatgatgcccgagccaacgatcttggccttaggcatttcctctggtcggctaggttacttgggtaaaatctgaccccaacagtttgacccccagctttttaactttggcgggaaaggtgatgagcttcatgagtggatatccaagctgactattcatcttgccaagttgtgaccttgacggttaatcttcctggacggtcaaactttccttgcatgtagccgactctttcttaacaagtggaggcacattggggtaattgctgagggtcaccagatcgcatctatttctgccaagcccacgcgcttcaaacgcgtttcatcatttattgcggacccaacgcgcctttaaaaatcttatatatagcgagccatccctttgagaatttctcatttgaagttttcgaagaagaaaaaatcaaggtttgtctccttctctctaatcttgatattcttattgttttctctttttccggtgaagctccatcgtttatttgttattttgattttgccgattagaacattttgttgtttcctcgtcattcctcatcttgttagacgtctccgagccgagaatggattctaaatctccttcaaccccgagcgcctctctcttcgaattcagtgattcaaaccatccagacgaccctccccctatctacaaacggagggcggtttgaacgtcaacggaggaagacgccgtgtcttcttcaagcgcccccgagcagacgacctctttcactgtttcgggtatacactactgccgatattgctggggaactggatttgcctgatgaccccgagccgcctctcgtctggaggactcttgccccggtggttgatgaagccgggacatccaactggcaaggcgcgcccgagctcttaatcccgcagataaagatcaaagactttctttatttcggcccgaacgagacggaggatattctgcgtctcaacgagcagagggctttcgagaaagccgagaagaagaggaacaagaaaggcaacagggcgatagtgccggatccccctggcttgaatttgtgcaccgagcggtcgctttcggatccgagggcccgattcaatcttggtgaggtcactctgcgtgtgccgatccccgatgagggagctgacaatccccttgcgggtttctacactctgtatgagggatttttctattattgcttcctgtggcttccggtcccgaggctggttttggagtacgtgacatcgtaccagatcgccctctcccagattacgacgcgatccttgagacatttgctcgggattttggtgcgaagttatgaatttgagaccgacatcacgctcgctcatctgagaaatctacttgagatccggcgggttcccaagtacaaagtggatcaatattatatctctcctgccaaaggtaggaaggttatggacgggttcccaagcaaggacgagccgtataccgatcaattcttcattgtggcccttgaagatgctgttaacgacgacctcctcaggacggttctgacgagatggggaactttgggtagttgtagctaacattctgtttgtgtccgacgcgatcttatgattttttctaactgttcttttccttggttgctaaacgcactctcaaattcctcgagccgattccagacgatttcctttcgacttttcatgcattatcggctatgaaatgcgattggttgaaccatttctctcgagatcaaatcgagcgagcgcttcatctacttcacggtgtttcttgcccttccagccagagtccttggatcattgacccagttcttcgtagacatgcagttcttcgtagggtttcttcaaagaacggatctctgtgagattctcaaagaacaacagaattgttgattaccacggacggtgttcttgattttattattgagataaagatgatttgatcgtacaagtgtttagaaatatagaaaataagtgttttgttttcaaagtcagagcgtttttgatagcctgaggttgagagcgtttttttgtgtgtcccccttgtttgtcctttgcggcgctttatataggggtttggcaaaccgcctctcgcgatattctcggaagatttcaagatctttttcaattttcttttcagttacaaactgtgtgtttttcttgttgtcttcttgatccaggtacacctctgctgtatgggaactcgatcaacaggcaatcagaacctccttttgaatgacaacatcgaccgcatagctcgcgaactgagagaaaggagaaacacagtcaaccttgtacctcaacaaacactcgatatgactgacgaaccaaatcaacagaatggacccgcaaacattggtgctggagatgcaccacgggatcaccatcagaggaaaggaattgcacctcctgctatccagaacaacatcttcgagattaagagtggtctcatctcgatgattctggggaacaagttccatggtctgcctatggaagatccactcgaccacttggatgaatttgataggctctgcaacctaacaaaaatcaatggtgtcagtgaagacggattcaagctccggttgtttccattttccttgggcgacaaagcacacatctgggaaaagaatatgccccatgactcaatcaccacatgggttgacttcaagtaggcttttactagcgcagtttttcttca

SEQ ID NO: 5969 - DNA, 646 bp, Arabidopsis thaliana landsberg
aacctacttgtgaatactttggtttgaaatattaccgagttatagaaaggccaagtctccattctttgcacctttagtgtatccatattgatacattggtagttagttaacgatcttaagaaccttggtttctgttacattgtcaaggagacagagaaaattacacaacaagctagaacaaacaacaacacaagtttgaaagattacaagttctaacttttgcttgcaaaatcgcagcagatgttgtataaatgagctcccatttcccattgatcaaatcagacttcagaggctccttggttgggtttactgcttccaccttacgtgctaactatcatgattcaaaacaaaaaccactcagattagtctctcaatcacattctctataccctagtgtaccaaaactattctcaatggttcccacaggaagagaaatcaagaacctgatcaatccgaagctgatcatcaggcgaggcagtggcaccacgttcaaaaggctcaatggcttcgacaagttcatgtttgagctgtttccgcttctcggctccaccgtttcttggaggaaagctgaaaacagctgggattctcaatctttcccatcaccttttcgatactcagtaacttcgtcggaacgcaaagccactgt

SEQ ID NO: 5970 - DNA, 985 bp, Arabidopsis thaliana landsberg
  unsure (1)..(985): unsure at all n locations
gacccggaaaacccctcctcccattgcagccatcatcatacttgttgtcccattcatcatctctttgatcacaggagagacacagtttttcacagtctcttcgatcaaancccccgagatttcctccaataccaacagctgcagcttcgttgaggttgacattgctagctattggcccatcagagggagtgatgacaggtttgttgtcttcctcaatcttcccaattcttgatcgtgatcgttttctcgacacgctactgctactcattgtcaatttcttctcgattccattttcggagtcgagctccagagtaggattagaactagggctgttaaaggttgagtagttaccattggtggtgttatgatggttattggtttcttcgaaatccattacgttgttatcttcaaagcctatgattttcccagtttggttccagatttttctagaaatctcgaaagtagactgatcatgagggctcttgaagaatacctctttaccagagctgatcttgctcatcacattcctgtacttcttcttcaatctccgaagcttctccaccagctggttcttgttgaaatccagctgaagtttcgactttatctgctcataaaacggcgccgtatccggcggatgcgagctgcttccgcggtgcatcgtcatgtaatcgagaaaaccacgaagaagctcgatctcgtcttcgtctgtccacagcctctggaaaaggcgtctagaatcatcgatcggtggtctctgatggacgatctccgtcatacggtgccacttcggatcggaatcaacgggaatcacggagacagggacggcggatccagccggaagtgcaacggtcacggcgcctgtagaggaagtcgccgtcggggtcccggaaacaacagcagtcgctgagatcgtagaaaccatggggagtgatgatgtagacggagaattgagatcttcctcatcgggatcgtcgtcttcagctac

SEQ ID NO: 5971 - DNA, 2885 bp, Arabidopsis thaliana landsberg
  unsure (1)..(2885): unsure at all n locations
atcatcctcttctcattcaggtatgttcgagtcatcatggatcatttcattgatctgatctttgcctctttagtcagaatagcgtgattttaactgtttgctatcttgttttttttttttntgtgttgtatagattctgcatctttacaatataatagcaggaataggaactctaggagcaaaagtgacgttgattcaattcattctccttttctggatcgatcttcttctactaattcaaggaggggctctagtaatggttctgcaaaacatgcatatagtagtttcaactttaataggagtcaaagggataaggaccgcagcagagacaaggatagggtaagctatgtggatccatgggaccttgacacttctatccctcttagaactatcttgactggtagggatccggatccattgagacgatcacattcaatggttacaaggaaacagggagaacacctgtctcgaggattaacagtgggcttgaataatggtggcagtagtaatagttacaacggaaatggactactttctggacctagcattgggaatagctttcagagaactgggtttgataaggattttccttctcttggagctgaagagaagcaaaatgggcaagatgttgtacgagtctcatctcctggtataagttcagttgttcagaacttgccagttggtaactcagctttgattggtggggaaggttggacgtctgctctggcagaggttcccaatgtcatcgagaaggcttgtactgggtcattaacgtctccaaaagctaatgctgttagcgcgggaactttaactggcccaagtggtcttaacatggctgaagcattggtgcaggctccagcaagaactcacacccctccccaagtatgattcgcatcatcttggtgtaactttgttgtacatttacctctctgctcgtctaagattatgaccatttttttttagggatctgtgaagacacaacggctcgaggatttggcaatcaagcagtcaaggcaattgataccggttgtgccttcagcaccaaagggcttggtaagtatttaccttggtcaatgttattattcctcattcatttgtgctacaatcaatatctgttctatttcatttgtcagagtctgaattcttctgataaatccaagacaaagcaagtggttcgaactggtgaaacttgccttgctccctcaagaaatgccctacaacagcccgctgtcctacttgggagtttccagtctaatcctagtggtcaaatcaaacctgagaagaagctgttggttctcaaaccggctagggaaaatggtgtcagtgctgttaaagaatctggaagcccaagtgctaatacaaacactcgagctgcctctagccagctgatgtccaatactcaatcaacccaatctgctcctgtgagaagtacaaacagcccaaaggagctcaagggagccagtgccttctccatgatatctggccaaacaatcgaaaagaaaccttccgctgctcaagctcagagcaggagtgcattttacagtgctctgaagcagaaacaaactgcatcaacaagcatcaccaccgatcctgttagctcttcaaccagtgccctcttcttctgttgaggtaaaactcaacagctcaaaggatcttatagctagtgacccttcaagttcacaggcaacaagtggcgtcgaagtgactgacagtgtccaggtagcttctcatactagtggctttgaagcaactgacactccagatgaggaagaggcacagttccttagatcactcggctgggttgaaaacaatggtgaagaatatctcacagaggaggagatagattcctttttggaacaggtaaatagacataacagccccagtctctctctctctctctctcatattataactcagaaatattaataatggttatgttctttgttttgtttgatcagtacaaggagctgaggccgttatttccggagagactatccatgatacatgaagcaagagaggatgtagcttaagactcctgaacccaactttacaaaactgaagaaagtactggtttttggaaagatagtttctaatttcttttttaatatatttttcttcttttggtctttttgttcctgagaaaagcttagctactactttggcaatgggagaggagaaaggcagggaggggtttttgtttgtttgttttgatgatttgcaaatagtgcaaataaagctgatgaggctttgagttgccatatgagtgtcctgccctcttcagactttgtagatctttctttggtctgaaaaaaaaatggctcagctctcacacacgtgttcctctttttgtctttttctcttgtctctaatgtttgatgagcaagagttcgctcttaggagaatatataattgcgaaagagtttcttcatcaacacaaaacattggataaacccaatagaggtgccaaacgggccaatccgcaataggcatttatatttgtaagactgcgacaggctggtctgctaagactgccggcaaaaataatgtgtccaagtctacccactaagcccaacgtgttagcatgccggcctgcgaacttatctcattgagcatgtacctcgtcttgctgatcacatgattttgagttttcttttctaggtaatttaaaaggtttgcctatttgcgttctctttggacaactgattgatttggagtattttcaataacattcacacaaagttttaacagaaacacacactgatgcaacagaggaatctcgcacacaatgccaaggtgacaagacaagacacagaaatttacatagtaaaaaaacgagaggaacttgtaagttgtcacagngtgaatctgagtcgaaagatgaagta

SEQ ID NO: 5972 - DNA, 1566 bp, Arabidopsis thaliana landsberg
ttcttccaccaatacgaggaggggatctagtaatgggtctacaaaacatgcatatagtagtttcaactttaataggagcaacagagataaagatcggagcagggagaaggataggatgagctacatggatccatgggacaatgatagttctatgccttttggaaccttcttgattggtaggggagaggagccactgagacgatcacattcaatgacaacaaggaaacagggaaaccatctggctcaaggatttacagtaggatataaaaatggtggaaacattaatactttcaacggacatggtatacttcctggaactagccctgtaaagagctccaaaagaatgggtttcaataaggattttcctttgcttagaggtgaagagagaaatggaggcccagacgttgtaagaatctcatctcctggtcgaagtcctactgctcagagcttgtcagttgctaatccagccttgattatcggggaaggttggacatcggctctggcagaggttcccaatgttattgagaagagtggtggtgctgaatcccatgctaatgtgggtaattcggctaccttaactggaccagcttgtcgtaacatggctgaagcattggtgcaggctccaggaagaactggtacaccaccccaggtattttttgtatctttgtattgctaatagtacactaccttttttgttttttctaacagatttttgtatttggggtctgtaaaggcacaaacacttgaggaccgagctattaggcaatctaggcagttgataccggttgtgccttcagcaccaaagggctcagtaagttttttccgtagttgatcttattttctgtcagttaccttgggctacattgagtatatgttggttgacttctcaggttcataactcttctgataaatccaagaccaaaccaatgtttcgaagtggtgaaaccggtcttgcttcttcaagaaatacccaacagcagtcctctgtgatgctcggtaatatgcagtctaatcctggtagtcagatcaagcctgatacgactaagaagctggtgattctcaaacctgctagggaaaatggggtagttgctggaggttcaccacccaacagccgagttgccgctagccagccgaccactgccccatccacacaatttactgcttctgtgagaagcacaaatggtccaagggatctcaggggagcttctgtaaacatgttagctggaaaagccgctgaaaagaaactttccttggctcaaactcagagcaggcatgcattttacagtgctttgaagcaaaaaacatgtacgaacatctcaactgatccatcaaaaaccagctcttgcatcttgtcttcagtggaggaacaggcaaacagttctaaggagcttgtagctagtgacccttcaagtccacaagctgcagaaagagatgaaatcatggaaagtgtcgagaaagtttctaacgttgcagaaaggattagtagatttgaatcggcagtccgtccagatccaaaagaggctgcattccttaaatcccccggttcccatgagaatgatagcgacg

SEQ ID NO: 5973 - DNA, 1585 bp, Arabidopsis thaliana landsberg
  unsure (1)..(1585): unsure at all n locations
agatttctacttgatttcctctctaattggcttgattcgtctctcccataattacaccatacacatcattgctctatgttttccaatttctcctctttcgtcactctatttcggagaagaagaagaagaaatggctttctcgataattcaaaccctattactcttaatttctcccatttgaaaatacagatgcttgcaggtttataagttaaaacatttgagatatgttctatgaacgttgtgggatcagttggtaatcgatgcttcccataaactaaaagattgcgggttcgaatccccacttttgcaaaataaaattttaacatcaaaacgatnnnnnnnnnnnnnnnnnnnnnnnnnnnnnnnnnnnnacacgtgtacgatgactcagcatcataacggtgttgactaacatccgttagattgactatgatttttgcacgttttataaagattagctatgagattcaaaatatattgaagtttaggttgtaaaacaccctacaattttttgtttaggtatgaaaatacactttggaaaaagtacaggtatgaaaatcctcttttcctcactacatcaagaaatcatacaggtagattcactctcagaacaacagagttcattgcaaaagaacaaaaaaaactaaagtactgtaaattcgtcccaggtggacaaggtatatatgatgttcgtgaggatggtgttagttatactgtcaacattagattgagaatatgtctctgttggagatggaatatgagtggaatcccatgtcattatgctctacgtgtgatcacagagaaaaagctcattcgtgaacattacatatcagattggtacttgaattctaagaagcatagtattacagtgactcaatccacaacgtcaatgggatggtattttggaataaatcatgttctcttgtgctgccacctgctactctagtcgagctgattgtatacacgacaggtagagaatgagaaccaaagaggaaaaaaggcaagaatgagtcaccttcaaagaagaagaaactcagtaaagagaaaagaattatgcattgtcgtcaatgtgggcattctaatcacaatgaatcaaagtgccgtaatattagagtagagaagtatatgacaccaaggaaaaagaagacttcaaacacaaacgcaggagaaggatcaagtcaagcaacacaagcaagtcaaccaacacaagattgatctattttcaggtttgaggataaggcaacaaaacatccgactctttcaggtttggtataaggtttttcagaattttttgggacaagtaacaaaccttacaatagtctttttttttatatgtttttttagtatgtataactcttatgatggttatgttgtgtctacggatttaaattagtataactcttatgttgggaagtttaaaaaaaactcttatgttggatgtgttgtgtctttggatttaaattttgtttccttcaattcatgtcctttttatgttctcttgtgccctctttatgatttaatggcttataaatatgaaaaattgatttatataaagtgttagggttacaaagttaatgaacgggtt

SEQ ID NO: 5974 - DNA, 1206 bp, Arabidopsis thaliana landsberg
tgctcagtgcacatggcttgcatggatattacagaaacgacgttgttttttcattttgaattcaaatttttctaatttttttttgtataatcacggactcgaacctgagatcctttcacatattctattagttgttaccattgagacactaacattttcaatgtttttgtaattctaacattttatatagatcaataaagcataagaagtcactaaatcataaaaaggacacaagataaaactgaatccaaggaaacaaaatttaaatctaaagactcagcatatccaacataagagttttttaaaaaaacttctcaacataagagttatacaaatttaaatccgaagacacaacataaccatcataagagttactaagaagacataaaaatcaagaccattgtaagagttgctacttgtcccaaaaaattcagaaaaaccctacaccaaaccggaaagagtctgatgtgttgtttccttatcaccaaacctgaaaatagatcaatcttgtattggttgacttgcttgtgttgctcgacttgatccttcttctgcattagtgtttgaagtcttcttcttccttggtggcatatacttctctactccaatactacggcactttgaagcattgtgatcagaatgcccacatcgacgacaatgcataattcttttctctctactgagtttcttcttctttgaaggtatgtaacctttctgaattctcataaacaaagtatgtaacctttctgaattctcataaaccctcatggcttgatcttatttttctattaatttccttatttatttgtttaaattcaattaaaatttattcggtatatagaattaagatcactttcacagcagaatttcaattgattttgtttgcttgcttgtaattttgatgtggtctaaattactagcatttgttttcttcttctctttggtcattacgtacaaatccattgttataaccttataatacacaaactaattaacttttacttatactaatatttgtaatcgataaacaaacaatagttagaaaaaacttaatttttgagatatactagaagggctatattaatatctattcccaaagatgagaatattaggtattcatgcatgaaaactgagaaattaaacttttcttttttcgactaattatatgacgaaaaagcttccacaaaatcgaaataacgataacag

SEQ ID NO: 5975 - DNA, 545 bp, Arabidopsis thaliana landsberg
ggttgcaggtttgaatccccaattttgcaaaaatttattttattattaagacgacacatcaaaacgacgtggtggggaacatgtcatcatatacatgtacgatgactcagcaccgtaacaatgttgactaatgtccgttagattaactattattttttcacgttttataaagattaggtatgagattcaaaatatattgaactttaggttgtaaaacaccctacaattttgtttaggtatgaaaatacactttggaaaaagtataggtatgaaaatccccttttccctgctgtagtctccctcagatcaatacgtggcatggttgttctcctaatcgtctccaacatctcaaccattggcatgtatcttgctggatctatagcattgttgaaagactcggatatgttgttgtgaacatcaacacattgagatgtgggtgaaaagaaagctaaattgcagttctttgttttctctccacgattgcttcatataggcagatatcatagcttttgacattctccatattttcctcatactcagcgatc

SEQ ID NO: 5976 - DNA, 4452 bp, Arabidopsis thaliana landsberg
ggtttctcttttaacatcgagaaatccatgtatgtgaatgtgaggatatttttactaccacgttacaacgtttttcggaagacacgggaaacgagtatcaattcatgatactgcgagtgagatcatttggctttttcacctgaaatgagttcctttatagcatgcacatagttggtactcatagagtatcattaacaattttttactattaattttgatatttatttatttgttgagattttttatgtatcgagaataaatcgtttatagtggtaagatcggtatgagtatcattgagaagagaagagaagagcaaataatatttttttgctctcttttcgcacaaaaaaaacattttcttattaatcacaatccgccacataattagagaccggtatcgaaagtatcactacaatgagctcatacccaaatctgagctcatacccaaatggccaaatcagttgttttatttattaatttaatgttttgggtttctaatgttttgggcttctgatacccataaaaagtctgctatgtacatggtcttatattgcgttaatgtgacagccattcaccttagcacattttttggtttttcatgaacaaaccaaacacgttgaagtcatttacattaacgcataaaagaaaactgtgaaaccaatcaaacacttaacaactttcactaatttttccgaaaggttctgtaaatgtctgggcgaaaagaacaaaaagagtttggataaaaccacaacgtaacttacttgaggaaagtacaagaaagaaacaaaaacacataagcgaccagtgatgttaggagctcgagtgtccatgtaggctgaatgagaaacgtcggaatcatgggaatgattaacgaaccgcagaaccacccggcaactaaagctccaattctgcaatcataagagccaaacaaatcatgaaaaaaacgagtgaccttttaagtttcgtttcagctaattcgataggactagtagtattttacccgattaagcaagctctccccaagctctttgtcttctcattcagaaaatatacgcacgcagccaatgataccgccacctacaagtacaacaaaagatttcagaacccatacatgtgaacaagacagaagagaaactcaagggccattgtataaagtaacaaacctgaaacgcaggagccgccttctgcagagttcatgatactccaaccacccatgaaggcaaagaggaaaagtcttctgaaaatagtgtccatgggaggcatttcaacgaaatcgagaagagctttgagccacggaggagattcctcaactttcttcttcaactttgatttaagattgattttagtcttattccttctgataaaactagacatgagaagcttctcaaaggctccttctatagactcttcgcttctttcatgtccagcgtactgctgtaaaagaaagttacgagaggcccagatttcttcctcggaagcatatggactaactcctagacgtttgtacgggtcccaaactctcgtccgagggaacgtgggaacattgcctacacagagtcgttcgtttatgagtgaaacagaaacatgtaatatcacttctcattcagagtagtagctagacatgagcaacaacaaaaaaagctcaaaacttgagaaagataagtgaaacacacaaagtggaaacgctaagccagcttatgattcttcactgagaagtcaatgttgttaaagaatcctaacatactccatttgttccacacaagttgaaatttttggataagaaacgaccaattcctaatagcaactaacaaattgagaaaagggtttttataaattgagagagaagaagtgacaaatacctccatatgaagaatcaacggtgcacttgacggttttgaagcttctcgaaacattacgaaatggtaacagtgatgtcttactggaatttcgtacgagagaactgaaattcagaacacaacaacaacacgattaacaaaagctcttgcgaattcaatcaatttctggaacttacataaacaaaccctaaactttaacaaatccgaattttccgcttccgagtagaaggaagacaaagaaagtcccaaaatcgattccacgagtaatttgaaaataagatgaagggagagagagagagagaatattacggcttagatggagcgataaacgaagaagatacagtagaaccggagagaagaagagacgaggacatggttcctccgtcggactaacccgacgccgttcgtgcttctattagctttggcttctctctgtatcccctgagaaaagaaataagggaaagataagcgaatcgttctatcttgcgccgcctggcgtacattagataatttacttcccccctcatctttcgtcttttcgcgtttatgtccatgtatctagtaaaatattcgaatttcacccctaattcgtaaataagtaaatagtacacctcttaattggtcaccccaatcatcaattttctttttttacatggtcaaaagcttgttactattaggtgataaacgaatttgataattcttgttttctgttgcgttttggatagcaagttttatttaatatggtttttgttacgaaataaaatcataaccaaagttgagattcaaattgagggacaaggatctcactagatgtatgtacactagctccactcttatttatgtgaattgagaatcatttcttgatacagacatggatgtggattcttacagcaaagaccaaatattgtttcctgtgaatggcaaaacccaacatttggtattagagagaaattgcctcatagcttcgagtttagaccggtctgagtaagctgttgccttagaactcttctcataaccttatttgtggccgtcctcggtagagaaggaagagtcacaacagatgatacctgccagatgaaaaaaaacattcacattagccacacaacaacttcaactctcttgtgttttgtttttggtataaaccttgaacaaaggattcagtttcttttgtatctcggagttgaaggacttcttcaacaggttcaagtcgggatttgaaaattctgggctcttgaacacaacagcgattactagctgctcaggacccccactaggaggtggaacaccaatggctgctgtctccagaacactgtcatcaacggaattacagactcgttcgatctcaatagaaccgacctgcacaataacaatcaacacagaatatgattatgatgacaatgcgttaggcttgtgcatttcaatactatatacgaagatgtacagtaaggctacctttataccaccaagattcattgtgtcatcagcacgtccatgagcacggtagtatccttttgaagtccgttcaaataaatccccatgtcttcgtaagatctatcgaaaagcaggcaaggcacagacttaaaacagatgaaaacctctgtataaatatgacaaaggttggattacctgtccttggaaggtgggcattccttggaagtaaactttgaagtgattaccgttcagaagagtgcttgaagctccaaacatgtgaggacaaagagccaattcgcctactcctgcagcatatggaggctaaaacgaggaaggaaaggaaatatcacacaaccttcatactgtaagatctttcagaagaaatactgtatcatctatgagaccataaagtttcttacaataggattgctatcttcatcgagaatgaaaagcttgcaacccatggcagctgtgctaaaagcagccagcgactgaggttgaagcaaagaacctgagataaaactgcctccaatctcagttccgccacaatactcgattacgggtttgtaatgtgctctgcccattaaccatagatactcgtctatgtttgaagcttcaccagtggaaccaaaacaactattgaaaaagtatcaaatataaaacatcaatgttactactgcatagaaaaatcttcttgacttcaacaactacataagatgtttgttgaacattttttaaagaactagcaacaatacttagatagatttatttctggaaaaaaataagtggtggcatgatacattaaaactaattaactttctttttctcaaaacatctaataaggtccacgccacaacaaaattcaggcttaacaacattctaaagatgcactttcggtattaccggatccgtgaccaatcatagcctgaagtggagtttgagttttgccatgtccggacaatgcttggtatcacgcctagcactgatacctcggcatcctaaccccagaatataaacatatggtaaattaaaggctgcccaaatcccagactcaaccatgcaatgaaatccagtcaatcatagatcccattttgatgttttattttgatatgtgcaaatatttgcacaaaatatgttttgcttttgtctcttttaaggtttttct

SEQ ID NO: 5977 - DNA, 1472 bp, Arabidopsis thaliana landsberg
  unsure (1)..(1472): unsure at all n locations
gctagaaagtttcacatgtatcatactaaagattcaccacattcaagtgtatctcttatgccattcattttacgttgacagcaacaacatactcaaatacataggccataggaacttgatgcggaagcactgcatcagaccactcgacattcccccaaatctcttcattattgcgtctttcaagagcaataatcgcacaccaaatcatcctattctgattgccacaaccagtaaacttgtcccaaaaaagtgccattttcccaccataatctgccaacctaacattggcataacgagcaaacctaggtagtgttttcaaaccattcaaagttctccaggatcttaccttagtgtcataccatttgatattttcattgtgataataatagtaaatcacgttctctatcacacaagatgaagaccatttcagacccaaattcatctctgatcctaaactatcccatctaccatcattggggttgtaagccacacccttatacccaccacaactgtgtagctttccatcaaccactacgttatcagtttgatcaccacagccatgaaacgtcaacctacctgcacggctcaacacaggctccgaagtttcggtttatagatcgaaaacctccatccagtttgatggattgtagtgtttataacagcctcctgttacgtatatctttccatcaagtaaactggctgatgggtactcccgctccacctgcatgcttggaccttcgagccacgtgtgagaccagcagtctaggattgagacactagatgactgggattgggagatggatccgccaatgttatagatattagaaccaaccgccacgagacttgacctgtgcaaaggaggagaatgtggaattggtattgttgccaaaacatacccacttgacttcctagtgtcactggctaggataggtctccgacaaagcttgaaccagctagggatacggccagtatgagagaaacgtaagcacacatagagacaattctcggtataacctgatagtgaccggaaccggtaaatctctcctgaagtaaggagcgagtggaagcgcttgcagactaaggagagagatcgataagacaatctcgagacgcgggctaagatactcaatatcaactcctctggaagtgaaggaatcaaggttggttcttctactggcagcttattcttcttcagcggtggctcttcatcgtcgctcatggctcaggtgttagggttntgaaatgaattttcccaacttggcaaacgtatgtagttcatggctcangtgttaggatttgcactgcataatgtatgggccgaatcaaaagatctgccccagtaatcaagcccatacgtagttccacatattggttactnttttcgtatcattctgaattttttttccacaaaatcagatacattttgtacagtatattgaagtaatcaccanaaaatgattaacatatgaaag

SEQ ID NO: 5978 - DNA, 1237 bp, Arabidopsis thaliana landsberg
  unsure (1)..(1237): unsure at all n locations
agtaattaccatattcagccaaagccaaaccaccaataccaggaactacatatttaactgtcgaagaaataaactggtttacaacagaaaccacagagtcatcttcatgaccactactactcttctttttcacacctaaaaccttaagcgtcaaagcaacaacaccaccagctgcagatacagaattggcttgaccactacatccaaacttggtagcaaccgacaacacaaacaaaccagttttgcaataaatcgcaaaatcttcacaattgttgtctaaaagatcgtactcaccaaatccattttgcaaaaggagaaatttagcacgagaaatgacttcatcacaaggatctgaagatgctatcgtgcatgtaccacctcttttggctagaaagatagacggagaggcactgtattcgaagagatgtagatttcctccggcgagaaaacaatcaagacaagaagagattacaccaccgagattggattgatctccacaatcaatacactttttgtctcttcttccatgatttggtattgaaatatcgatgatcttgtccaaaactgttcctgttccgaattctagaccacctccacgagtgaaatgaatgactttctcatctcctacgtagactcctgaaaaattgcaaaacagggaaatattcgtgttatggaataacccaaattttgtgatctttgttgataaacccagaaataactaagatcaaacgttaagagatggaaccgtgatgagagtagatataagcgttacgccaagaatagatgtgatcgcctggtttcagatcatctctggagatcttgtgggagaacaatcccatcttctatagttcttagcgagagagagaagagaaggagatccgcgtttgcttaatgagttgggttttcttttttcgtggaggtattttatattacaaattaatcttggtaagataacatggcttccaactatatatggaaactgcaaaacagtcatcaaattaattaattacacaacagcatataaatgagataattatggacacgcaacttgtgagttgtgagatacgtgtcttttaagacaccgcgttaacgcgttggactatgttactctttttagatagattgatgtttgtttagttctgtttcgatttggttggactgctggccgacgatcactaaccatanatctttaaccctatactgaaacggcctacaatggacttaagacattctcata

SEQ ID NO: 5979 - DNA, 963 bp, Arabidopsis thaliana landsberg
  unsure (1)..(963): unsure at all n locations
tatgaattaacaactaaaaagacctatatcaagagcaccaattcaggagaaatcttttgaagagaaacctcatcttttttagctcttccgcttcttcctcagtgcaaccatgagtgcagccagagagagctaacatgtccatctcatatctcagatgcaaagccacaaatggccctctttgttgtagaatccgaactaacttagatcccaaagcctcaagctgtggagtgannnnnnnnnnnnnnnnnnnnacccggcacctgagccactggagagagagcggaagaccattgtttgccaggcgggtatcagtcctattgaagtgtacaactttatgcttgctgaagagaggcaatacctgaacaagaaattaaccaatcacatatgcaaatggttaggtaatatcttgtaacaaggatagtcaaaggaaccaaaacagcaaaactagtgataaacaagacaaacctgcttcaagtaatatttttcatcagaccagctcacaggaggcatttcgaacatttgatatccatactttctactaaaccgtttaggaagcctccttaagatccgaacttcatctcttaatgaatcaatgaaatgtctcacatcaaaaatatcctcaaaaccactgcaaacaaaaatgaggatactttagattgctaaaaaatgttaagcatataagacacatgagtgattctataaacaccaaagatagagtacctaggatcagcccagaaagatgttttgtcaagctctggaacaacgaaagtgagattcaataaccgagcaacagtcaccatatcacatatctgaaacacaacataaaaatcagaatttggaaaaacatcaaatctgaaagaagaagaaaaagagaatttaagcaaagtcaccaaccgcggatcgcatttgattcaatccaccattacaggatacaagtagaataccattgcttgtataatccct

SEQ ID NO: 5980 - DNA, 686 bp, Arabidopsis thaliana landsberg
caccaacgaaccctatgtgccctaatagagagaaaactgactcggaggaggtagaggagggggcaatggaactggctcaacaggggctgagaatctagaaatctgattggttaaaccagtgaagatccgggaatgccaaagcttaccggcggcgaaaagctgaaccacacacgtgcaaaccaaaatgctggagcaaactttaacgaaccacacttgtacacgaggcttcggaactgccatcggaagcggaagcttatcgcttcgcgcctgagtaatattactctccgatctaacttccatctccctcctccgacgatcgtcgtcgccgcttcatgagaataaaattactataacctaaatttctccgatcttgtgagatgtcaagaaatttgaaattagatgacaaacgcgaaatgaaatgcttcttctctcctttgtgtcaaatggtttgaatctcgaggagtttttttttctttcgaaattcagaagaagaaaaaaaaatcacgagacgggaaaataaaaaaaggtggtaacggtgagagatgggaaaataagttaattaaccgtcaaagtgtcttcttcttcttctatttattgttttcccaagaaactcattctattgcttacacaatttatttcctaattcagaaagcttcaatattcctaacttgtttcattatatatat

SEQ ID NO: 5981 - DNA, 449 bp, Arabidopsis thaliana landsberg
acacacaagtcgaccatgaaatcaaacattttataaaagatgagagcattcagctaaaataatagtttcacctcatctttttgagttcttgagcttcttcatcggtacaaccatgagtgcaaccagagaaagccaacatgtccatctcatatctcaaatgcaaagccacaaaagaccctctttgttgaagaatccgaactaactttgatcccaaagcctcaatccgtggagtgaatctcagtccttggaaattcactcggcatctcagcctttgaaggtcaagagaaagaccattgttcgccaatcgcgtatcactccgaacgaaatgtataactttacgtttactaaaccgcggcaatacctgaaacaaacaaaaaaatccgatcaatcataagcatttcagattcatcacatagaggcaaaacagaacaccaaagaaacttgcaaat

SEQ ID NO: 5982 - DNA, 692 bp, Arabidopsis thaliana landsberg
  unsure (1)..(692): unsure at all n locations
cagggcatccatgaccatcaccatagtgatacatgcattgcgacatgcgtgccagattcattgcagcttccttagaacctctagaacgtgacgaagaattgcatgccgtttttgtttcggagttcatgtcgtcccacatgtcgctaatcatctgatgcacgtgatcacgtgccctttcctctgaagctccggtctcatgcatgtaacattggaccgatttgagaacgtctcctctcgccaattcagtctacattttaacaaacattcactcaatgttttaccaaaaaaaaaagaaaaacattcactcaattactcatatactatatatgcatgaattacatcaagttagaagatagatcacttactggcgaagttccaaggtcgttagctaaacgaagaacggtggctgagcatcggacgatgtgttgtcggtgttgagacaaagtctctaagttttgaactgagatttggtcagagaaaacgcagtaaaagtggatcaatattgttggggcagaaattgaaatccaagcattttgcatatattcttccaagcttggtttgtatcctcttttgtaccactttgcttccactagatatgttctacataaatctgcccactaaaaaaacacaccaaatatntaaactatgacatatttgaattaataatttctacanaaaaataaacttaccga

SEQ ID NO: 5983 - DNA, 2055 bp, Arabidopsis thaliana landsberg
gaaatgtgtaattagtttaagttttgttataacttgcttcaaaaatatgtttttatctcagttagttttgaaaaattaaatagctgtggaatgcatcaacttatccatgacattcagttttctagactttcgacttagttgtgcccaaaaaaacaaaaaaaaaagactttcgagttatgacttgcatgcaagttgcaacttcaaacaaacgaaatatcaaaggtttgactaacatttactataacttggtatgtgacatttctatgcatggtatttgattaaatcaaatgttggtgtcccttattcaaagacatcgtcagcaaaactaaatgcagcgacataatattctactacttggtctgcccgttctctaattgcatgtctctattttaatttatatataatcaaaccaaaatcttgcttattggataaccattgtcattatttcatgattcatgtactatttaaccgaaaatcgcagttcaataatgcttattcaatgcattaaaaaaaaaaaaaagagtcaagttcaaagaacgaacattaaatcatgattcctggctaatgatatctttgatcttactcttgcctcttaatgagcttgtcttcttaatgctgacaaaccattgtgctcttattaaaacctctcataaataaaatttgctattgaaatattaaatctgttgaatcatgtttatctaagatacagataaaaggtatcgtaacatttaaactgtctcagaattgataataacctattttattgtcacaaaattgaaaataattcatcatatatttgaaagtgtacattatcttcttaatccatgcggctcattttttgttttcttagattacgtggaagctttactaacagataaccatgggccggcccacatgctgaatcagcaacactgatcgtggcggattttaactaagtctggtcgagaaagcccgtcgcaacattttagttttatatgagtcggtcaacaaaatgctaagctgtggattgtttttttttgttttgaatattcaatggtttctgtctttctgagcttactttctttagattgagaagctccccactaaactttgtttgatgttttctttatatcttagttaaattgcattatttagttccaattgacaagtaactttgcatctccattgaatcattccaccatttgtcctataaaacacgtataaaactacaaatatataatctctaggcacgttgtggttgacattaagagcaaataatatcacgacgcaagatactggacagcaactcattacaattctcttccatgtctctctcatttacacatattaaactatattccatggaacctaacttaaacaattttctctatatttccagtaattaaacaaataaaataactgactatcatcattgtttatataccaacttcgtttccacgctctctggttccacagaaccggccatggaagccactaatgtgcttcatctgcttatcatctctctgttttcgacgattcttttggcacaagcaactgatatcctcatagcaaaccagactctaaaagatggagacaccattgtttcgcaaggtgggagcttcgaggttggttttttctctccaggaggatcaagaaatcgttatctcggaatttggtacaagaaaatctctctccagaccgttgtttgggttgctaacagagactctcctctctacgatctctcaggaaccctaaaagtatctgaaaatgggagcttatgcctcttcaatgaccggaatcacatcatctggtcatcatcatcctcaccatcttcccagaaagccagcctaagaaacccaattgttcagattcttgatacaggtaatttagttgtgagaaactcaggggatgatcaggattacatatggcagagtttagattacccaggagatatgtttcttccaggaatgaaatatggtcttaattttgtaaccggtttaaaccggttcttgacatcttggagagcaatagacgatccatcaactggttactacacgaataaaatggatccaaacg

SEQ ID NO: 5984 - DNA, 2834 bp, Arabidopsis thaliana landsberg
accgatcatcatcgtcgaagcccccaaagttataaaaacggccttttcaatgccttgccttagggccaactctggcttggtcaagcctggcgatgttggaaggtcttcttcttcttcttctattttatacaaattttaagacaaaactcagactaatcatctaaacagtgttttcttgccaattaaattagcttaattttacttctcttctttcttatcctattgtttttgcagaatcgtgtcgagaaaaccaaaggacttgtgggcagttagactctccattggaacatatcttttagatggtaaatatttcaaagctttagagcttgacgaaggagatagtgattgagaatttgagatcatgtctctaaaattgtataagcaacagaaaaatacgaattattattttaacattttgccattttaagttttggcgcaacaatcttattaatgaaccgaaattaccgaatcgaaaaccgttaatttggtttagtgatcaacccgaatccaaacgggtacaacgggtcgtaatgcgggtcaccaacgttcatcggcaactgatccactgtcttaaaccacgtccgagccaatttcccggtgaatccataatctccgaacaaaacatcagccactccttgaccttccgttcccggaagccacgccgccactagagcatcgatgttcgaaatgtacggctgcatcaccaccggacgtcccgatacaaccaccaccacacatttcaccgatgcgcacacgttcccgatcgtgctcggacctggttccgatatggttaagttcgtactgtctccgaatccctccgcgtacggtttctctccgacggccacgattgcgtaatcgaagtcaccggccttgacgaaattggtgtcggggttttgattgtagataacttgcgtcttcggatccaccgtcttcttcactgcggcgaggatcgttgttcctgcaacattcaatttcagactggtaaatatatgttcttcattagtgttgcatattgaaatcacaacacacaaaaaatggtatgaaaatgaatcttagagtatgtcacttgttctgagaaaccctaatgttcttctatatgatgatgattcattggaatagagtgaggaaaggtgtgtgtaccaatggtgagattgttgccattaaggccttgccatgtgattgtccagccaccacattggtatcccaagttatcagcatgtgttcctgcgacaaggatcttattggctttctttggcagaggaagcaacggcttatctgcgttttcaccattcttcaacaacacgagagatttcctcactgcttcccttgccagttccctgtgttcctgttgagtttgttcaatgttaagttggggtctatcttaaaactgtttttttatcttacagaccttactaccgagcttcttggccaagctatgatcagcaatgggattctcaaagagccccattgtgaatttgactcttaagattctctttacagcatcgtcgattctgctcatcgggatgaattttcgcttcacctgactggttagctcgtcgattaatttggtcaagtttgatgagcccatgaactgcattggaaaatttgaatcactttctatatctttgaaattaagaaccatttttgagactgaccatatcgagtcccgcagtggtagcagcatacacagagtgtgaataattagcaccaagaggtgtgttgatctgatcaacacctaaatagtcggagatgacaatgccctgcagagagatttaaaatctttctcatgtcaatactgaaatggctgcttctagatgctttgcttaatctggaattttctatgattatagttaccctgaacttgagtttgttcttgaggaaacccgtgataagtttcttattagcatgcattttcaacccgtttatggacgagtaggataccataactgttgcaacgcccttgtttaccgcatcgtgataagctggcatgtgaatccccagcaatccatttgtattaataaccgtgttgttcgcgttcatccctcttaatgtacctccatctccaacgaagtgtttagcacaggctgcgactttggtcctgtaagtttacccagtcatctgtctaactccatgaatctttgcttctctagagattcagtaaagtgtacttacttcccagcgacgaaaggaacacccttttgaccggtgggaaggtcaccttgcaaaccaggtatgatctcagtcatctgttgaactattttgtgatcctcactatagctctcatagcatcttccccatctagggtccctacacacctgttcaaagtgattaattacaaaaactgatgtttccgcttatgttcagattagattttacttactgcaatgcatggagcaaagacatattggattcctgttgctctaacttcaagcgcagttgcttcaccaattctcttcacaagaccaggatccctaacagatgaatacaacagtaaagaaacaatgttttgggtctatccattcatttgaaatgggatattttgtaagaacttgcctggtgactccgaggcctacgttatgcgggaaaatggtggcgttgtacacggtgttgtgaccatgaacagcatcgatcccgtaaattatgggaatacctaagcgggttgaaagagctttcttttggacctcattcaccatgttcacccaagcttcaggactgatatatggcttcggcacactccctcctccgctaaacacactccctacaaacagacttctgaaactggtgagtgttcatataggttttaacaacgttgtcaaggtccagtatcataccga

SEQ ID NO: 5985 - DNA, 837 bp, Arabidopsis thaliana landsberg
tgctaagaatggtaagacaggtgctaaacctctgcttcctctgcctaagaaatcagggaagatccttgtcgcgggagcacatgctgataacttgggatatcaatgtggtggctggaccatcacctggcaaggccttaatggcaacgaccataccgttggtatgtttactcataaagttctctttaacctctttgtcttggttgcaaccacagcaatcgctaggttttggccatccatagtgtgcgagctaatacagaacattgccttacaaaattcggatgtttaatcttgacttttgtataattacacacaggtacaacaatcctagcggctgtgaagaatacagtggctcctaccacacaagtcgtctacagccaaaaccccgatgcgaactttgtgaagtcgggtaaatttgactatgccattgtggtagtcggggagccaccttatgctgaaatgtttggggacaccacgaacctgaccataagtgatcctggtccgagcataataggaaacgtgtgcggatcagtgaaatgtgtggtggttgtggtctctggccgtcccgtggtgattcagccttatgtttcgaccattgacgctctcgtggcggcttggcttccgggaacagaaggtcaaggagtggctgatgctctgtttggtgattacgggttcacaggaaagttggcccggacgtggtttaagtcggtgaagcagctaccgatgaatgttggagatcggcattacgacccattgtacccattcggtttcgggttgaccacaaaaccatacaaaatgtagacttccttttagttattcgcaaaaaaaaaaaaggatctt

SEQ ID NO: 5986 - DNA, 8084 bp, Arabidopsis thaliana landsberg
  unsure (1)..(8084): unsure at all n locations
aataccttaccaacaacgtgtattgtctgcatccatcggagtttgtgattgttcacgatgggaagtttcatgatggcggggggtgcatcttcgctaacaggacttgaggtgtaaccgataaatgcaatgaaggttactggaagattaagcaccgtgagaagctgatcatgtcacggtacgggcagaccattggttggaagaaagtttttcagttttatgaaacggagaaagaaagacattttggtaatggagaagaagtgaaggtaacttggactctaaaagagtataggcttaccagaaaaatgaagaagaataaagtggtgtgcgttatcaagtataaggtaaagtgtttgccgaggataacgaaagatacagagaagaagaaagaagatgtacgtaggcgaaggggaagctgtgaaactaactggaatgctagggacttctactcttggtttcatgatcgatcatctcgaacatggtcatgattcatgagtctttgtgtttcattatcgatcattcctctgttcaatatggtttaaagactagtatgcttttttttcttttcttgtggtttgtggttgtgaggagaggctttttaatctgattacaagagacgagagcatcgtagttgttgtgttgatctgcgatgttgtgtgtgtgctcgtgtaagagatttaagagagaaataatgttttcttctatttttaagaatattcaaagaatggtataaaaaatgtgctaaaaaaacatataataatgttagagaagcacagaaccagcttcgcagacgaacctttctctatattgccactcagaagcatatatataacgcaataaatttacaataatctttaaaatcttattatcactcttctgaattttctcttctccaacagaatcaaacacctcagtaatatgtaaccaaaaagtccaaaaccaatgaaaaacgcaacacacaaagccacagattatccggttaaatttaacttctgtttccaagttattagatcatatagttgtcttaagtcaagcatttttgctattggagaagatttatctaaccgaaacttgtttgagtttgctatatgattaagtcaagtttctggtgagattcttgttttagtgataactggaccatagacatcgataacatgcaagtttctgttaacagttttaatattgacagtcttttcagttcgttttattttcagcaatcattcaagaaaccaacagaaattaaatatgaagacatgataacaagaaagaacaaaatgctaggccaacatagcgataaaactcacacaaagcctgtaaaatgagagaagttacacacttatccaaaatagttatagattcatcagaaccaatcctcactccagattaactaactaataaatcgtactcgtttcgcaggaacgacttggatctttgtcggatggttgttcatctcagggggagaagagttacagaggtcctgagatgtttgacgtagttgttatgggtttggcctttgcgtaatgatatgttggccttgggttgcatggcttgagatgagttgcatcacatcattaacacaaagatcctctgcaaggtccaccaaggagtaaactctaagatgattctccaaaccttggatttcaacacgttggagagtgtttttatcgggattgaagtagaaaagattgtttagatgtataatccgccatcgataaaataatttcaccagtagcaatcactccaacgattaaatgattcttgggattaaacacagccaaatcccctaaaatgtagacatttttggaccattcatgtttctcgacatcttctagaacccatatacacaacttaattgtgttgccatcaaacttccatttagtcccacctaatttgccattacagtttatcaactggccataaaagcatatgtcaataaactcgaatttctcacacctaaaatcaaagcaaacaatcacatcagacggttcatgatcatcatcatcatcnnnnnnnnnnnnnnnnnnnnnnnnnnnnnnnnattcaacaattcgggaagctttgtaatacaaaactccattgatgcataccccttcattagacaatatattatgggttaagctacattcgatcttcctccccaacattttttcagttgttcctaacgtcagaattctatggtcatcaccactatctggatcagacatgaacagtaccttgatttgcttctcaatcggatcataccctacaaagctatacgaattttcgtaccttgtccttgtcagtttaggtaggaccgcatattgtcccgtgcgagagttacataccaccggcactgtatatgcgcctttcatcatagagaaatggatcaaaccagagcaactatgaaaatctgggaacgtgcttacagagaacttcatgtgaaaatcagctactacaaaagacggcttcacatatatattctgattttgaggcgaagagaagacgctgaagctccatttacggttgtgttggaggacgaataagagacgtggacgagcacgcgacctggtcaagaacagctcggtgaaatatggacggcgaaacatagacccccatagcttcgacacgcagcgaaaccttgcgactgactccgctggtaatcttgaatgtatctcaataatgagatcaatcgggatagattctaacttttctcctccgttcatgatgtctcctggtattttgcttataacaaggagaaagatagacgactatatatctaaggtttgaagcctagggcatttattcagtactgaccgaaccgaaccctaattgccgaggttcgtgtaattctgtttgatttggctttaaaggcattaaccaatcagtaacagatagaatattctcaaatattagtttgaaatactgtagatattctccctgtatctagggaaatccctgaacatattgtaacaactttggctatatattgaatgcaatacagagagctctcctgatcggagactttcattatctttcaagcctttgttatattgaacggttcgatcaggaacacaccaacatataagtgaaaccgatcggtttgacctaataaaaccctagatcaaattttctagttcgtaagccgctcgctatattcttttctttaagaccaagctatttatatcaagcaaggcaagtaaaaagttaccaagaaaaacaaattcagataaaactaaatagaattagatgatgttcaagaaaaccaaaaggttaagcgcaacaaagacacggcatgtgatgatgaatgtgctatgataaaaaaattattcttggactaaaaaagcaaaaggcagagagatatggtcttcatttcaactcgtgttccaatttttatctatgctttgtgataatgatatgcctttgctcttggacaatattttctctcattagtcaaccaacaatgtatgtattaatcaatggagactatggtagtaaaagatagggtcttcatatcaacacgttttccaatttctaaatgctcaattgagtgcataaagatggaattaaaaatcaattactaattcttctaatttgaaactactaattctaaaagaaaactatttatgttaattctaaaactgaaaatgatccttcataaccaccataatatttcagtatgcccaatattcgttaacggtccaggccttagaaaaataaatggattcgagaaatgattctagcctttagctagaggtaatcttaaaagcatagaaaactagaagaaatgagcattgcttcttcatccatctcaagctttgcctcaaagaaaccaagacctatatttgaaaagaatctgcccttttcaattgcctcatgcaaccctcaacgttatctataaatgttgtaaatgtttatatgtcttgtgtataacaattccttccaacaatgtcattgagtcagccaataacacggaccgatagtgcacccaatggagcatttaggacttttggtctctactggtgctaccattgtgatcgtatggtcagaattgcatcctctaacccatcagagatcgcctgtcctcgatgtttgaggcaatttgtcgttgagattgaaacgagacaacggcctcggtttactttcaaccatgctactccgccttttgatgcttctcctgaggctcgtcttctcgaagctctctcgctcatgtttgagcctgcaaccataggtaggtttggtgcagacccatttcttagggcaagatccagaaacatcttggaacctgaatcaagaccccgaccgcaacatcgaagacgacacagccttgacaatgttaacaatggtggtttacctctaccaagaagaacatatgttattctccggcccaataatccgactagtccactcggaaacataattgcaccaccaaatcaagcaccaccacggcatgtgaactcacatgattactttactggagcatcaagcttagagcagctgattgaacaactaacacaagacgataggcctggaccaccacctgcatcagaacctatcattaatgccctaccatctgtgaaaataacaccacaacatctaaccaacgacatgtcccaatgcacagtgtgcatggaagaattcattgttggtggagatgcaacggaattaccatgtaaacatatttaccataaagattgtatagtcccgtggcttaggcttaacaattcttgccctatctgccgccgtgatctgccacttgtcaacaccgttgctgaatctcgagaaagaagcaatcctattagacaagacatacctgaaagaaggcgtccaaggtggatgcaactcggtaacatttggccatttagagcaagataccaaagggttagtccagaagaaacagcaaaccagaatcctcgagataacaggagctaactctgaatattccatgggaaataaaatcgtgactatctatatgtatagactctatgagacattgtctatttgaatatgcctgtatatctcagaaaaaaactcaagcgaaacatacttaacgactagagaaaggaccatagcgataagcaggacttgcatgctataacaaaaataattagtggaaaaagacagtaaccttgagtaaactaaacttctctctcaaatcttactgcagttctgtcttagtggtcttactgtaacatcctttagtttcttgaacccatccattaaagagggaaataaagttgcgaaataaagagagatcatcaagagtcaattggtcaccacgaaaattataaataacggtcgctactaacttaaaagcacatttattctctactctcttcctattcgcttcatctccaagaaacaaacactcattcttgcgtttgatctttctttctctagatcccatatttttcttgatcgatttagtttcattatggaggaagatgcagcttttgatctaatcaaagccgaactcttaaacgcagaagacgatgcaataatctcacgttatctgaagcgtatggtcgtcaacggagactcatggcctcatcacttcatcgaagacgcagacgtgttcaacaagaatccaaatgtggagttcgatgctgagagccctagcttcgtgatagttaaacctcgaacagaggcttgtggtaaaaccgatggatgtgaaactggttgctggaggatcatgggtcgtgataaaccgataaaatcgacggagactgtgaagattctagggttcaagaagattctcaagttctgcctaaagaggaaacctagaggatacaagagaagttgggtaatggaagagtataggcttaccaataacttgaactggaagcaagatcatgtgatttgcaagattcggtttatgtttgaagctgaaatcagtttcttgctagccaagcatttctacactacatcagaatcacttcctcgaaatgagctgttgccagcttacggattcctttcatcagataagcaattggaggatgtatcttatccggtgacgataatgacttctgaaggaaacgattggcctagctacgttaccaacaatgtgtattgtctgcatccattggagctcgttgatcttcaagatcggatgtttcatgattacggaacctgcatcttcgctaacaagacttgtggtaaaaccgatagatgcattaatggtggttactggaaaattttgcaccgtgataggctgatcaagtcaaagtccgggatagttattggtttcaagaaggtgtttaagtttcatgaaacggagaaagaaagatacttctgtgatggagaagatgtgaaggtaacttggactctagaagagtataggcttagcgtgaagcagaataaattcttgtgcgttatcaagtttacttatgataactaagaatcttttctttggattttatgatcatcttagtatcttgaggacattctctttaaaacatatatcgatagtctttgtgtttatatttctctgttcaatatgatttagagactagtgtgcttttttctctctttcatgtggtttgtgattgtgagaggagaggcttttttgtcgctgcaatattttaaacccaaaataacactaatcgcatgtaaacaatcgatattagcagcaatcacaaacatcagagacaaattgagccttatgtaaccaaacatgtacatatgattcgacaacaacctacatgtttctgaatcagcaacccgaacaatctataaattaaatgaagatcaattaaattgacatgttttttttatctgctaagcagagattgttgttgtgttgatttctcgtgtatatgcacatgtagcctttttggttgccagagacttaagagagaaagaatattttcctctgttttaagaaatattcaaagaatgccatggactaggatataaaatgccatggtctaaaaaaaatgccatggtcttgattctcgagattacaccaaacgaaaccagtgatcaaaattttatagggaaaagatttgaaacattaggtcagaaagaaaaaacaatctgaatcttagtattattatataatcacagtaaataaataaaaaattcatatgtggaattttttgcatatatatttttatgctattatagctttgatatgatgacgatatatatatcaaagatgcgccaactgttttataaataaggtttagatggaagttcctcggaaatatatattccccaaaaactcttttaaaatttcttcaaattctcttctgatagaatgaagaaaagttttccttcacacagctagggaagaatgaattacgtacgctttaacttggaaattctggttgacaaaaaataattttttaagtaaagaatttgcggctccgtgtgttgcgttaagcattggtttggactttttggttacattattaaggtgtttgattctgtaggagaagagaaaattcattagagtgaaatatctaggtcatgaactaatttcaggtgaacataaactagtgagttgtagtaatatatatgtaagttatatacattcatcatattgatcatctgttaacaaacagtgagttggctaatcatgcatttcgttggtaattctaaatattgcaaataaatttagagtttcgcctactattacaatcatatatatttgtattatttttattatctatttgtatttttttttaattaaggataaaaatatttgtttgacaactataaagtttttttttttttttcatttcatttaaaaacctcaaatgggctaaatggctgatgggcctagagaaatacacagattacaaaaaagaaaagtccaacggaaatacaaacgaaatcagctctgaagaaggcagtacaccggaaacgcagtcctcgccttccaattccgatgctaacaaagacggttttttttggaacatgacctaactataaagtgtgttaaacatgaaaaagacaaaatagtgccaaatatgatccgttttaatattatatttatacatatgtcaacgaaacaactatcgtatattttaagctgatactaatttaagcagaccagaagaaacaaaaaaaaagtttataaaaaatttatccatagcaaagtcaaaata

SEQ ID NO: 5987 - DNA, 3918 bp, Arabidopsis thaliana landsberg
tattgctttcgtcgtcatcttcctcgattcttggatgcttcttcttaatcatcgttggcgcagcatcatattccggtttcctcttgttattgaccaaaccagaacctgatttgttacaattcaacaccattggtatgacaaaatgttcattctctacacattcatcatcttctctcgtcaaaaggaagattatttggctcttctttccttgaaaaccatccaaatctcccgcctcaaatcgatctacgaggatgttcatgaactgagcatcggctaaatcaactcgctctatcaaaataacaacctcttccttcttcttcaacgcgttcttgagctcctcgcatgcttcgcttgccttggatgttcttagattgatcttcaacatattttcgtgtgacccgaaaagagaagttgtcaatgtgatagccaatcttcttttggcagtcacatcgttccccgaaaccagcatccatgcatctttcctcttactcctcttgacagattcttccatggcttcaacgattgaaggaagaacatccttttgccatggaatgttctcgtgaagcttttccaataatttactcattttaatcgctttctctggttcttcttcttccgagttctctgaatcagatggaaatggagaatgaccaagtgcaagagtgatcttagtttttacaccttcatcattgttactcttgaacccatccaaactcaattcatcagtcttctttagaccttcttgacgattacttccgaaactaaactcgatagtacacgagttctgtcgtctaaacttagcaacagaactagatgcacgtgagttttgcttcagactcgagtccatcaaagaacccggtaaaacagagctgctctgttctgccctccaagcagtcatactaggtttcttgtggtgaagagcttgacaaaaccggttccatttctttctcagtccactcaattcatcctgaaagttaaacccacaaaaaaaacggtttaagtaactgcacaaacgctaataataaaacaaaaatcattcatttatcaaaaagaagtttgtaccttttggttaatgttgttgttgtctccatgaggttgcagccaaggcggtaagattttgtgctgagctgatataaaagcttttgcttctttctcatagttaaaagcacattctccacagaaattgagtttatcttcttcctcttcttctcttgctccttcttcttcttcttttactctaaatggcttcatctccatcacttgagaagccatctcagaactgtgaccactgaaactaagtaatttagtatccatcacgagtacttaagctagtgattaaattataagaagagaaaaaaaaaaccttgaagcatgaagggttagtgaaagtcctcctgaaggaattgaaacagcttgaagagcccaatgaacatcaagtggaggttgcttcatttgacatctcatgtatgtttggtaagaagctgtccccaatagccaaactttggctcctgtgttgctataatcataaaccaatctccctatctcttccactagatgatccgccgcgctatagttcgaagaagatgcgctgttaccgtctccccaaactgcccaatcaagatctccaagacaaacaatgacacctttgccaccccaagatgtgaaagaatcaatctttctcttcaactctctaacttgtccctctatatcctccttcttcatgaaattcaaaccaacttgtgaaaactgaaacttgatgaaatgtgtttgttttaaatcatctggaacttctcctctctcgattctacccatgagttttgcaaccactccttctgttagagaaacagaatctccaactatgacagtgttcctcttcttgttgttcttcttccctagaagcacttcgatgaccgggtttgcgtcttctctcacgggaaaagcttgatttggagtaaaggtctttcctttagggaaatgaaagaaagggttttgctcaaaagagtgatgattggtcaaatgcgcatgccaaatcttactagggttagggcttaaagtccctcctccttgattgttttcactagaagaaggagagcaaggagaagagaaaacaccaacagaggaagaagagccgtagaaaacaggggaaacaacagaggagtcatcctctatgttactcttcacagaaacactagagagtccagcttctctcatcactctactcacactaggatcatcaagaatcgacacaacaagctgctcgagctcgactttaaccgccaagaacggttggttctgttgactctgctgctgctccacacaccctctcctttgatgcgcctgtgctctcttcagtgccgctacgagagcgttggagagtgaaggctgggtctgaaacagaggattcgggttggtcggaagcctgttgagagaaacattgaaacagagctcgagagctcgacaatggagagaagggtgagccatttggcgaccgagggcagtgaacggattggatttgagacatgcccttcggaaaagattggatcttgacgaagttaaaagcgtcgaagcaacgtgaagaggagtgacttgagaatggcctcttcttcttgctaaggttagagattgcttcaaaactgaagcagcctctggtgttagtgtctggtgcacggtataagcccctgtacgcatcacaaaaccacccaccttaaatccctaaacccctcgcaagaatcgatcgatctctttttgctatttcctctctacccacaaacaaaaggtttaagtaagactttgaagttcttgaagcttaaaggaagaaaaagtaatggtggaagtaaacttagtgtttataaagatatgtttagtctgagagaagtatcgaagagatgaggacagagcaagttatgaatttatattgttgggttggtttcatactttcgatgttgttttttcttttattaattaaacatcaatttctttatggtttttgttttttaataaattatattctccttttgctttcgtcttttgaatagtaaggcagctttctgaagcttttttgaatttcccacttccttcaagcttcgtttccctccacaggttcaagttaaaaatgtctcgaactatattatatttcatctttatacatacacatatgaaattttgaggtccggcttaataatatctgaggcccagtcaactcttttctaatgtttggttatgcttttttattaatgcaaagaccatatacacttctctaaaatatgatagaatttagggcaaagtttttgcctccgttaattgaaaataaatttatttttggctttaccataaaacagtaagatacttagcattacatggaaaggtaaacttcaacaatatccacacatctatatttgctttcttgaggaagttggtgactcatatctcttaaattttttccatcagttattagtttgatcatgtgtagtgatcataggattataatgtatatgaaggcattaaaccagtgtgtaaataataaccattagcatctttgcgtctgcttcaaactcagctcttgtcaatctcactctacacatagattggaatgagggcatgtttaaatacgaaggtcttgtgatgcaacagataaacttgcggttaaccaattgaatacaaatgagggcatgtttaattgatctaggacatgactggtcctatacatctgtagtcatatatatgtgttgtagatcaatcaaacatgtccatatcattaacttgatatatttgtgttagagatgttttagtttaaaatacaaaaaaataaaataaaataaaaaatatggaccaaagattcaattgccagatcttcctcattatgagaaagcactgtatttccgctcctaaaatacaactttcaaatctgccagtaataga

SEQ ID NO: 5988 - DNA, 1390 bp, Arabidopsis thaliana landsberg
ttttccgacatgagttttatttacaataatacacttccttgacctgggctacgaagaagaagacccctgacttggtcgtcatctcctttcttatttcttcttcttcttatcaaaattactaaaactctctgcttcaacttccttctccgcctcaaattttccctttatgcctagattctagccttctagggtcttcttgaaaccgtgattttggtcaagaaatggcttctcacaacgaaaacgatgatattcccatgcttccgatttcagacccatcatctcgtactagagccagagctttcacttccaggagtcgtagcgtttctctctcaaaccctacttcctccattgaaggatttgacacttctactgtggttttaggctacacgggtcctcttcgaactcagagacgtcctcctttagttcaaatgagtggtcctcttacctctactcgcaagcatgaacctctctttcttcctcatccttcttctgattccgttggtgtctcttctcagcctgagaggtatccttcttttgctgctcttgaacataaaaactcctcagaggatgagttcgttttgaaacacgcaaatctcttgaggtctggacaattgggaatgtgtaatgatccttactgtactacttgcccttcttactacaaccgtaaggctgctcaaatccctacttctagagtttctgccctttttgattccacggtaaagttttgatttttgttactttacattcacaaatatagcttcaggatcaagtaaatgtcgttgaaacagagtcttttgttttcttgctagttccataacgctctgtatgatgatgctaaaggttgggcaaggagatttgcttcctctgttaatagatacttacctggaatcatgaatcctcatgccaaagaggttcaaacctggactaaattcttcgccctttcatgcttgttagctatttttatagatcccctcttcttcttcctcataaaagtccaagaggtatgtttttccttccagagatatcttttgcttttccaagtgttgttatcttgcctttacaccacctttttgaccatctttattttctcactgtagcaaaacaaatgtattatgattgattggccgatgactaaagcatttgtagctgtaagaagtgtaacagatgttatattcactatgaacattctacttcaggtgcttttcttttgcttacatttttccatctctttataaacaaaatatgttggctttagtgctcacgtttgccatattggttgcagttccgattggcctatgtagctcgtgagtctacggtagttggagctggccagttagttagtcatcccaaaaaaattgcccttcattacctcaaaggaaagtttttcctt

SEQ ID NO: 5989 - DNA, 1567 bp, Arabidopsis thaliana landsberg
gcaagagaaggagacatacttgttggatcaataagaggaaaaagaagagagggtctataaaaatggccactaagcttgaaaaggctaagactctagtccagacttgaacaaatttggaatgaggattcattattccgggtaagcatctacgaacagaggaggcaaatcgcttagcccaacctctagcatcaccatacagaacagtgcgaaactaaacaagacaaaagaaagtaaaatactcttgtgtcagctgctatgtataatgtttacttgagtctcaaggtaagtagaaatatcataccctagaggcagaaactctggaagtctgcaattgagcagcttggcggttgtagtaagaagggcaagtagtgcagtaaggatcattgcacatccctaattgtccagatctcaagagatttgcgtttttgaagacgaaatcatcttcaggtggaacatcaacggtagaagaggaatcaggagattcttgaggagaaggagagaagagaggttctgttctgcgagtagagtgaataggaccactcatttgcactaaaggaggtcttattctctgggttcgaagaggacccgtgtagcctaaagtcacagttgagttgtcaaatccgtcaatggagaaagatgggtttgagagagaaacgctacggtttctggaactgaaagtcctagtgtgagccattttttatttcagaacaaaatctagggcatgtaggagaagaaaaaaaagcaaaatgatgacagagagaagaagaaaggaaggagacgaagacagagacttgggtttcgttttgtatcccgtcaagcaaatgtggacgacactttataaggaaaagaatggaaaaaaaaaaacatgaactacatcgaactttgcaggaaatttaagaaaagaaatgttacattttagatcttgtgttgaacccatcaacgaagcttccaaaggaatagaaaacctcagtagtaagtaaagcaaaaaagttggaagagagaaaacctcaagaagctgcctcttgtgttactttgaaaactttatccaagagctttgtccattgtgtattttatttagtgcatatttccaaataagaatgatgatttctgagcattagtgaaaaagaataaactggaattctcaccaaacacacagttcaggttttttttttttatatgcaattgtctcatatgataaaataattaagagtgtgaataaagagatccgcgtttatggaaaaagacaatgaaataaatattattttctaaaacgcacatttttatttatttatgaaaacattattcgatgacgtaactttatgaactcttctggatatataaaattgtcatttaccaccaaccaatatgctctctccctctttttgctttctaaatttgatgtcagaatctcaaaaacctaaaggctttgagttattaagcccaacaaacaatgggccgcaactaccaaacccaagtactaaagccacgtgctaacctatgagtggaacaaaatcaaatgcataaaactttggcggattttgcctgttatatgctctgcactgatacg

SEQ ID NO: 5990 - DNA, 755 bp, Arabidopsis thaliana landsberg
tggcgtgcgactacgctattggtgtctcttagaagtataacggatcttatattcttctttatcattctgcttcaggtgtgtctccattgctcctatctcctatctaaggaaattcattggctttaacgcttctttggtcttatgtgttgcagtttaggttggcctatgtagctcctgagtctagaatagttggtgccggccagttagttgatcatccaagaaaaattgctcgccattacttccgaggaaagtttctccttgacatgttcatagtctttcccattccacagataatgatattaaggataataccattacacttaggcacacgcagggaagaatctgagaaacagattttacgcgctacggttctttttcaatacattccaaagttatatagactcttacctcttcttgctggacaaacatctactggtttcatatttgagtcagcttgggctaattttgttattaatcttctcaccttcatgcttgctggtcacgctgttggctcttgctggtatctctctgctctgcaggtatatagtagaagatcagtgtctttaaagattctcttcatatctatcaagtgatttaaagattgtttttgttgtattgcttttttcagagagttaagaaatgcatgctgaatgcttggaatatttctgcggatgaacgtagaaatcttaaagattgagctcgtggaagttatgcatcgaagtcacaacgagatctgggagagataatgctagtgt

SEQ ID NO: 5991 - DNA, 670 bp, Arabidopsis thaliana landsberg
  unsure (1)..(670): unsure at all n locations
aattcatcaataataactaatcaatattgcatagaaaatctaaaaaatcaatctctttgaaacaaattttatttctagaaaatcaaacaaaaatagacagagaaaatataaccgaaggaactccaaatcgtattccaactaattctcaagatccatagaaattcaattcttattttcttatcattaaaaacgtttacagatggtcaacctgtagatataagataatttttctcattcgtaacataaattttggttaaattaacttgttcgacctattttaagccgaatccattgtaaaaacggttatggttatggtgcttaattatggttagttaagcaccattaaataattactttttgttttgaatgtccacaaataaaattttaaatgcatttttgttttgttttcctatgttctttgccttttagatatattatttttcactattaaccataagttggatttttaaaaccacgaaggggaaacaaattgagtgaaagttctgtacgtgattagtgtataaattgatatctgcagttctttcgaatacaataatggtttatcaacagtaaactatctcacgaggacttgattgtagaaaagccaaacaccatttagacannaataaaatgtttggcaagtggtcacgtttttatttgtataactgat

SEQ ID NO: 5992 - DNA, 1622 bp, Arabidopsis thaliana landsberg
acaaatacccttttcccaaatttagctagtatataaatcttcccagaagatcaagtcatcaagaccatcacacgctgacttgctaccatccatcattgccggattcatcatcattggataagaagatatctcgggcgttgcggttgtgttcacatcggaactcaaaccggtttcttgagacacactcacaacgagaatgctccaacttgatcatacctttgttattattgcctgaacctgccccgtagccgaaatcagatccggaattatggaccgagtggtaagggaaattgagagcttgggtaggaaggtaagtgttgtcgactggtgcggttgtaggatggtggagaacaggtttgagatcgtgttgttgacgggcaccggagaagcttgggccgggttgacccaagaaacccggatctatgagaggagggagagatgagaagtctaagagatgatcaatgttatcaagagaatcaatccttgagagttgttttgtagtagtgattgtagtactaggagcgttcttgtgaaaaaccctacacaccacccattcatcctataaccatcacacaaacaaaaaaaaaattagcatttagattactaattaattaagttcctaattaagtttcatgttttggattattcttgaactaaggcatatataaaaaaaacgaactatagataaacatttctcaacaaacaaattttgtatgcatcaaactcggatctattttattaaaccgaatcatatttttgcaaaaagagtggtaaactttgacatacccttgcggttttggggaggttatgataagaatattttccatcaagacgatattcatgcataacccaattggtcttttcacctttaggagctcttcctgtatagaaaacaagtgttttcttcatcccaacaagacaacctttgcctctaaagatctccttgtccttcccggtcgccttccaataaccagacacggtcgcacggttcgtcctcatcccggtcggatacttccgatccctctggcagaaaaagtaaaactccttctcccccatctttgcaatctctgcactcaaatcaagaatcagaatcttgatcgatgatgatgtttgaaatggtcaaaataaaaaacgatcttgacttgacttacttggtagatcccatggctcgttcttgttgaggtcggcttgaccaatcgctgccgcggtaaatcggatgttgaagaccttctctttgaggtagtgagttattatctcttcatcagtagggtgaaaccgaaaccccggaggcaaatccaccacctcctgatctcctccttgattcacaactacgccgccttcttccaccatctatatatatgtatgcttgatcaagaacaagaaaaatccttcaagaaaacaataactttttgaggagatcgatcgatggatatgtgtttactgcagatacacgttggtgctgaacaagaaataagaggttgaatacagaaagaaagagaagcaaaggtatgagcaatttgaggaagaactatgcagttaaaggaaatgaaaatcaaagcttgtgaaggtagaacacaaatgtctttatatagaggaagataagagctcaaaaaaacaataat

SEQ ID NO: 5993 - DNA, 1285 bp, Arabidopsis thaliana landsberg
  unsure (1)..(1285): unsure at all n locations
aaaacgaatcaaactcttttgaaaaggacttatgttttccaccaaatttaacacacttttggtttaagaaaactaataatcaaataaatcttagatctttctccttttggagtcgaattgaaaaaaacagtgagaatatatggtttcgtaacataaactcacccttgcagattttgggagattgtaatacgaatatttgccttcaagacgatattcatgcatgacccaattagtcttttcaccttttggagctcttcctctataaaacacaagtgttttcttcatcccaacgagacaacctttgcctttgaagatctccttatccttcccggtggctttccagtatcctgactccgtcgcacggtttgtcctcatcccggtcggatacttcctgtccctttgacagaagaagtagaactctttctcccccatctttgccctctctataccaaccaaaaacaaaaatcagaatcttgatcaagaagccttttgtgtgttgaaatggtcaaagaagattgaaattttgtttggctttgaagtttgaaaatttggttcaaaaacaagctagacatcaagaatttgagaaatcttaatcaagaagctataggctttgtgtttacacatgaatggtcaaagaaaatttgaatttttttgttttggtttatgaaaattgactactacttacttggcaaatcccaaggctcacacttgttgagatcagcttctcccatggccacagcagtgaatcggctgtttaaaaccttctccttaaggtaacatgttatgatctcttcgtctgttggatgaaacctgaaaccaggtggcaaatccacaagctcttcacctccatgattcaacaccacaccttcttcaaccacaaccgccatcactttatatgtttttcaagtattacagattcaagaacaagaacaatatcagaaacccagaaatcttttgtaagaatgatatgcttatttggaaagagagatcacacaagaagaagatgaagaaagaaaaatgaattgagaaagctagctgggagagaatcttttgggcagttaaagcagagaaataaaagtattgaaagggtggaaaaaatggcttttaaatagaggagatggatatgagctttctttgtaattaactaaaagataaaattatctattgtttggtttttttccttcttttggngattttgaaagatacgtacgctccaagcaacttcctgaattgttgaacaagtttcacttagacaacaattccatttttttcattatatttttta

SEQ ID NO: 5994 - DNA, 4274 bp, Arabidopsis thaliana landsberg
ctatctttgccatactggatacgaagaactagtacgtaccaagaagaaaagaaaagatgcttacaaaaggaaatcgtcagaatagttaatcagcaagcaaattcgaaatataagtgccacataactattgacacattggatcagacactttactcaatagataatgtttaccttcttaatcaagcatgaatagaaagaagagagccatccgtcttctggactaaattgtagtgaagaaagcagactcgattctgaattttatataattgaagtctcagtaaccttctagtcatgtaaacgactggaccatgaaacaaataagacgaaaaataaaaagcaaccgaaatgcataaactataactcaccttcttcagatgtaagcatatggctctcaataaggcattccaaagcctgaaaggatagattatagaaatcacgtccatgtcagttttctgatatctacagaggtacatcaggttttcactactatacaataattaaaagaattttatcttcccacattagctctgcaacttcccatagtaagtaaaaataacatgcacaaattgactagggcgctagaagtacctcatagcacagaggatcagccttgatagcagctttgtacctgcaaacaaaccgaaatgatgagttaaatagctatgaagttcaagattcccacacaacactcaatcctaatagatggatcagccaacatacacacaagttcacaatatttcctactagcacttgagtaaatcttatacacatgctaagttcatgtaacaccactaaatcaataagatcactctctcacaatcatcaaaatgcagatgaacaaatgatccctgaacaagaaagataggtgaaagaaggctcactaaccattgtcgagcctgagaccggttttgtaaggctccgtatgcttttcctcttagaaagcatatcgccgatgatatctgcaaaagtaaatcaccatatatcagttcagctactatcctaaccaagtagtagtcaaccagttaatgtaattccaacagtttcgctaacaaaccttccagaatcgagaagataatactacctagatctctattatacatttaaaagtcgtgaaaaaacttacattaatctctcggtcctctccatctttatcaaaatctatcacgttcccgtctttagcatcatacacaattccatcatcatcaaccttcgcatcaccaagcatcaatagacactgatcccattccttcaattcctcctgagaacacatagaaattaattaccgataaaccctaaaaccctcaaatcaagagaaacaatctgagattcctaaaccagtcccaatcaaaacaagtgaaatagatagtggaattcggaattacgaggcactttgcggcgaggtaacggaatcgaagatctcggaggacaatcttagaagcgttaagaaggtgaaaagcgcgacggtaatggcggccgaggaaaagagcttgagcttgcatatatatgtcagatgggtcattggtaagagctgctactttgtcggcgaagaagatggccgacgagtacaaatgcttactgacgcagtctcgaacaacaccacggatcttctcaatttcttcttccctcataattccctcgcctatcgaattcttccagacgaaatcctgaatcagcgaaatctaagcaaagatcgtaacaaaaaaagttggggaagattatcgggaaatttttgttcgtccgatttctctagtcaaaagtgtttgagcgagagaggcgggacaagggaagagcctcggcgggagtgtaattattttatcccaccttctataaatatgggcttaggcccattatgtatagccttttacgcagtaacaattgccgcagcctaaattaagttgtgggctttcagcccattgacatagtacagaaaagttaagggacgcgcctataatttatatatgggacccacagaggcacgagttaattgttctattatgcgcttctttgactaatgacacaagtcggttattctattgtgcgccactctggttattagccactagtggagtggaacagttagaaaaaacaagcgttacgaaaacccttgggccggtgaattccacgaggattcgtctctctatatatcatacttcttcaggagccttcatatttgatttcttcatgctgcttcgcgacatcgcaggtacagatttatttccttaggttccttgtgtaattcaatagatattttgtatgattctagcgaaatttttctatcaaatgttgagtatttctatctgatttgacatctgtgatgcagattaacatggatacaggaggagatgagaaacgtgcaagaagaagcgaagaggataggctgagcaacttaccagaatccttaatatgtcagataatgttgaatatccccacgaaggatgtggttaagagtagtgtcttatccaaaagatggagaaatctctggagatatgtacctggtttgaacgtggagtacaatcaatttctagactataatgctttcgtgagttttgttgataggtttctggctttagacagagagtcttgcttccaaagttttaggttaaggtacgattgtgatgaagaagagcgcactatttctaatgtcaagcggtggatcaacattgtcgtcgaccaaaaacttaaagttctcgacgttttggactacacttgggggaatgaggaagtccagatacctccatccgtttacacatgcgagagcttggtgtctttaaagctctgtaatgtgatcttgcctaatcctaaggttatatctttgcctttggtcaaagttattgagcttgatatagttaagttttccaatgctttggttttggaaaagatcatctcaagctgttcagctcttgaaagcttgattataagcaggagttccgttgatgatataaatgttttacgtgttagttctcggtctctactgagcttcaaacatattggcaactgttctgacggttgggatgaattagaagttgcaattgatgctcctaagcttgagtatctgaacatcagtgatcattcaactgcaaaattcaaaatgaagaattcgggttctcttgtggaggcgaagatcaatattatatttaatatggaagagctaccgcatccaaatgatcggccaaagagaaaaatgattcaagattttctcgccgagatctctagtgtcaaaaaattgttcatctcttcgcatactcttgaggtaacctttgtatttgcgcttaagtttttttggtttgctgaattcgttgttttggtgcttaagaaacataatcacccaacttttctttgcaggttatacatgatttggggtgtgaactacccttatttcgtaacctatcctccttgcacatagacttcgaagaccacaccttgaaaatgttgtccacctttctccagagctgcccaaatgttaaatctcttgtcgtggttaggattattttactttaattaaacaagaaactttaatctcttttatataatgctaatggtgaactatcatatgcttaacttgtgtttttcctatttggtttatacctgcaggaatttaaggattcctcaaaagaggacggagatagagttttatccatacctcggtgtttcttcacaactctcgagtatgttaagatagagaggccaatcacaggagaggcaaggggaatgaaagtagttagttacattttggagaattcaccaatcctcaagaaactgaatctgtgcttgaatagttccagagagaaatcagaatctgtcattctcaaagaactccttacaattccaagactctctacctcatgcaaagttgttgtttttgaacctcgtagttgttgggtacttggttgatgttaagtatatgttttcttcatcgtttgtgatgattttcatgtttcgtatcttggaagacaatcatgtgtttgttggttgtaatgactatgttctgtccattttattatttataagttatgttctgaaagaaagtgggaaggaacttgtaaatttgaagattatatatgagaccttgattgtcaaggcacaaaaacgaccaaacggtttggtctaaccccattagcccattattacaagcccaatcacttgacttacaagttaaaattacaaatgctgtcgtattaactaatcatgataccaaagactaatcggatcagtaaaccgaattgatccgaaccggataaggaacagagtgaaactctgaagtctgaacggccgcc

SEQ ID NO: 5995 - DNA, 2765 bp, Arabidopsis thaliana landsberg
acctttaagacttaaatattttaaccattcaagcaacgcaagggtaacggatcaagaaataggttcaggagataccaggctgtacaatagtttctgcccgttggaaattgtgaccactcttccagtcccagaaccataagccacctttatcaccttcagttgcacaaagacggggacattttagttcaaataatgaaatcgggtaatataatatgtggaggaaatgtgaatacaagtatcagtatttcgtcccgtatcaaagagtgatttgaaaatgaaaataatacctccagtgaccattacgccatcctcattcacagccactgcgttaattatgtctctctgtagagaactgctccaaaaagaaagataacatgaaaacacatcagaaaactaaaatttccagtttagttaagaaacattatctttttcattgcactggaagatgtaagagagtggattaagactcaaataactacaaggactctagaacttacagcatgttgtggcaaaactctcccttaggaaggctaaacttcttgatgttgtcagctgatgcagaaacaaaatcattcctgaacgaaacagaaagagacattaaatcagggtgcattatcatgcaaaactctaaggttgaaaaagcaagacaattactctttcggatggagagccattgctcggacagtcttcttatgattcgttatggttgccatcgatttgcctgtttatagtatatttgttagcccaatcctgcatacaatgaaaagctagggaggaagaaaagcaaaagtccaagagattgttaaatgttaactataccatatcggaggtcccaaaatttgatggttgagtcatgagaccctgtaataacttgtggatcctgcaacatcacagacacagtaagttccaaagttattgaaataaaagcatacgactatatgagcataaaatagcagtgtgtgcttcttcgccacaagcacattaagtaaaaagaagatgaaatgaggcgtacagttgggcgggccaaaacggaaaaaacatcgctgtcatgtgggagtacaaaaatttgcatcttcgtacggatatcccatacctataagtagaaaagaatttttgacaacagttagagaactcaaacatcaaaaatacatatgtttataaccacaggatacatcttttcagtaaatgtcataccctgcagacagagtctcgccctccggttagtacaacatcaagagtaggatgaagagctaaacagtaaacgccatgcaaatgaccatgataagatcgaataacctatcaaagacaaattccaaagacattggacatgaaaagttcagatcaggagaagagtaattaatatacagatgagatgaaatccatcatcgagtttaaaccttattctgctcaaggtcccagcaaaagacttgcttgtcatcaccagcagaaaacatataggtatgtctattgcttacagcgaggcctgtgaaacaataattatataaacttagagagttgaaacttttacactggtacttttctacaagagctattgataaactaacaaattgagggggaaaaaaatagtagtctaacctcgtacttgccctatatgtccagtaagtgtgagtttcagaactccagtcgctacatcccatatctagtgaacaagagccacagaagcaatcagtaagattaattcatgagatataggtaaatgttgcatgaagaactaaaaaacgggacctagcaaatgacaattcatattatagaatccagaaaaggttacagaagaatgggaaaaaaggcattgaattagattttcaatagagttgatccgttaccttgatggtacgatcagctgaaccagtgcaaaaccattcattgcttgggtcaaacgcaacagatctgacccaacccaagtgtccctggagcacctgtcaaccaaaaaatgcatcaattcataagaacataaagtactctctggacgccaacaaatggcctaagaatacctacacacttaaatgttatatccataagatgcagaaatattacagtaacacagatcttaccctgtaattcttccatggtgcatgccactctggacggggccatctactaggcattctctccattaaagcagcagttgacagatttctgtaacacatagaggggaaatgatggacaaataatgaataactgaagcattgatacaagttagatgcatttcaggttaaataaatatggccaaatttaaatttcatgactctgaaccaccaattcaccttagtgcggctttatgtaccacctaggtatcgcaatctagatgtagtgtcgttatagagagtccataaaagtagataaggatgcgacacaaacctttcggaaaatgatccagatgcaggaagaatggccgtgcttttgcctggattaccagtattgttccttcaattcaagaatcaataattatcagtatcaatcagcacgataagtagagcatcaatcacaaagacaaaacaggaataacattcttgagaatgtcgtaaattatttatactaactatatggactagtcacattccaaatgaaaatgtatactcacaagtctcttggcggtaaagttggaccaacaactaaagctttctctgttgcgctttttcgaagttccttggacccttttggacctgcgaaaaaaataatttggtctttcagaacgagaaacaatagtcatgaaaaaggctaaaagattacactaacagcgtttt

SEQ ID NO: 5996 - DNA, 1942 bp, Arabidopsis thaliana landsberg
ctgagctcgagaagacccgtttgaacagtgcatgtttcattgagaccattccgttggatccagtgccaccagtagccaaagctgcctactccagaacatcaactgattctccaagcagaaactatagagagtcacaaccaatgggttctccggttcaagccagacccagacgaagataagacttctcttctccattgttactatgctcgaagcgtgttggtgatcatgacaagttatatcttacgatagatacctcaaaacttttaatttcatcactaatcttttttttactgtaaatttacatgcttacaattacattaatcttttctcatgaaatcaatcttgtttgcgttttcagcctcctgtactgtgaatcaatttgatggtttggttaatcaaaatgtctttcctagggttacacacatctaaatatgtcaccaatcactattcataatagagctcgaaatcaatgagtttgaggaagtatataaatctttagagaaaactacaccaaaccagaaaacgaaactaaatccgatcgtaaacggtaagaaagtcacaatacgacgtatgttacactgattctactataacgaggcacccattaccaagattcgaatgctacattcggtttcaatgtttgacaacaaagaaaaacataccacacaattacaaattcaaaagccaagtaatcagaaaaaagtgcttttactcagcgccagatttgttaactcagatcccagtacacaagaacatttaggccgtcctcaaaggcggcgacaccaatatcactccatctcctctcacgaatagaaacggtacagttcgcttcgttgtctgacagaaccaagttacatcagcaggagaagaacatatgattctacactagtctaatgagaagttagcacatcacatttggagcgcaaacaacaaaattcaagtttgagaaactaaacagagttactatattggtaatgaacactctctatgtaaccagcactgttaacttctacatgaatcaagctctccttttaactcaaactaagacatagacaatagatactgtgatagctgaaatattttgaacccaaaaacgtttatctgattactaaagcctacatagattaataaatcttattgagctaagagaattacatacccgaacaatctcttcatatgtctcgtcgtcgatttctatagtcgtaataacctcttcaacatcacccagaatcatattcaaatgctgatcaaaagcctacaccacaaaaacaacaacaaaagtgagagtcttagaatttaacaagattatgaggttttctacgccaattagctcgctgaggctttcgaaactgaaactcaacaaaatgggtccaaattttgatatttgtgaaagtataaaactagtgttaaattcaacgaataaggaattcaaaaaggagctcaaaatcgaaaaagatcacatctggttactggtttctggaatccgagtggttaagaacgtacgtgaagcttgccgcggagttcacggtcagatcggagcttgacatagatcctctcttcgatactcaaccgaatcagatcgagtggctctctaacggtggcgtcttcctcgactgacattttctgattataacttctccgagggttttgaaattgtagtgctctcggcgatatctctctgactgagctcaagcaatcgccaccgttggttccctaaaaacttcaaaccaaaatcttacgattcggccttttactatgtttttgggctctcatatcggcccaatatggttagctctttttttttttttcgtcgaagtattatgaagataataaatcatctaatgcaaataaatcatggttagtggaacttaactatattaagtccaatcacaaggtatcaattggtcatttcattacactaaatttactataatctttatat

SEQ ID NO: 5997 - DNA, 1282 bp, Arabidopsis thaliana landsberg
  unsure (1)..(1282): unsure at all n locations
cgcaaaagatgcttatcggtttgaaatcatcattatcccctatgcaaatggacaatcctaaatgcatacactatatatacaatcctaaaatgatatgcaatctacatgacactctttttttatgaaatttttttctgaattttttttcaaatttttatggtttttctatgccttagatgatgcaaaatttgaaataagaaaagagaacacaatgttaaacatgtcttgaaccctcccccaaacttaaattacacagtcccttgtgtaataaaaatctgaaagagaattcaagatcaaaacacaaaacacacaaagaaaaataaaaagatgctatggtatatacaatggagaggtggtgttacctcagttttcaggttaagtaggagggagacaaaatcgtccatactctcctttgtgtaactccaaggaacgagttgtgctgaacttggattagctggatgctcgaccctttgctcgggttgttgatcgagtggctcctcaagtggtgcagtagagtggcttgctcaagcgtcttatttccttgttcttcttcgctttttcaacgtgctcctctttgccttggtagtgaaggagcagcatggtgttcccttggttcatatgaagactgtcttgatggtgaggggggatcgaaatgcataggttcgtggtgagtggatccgcttgtcccaaagggcatgttctacggcattgctgtagttgaggaagaacaactgatcttgagttggagatttttaaacttcttgttgactgccgcgagagccttgtcgtggaatttacaccagcctttagaagaaaccaaggcgcttgtgaacttcctttgagtctttactttgcctcggtgtggagtactcctcaaagtaaaactgtcgtgttgcgtaagacttgttcataggttctgcctcattatctgaatgacggattggggcctcatcatcattcactccttccatcggtacaactttatcacctaaagtatagaggttctccattggtgggcagaactcaatgttgccaccatctattatcgaagtggaanangnatttgggaggagaaaaatagattgtcctgttgtggggtgatcgaacctatacattatataggccattcttctcctgagacccaaaaactcttggaattgataaggtgttgcatatcaatccatcttgcaggaataggctttgaatacagaggtacactgcatgctctcagaattggagtcacaactagaactgtactgtctgatgctaagccaagcagctc

SEQ ID NO: 5998 - DNA, 2291 bp, Arabidopsis thaliana landsberg
gactaattcgcaatagttacggaatctacaaattgttccaaaatttttttttttttatggaggatattaaatagagcggctgctatggaagatccacttaggaagattaatactgcagatggatgtctaatgtgtggctaagaaaaagaaacaatcaattatataatgttatgactgactttaggctaccacaaatctgggctctttctctgattccctctccttcgaatggttttagaacttcaatttttacaaatatgtgttatatgcttgatatgtgaaagaatccatgtttgcctcctcatataaaagatattagcccttgggtcctatgggctctatggaaaaacataaacaagaacctctttaagggtgcatgcttagtgagtataattaccaaagtgtatgaagactgtcatgagtgatttttgattcaacaaaatttggggctatctttcaaaccggatggtacatgtctgtaaaaatggagtcctctgaaacatggggatttaaagtgcaacattggttttgcttggtccaagcaacaacatatttcaggagcttcttgggtagtaaggaattctcatggctctgtcttactacatagtagacgatcctttactcaagtatactcgatatttgatgctaaattcagaagttgtgaatgggctttactttctataaaatgagcattatttgcagaatgttacttttggatttttatcatctaaattcatccaagatttgcataaaccaaaggaatggcctgcgttaatatgtcacattgctgaattgttaagtttcactaacgataaacctcactagtatcttttggtagacccgcctcaatgcaataggggtgcttttcaaattgctaatagtgcttatctgtcttatgtggctcggggagctccacgttgaatgaaattgtttttttatgaagaaatgagttttacacaaggaggttaggaatagatttttgtttttgtcgtttatagttttagagatcaagtttagttttagaaatctatcttttgaaatcattactcttaattggctaaataagatttgttgttttctattaatgtttataacttaatcgtctctttttacgatttttcctctgttcaatattttctagttttatccttctttgactgagatttttattctctttttgtttttagttgagtcttataggtttatttcctttacgcttttactatatatatgcgttgtcttaagtttggtttagtatcacaacctcctttttgtttcacctctttcttttcgtcatcatggtggatgagctatgggatgagttacaacaataagagttaggaagggaagatccagctctgttttttccgcatgcagcttatgcaactgttaaatcttggaataggcttagcttgattgctaggcctcttaatctttgctctcaaaacctcaacgttgtgattgctgctttaccaagatcatggggtctgacttctagagtttatgaaagagtgctttatacaacttttgttcaatttctctttcagtctgaggttgatcttttgtttgtgctaagatgggaaccatggttttataacacttggtttgtctcggcttagagatgggagataaatcttgcttttgagttcttgtctaatattgacttgtgggtgcaaatgcgtgggattcctcttctctatatatgtgaagaaactgtggtggaaatagctcaaggtttaggcgagattatctctttggattttcatgatgatactgctactcaaatagcatatattagagtgagaatccgatttgatataggttcatccaaagaatcacttttgattttagtgagactacccttataagttttcaatatgagaggctaagaagaatctgcagcagttgcttcaggcttactcatcacagaaatttctgccttatcgtcagcctcaacctctgcctctttttcgtggtcataccaacaatcttacaaggaatagaaaagaagatatgtgtgcacgtgatgaatatcaccgatcatctttgaactctcagtcgcatatgtttgaaaactcatttcatacgcctatagaaccctccaagggttgcagctccttctttgaatcatgaagaattggtggctgcttattttcctcatgcaagagctgcttctttaccaaataatgcagtaatggatcatcagacttcctctagcagacaattggtgtcaaggaattctaacatccaactgttttctggaaatgttattgcatcaaatgctccttgtc

SEQ ID NO: 5999 - DNA, 681 bp, Arabidopsis thaliana landsberg
gaagtcaggtcttgagacagtcatgaacttaatccacaccacatcgtctccattatccccgttaccaatttccttctctgtcacccaaatgttaatctcgcctgttcttttgctttgttgtaacactgaaaacctatctcccttgtaaatcgagaggatacgagtattggaagtacttttattcgccttacacggtagaatacaaaagatctttattacctctttcgaaagatcgagcatttcgatgaaacactgaccagtgtcgggatatttgtaacctgtccaatacaaatttccattcagggagacactagaactaccgtcgtgtgatcctaactcttcgtgagatctgggacaatgagtaaccttccacgcgttggttgcaagttccaagactgcaactctatagatcgcattagtaaagcaccgtccaataatcttgtaactcttttcgggtttagtaccatcgtaacccatgctcttgccacatatttgctcatcctttgcaatcaatttagtcgttctcaacaacgggttctaaaccatgcctcctacatcaaagtcttccatgaagaagttaccatcgcatatcccatacacatgatattgataacgttgacggagtaaaacaaagcgtaaatctctcacttttatagttggatcttctttgaggttgtcgtt

SEQ ID NO: 6000 - DNA, 730 bp, Arabidopsis thaliana landsberg
aaatatccaagaaagaaaaacgaagagaagtttacctatttatatgttcatgaaaaggaaggagccatttctctagatgttgttttagtttgagagaaagaaaatgatgatataaaccagagtaagagatggttgagacttagaaaacaaaccattatatagagtgaagagaaagattggtaacgaataaaaacgaactccaataaataaataaaccaagaaatccataattgaaaatcaaacttgtaaaatttcttcttctttgttcactagcttcagcaaaagtctctcaaggaatggcgatcaaactgggaacataggcacaggattggaacgtacatacaacttcatctatcttaatctttttgcacagatctcccctcacaatatagacccaagcttgtttaggtttcttggtagaaaaacataaaacgaagctcttcccagagatactatcatcgacgaagtaacttgtagaattatgacaaagtaccatggggaagttaggtattgagacagtcatgaacttaatccacacaacatcgtttccatcatccccattaccaattttattctttgtcacccaaatctcaatctcccttgttcttttgcattggtccatcactgaaaaccgatctcctttgtaaatagagaggatacgagtatgagtagtacttttcttcgccttacatggtagaaaacagaacatttttaatgtctctttggaaaa

SEQ ID NO: 6001 - DNA, 4897 bp, Arabidopsis thaliana landsberg
  unsure (1)..(4897): unsure at all n locations
aatatttttctttatttggcaggcgaaagtgtttcactatggatcaataagtttgattacagagccatgtagatcagctcacatgaaggcgatggaggtggcgaaagaagctggagctcttctttcctacgatccaaacctcagggaacctctgtggccatcccctgaagaagctaggaaacagatcatgagtatctgggacaaggctgacattattaaggtcagtgacgtctagcttgagttcttgacaggaaacaaaacgattgatgatgagacagctatgtctctgtggcatcctaatttgaagctcttgcttgttacacttggcgaaaatggatgtcgttactacactaaggtaatgtacaacaaacattcatgtggattcatcatcatcatgatgatcttggtgtgtgattttgattgatgttctcttgactcttgtgtaggatttccatggatctgttgaaactttccatgttgacgctgtggatactactggagctggtgattcttttgtnnnnnnnnnnnnnnnnnnnnnnnnnnnnnnnnnnnnnnnnnnngaggttaactcccattgatattgtgtgtctattcaatcaactgaatattgttgatgatatttactgatttttctcgtttcttaggaggaagagagtccattgcccatcgcataaaggggtacggtgcgactccggcttgtagcagttccgtgggttgatgaatggtaggcgcgtgtctttgacactgttcacacttggccgtgaaggtcttgcagtcagaaatcattgttggccagtaaaatcctaactttttgagcttaagtgcgagagctcgtcctccggagtggtttccggctgctccctcgtgagtttccttcattatttcattgatctcggttccgtggatgcaattcagcattgctccagacgcgctgaccttaaggagatgctccttcatgagggtatacttggccgctttgattcgtagacgccgcgctgtccacttatcgcttggcaatgttccatcggagaggtaatcgcgaatttctactcgtcaatcggtcggatccgctgggtcgggggcattcgagcttcggatggtatttacgatttccacggcgtcggtcgaatcgatacttgggttatcaatactttccaccgggatgattcgtcgcaaatcgggttcggaagttgacgctaaggcggcgagcgcatctgccggcgcgttgtcacctcggggaatttttgagagtttgaagttttcgaaatctttcgtcatcagttggacgatcttgagataggcgtctattttctcgttctttgcttcgtactccccactgagctgcccaacgataagttgcgagtcggtgaatgcgtggatcgtggttatctgcatccccgcggcgaggcggagcccggcaattagggcctcgtactcggccatgttgtttgttgcgacgaatcggagacgaaaggactgttctagcacctcgccggttggggagacgaggcgaattcctatccccgatccgcgagctgaagatgaaccgtccacgtacagactccattcttcaccgcggtttccactgaccgcacgttctgctgattgtaacggtagttcgatgaggaagtcagccaggaccagtgatttcattgctgggcgcggtcgaaaatcgatgtcgtattcgcttaactccacagcccactttgtcatccgtcccgactgacttgggctgtgtagggcgactcttagaggttgatcggtcaggacggctatggtatgtgattggaagtatggtggcagttttcgtgccgacgtgacaactgccagcgcggctttttctattaccgggtatcgtgtttcggcttcgactagtgatttgctcgtatagaagatcggccgttgctcgcctcggtcttctcgtactagtacgctacttactgcgtgacccgatactgcgatatagagatacaaagtttcaccgacctcgggctttactaggatcggtggtatggaaaggtagtcctttagcttttcgaaagcttcctcgctatccttatcccaatcgaattgggcccgacgcttgagcaggttgtagaacggtaggcacttgtccgttgatcgtgagatgaatcgattgagggcggcaattcgccctgtgagcctttgcacttgtcgggcgttccgtggtgatggtagttcgaggatagcgcggatttgttttgggtttgcttctattcctcttttagtgacgacatacccaagaaactctcccgatgttactccgaaggtacacttggttggatttagcttcattccgtaagtattgaggacgtcgaagcatttgctcagatgctcgacatggtcttcgggcttcaatgactttacgagcatgtcgtcgatgtacacctcgacggttctcccggtctggtcggctaacattttatcgacgaaccgctggtatgttgccccggcgtttttaagcctgaagggcatcaccttgtaacaatacgtgccgcggtcggtaacgaatgatatcttttcttgatcgtccttgtgcatcaagatctcgttgtagcctgagaaagcgtccatgaaggagaggagaccattccctgaagttgcttcgacgagccggtcgatgtgcggcagtggataactatcctttgggcaggctctgttgaggtcagtataatcgacacagacgcgccacttcccgttcttctttttgacgacgacgggatttgctagccattcagggtatttcacctcgatgatttgccccgccttaaggagtttttccacctcttcattcactgctcgtgcacgctccgggccgagcttccttcgtttctgttttaccggcttgaaagttggatctacgttaagttcgtgtgcggtgattgccgggtcgattcccttcatatcttcgatgctccatgcgaaggttttagaatttcgtttaagtagtgcaatcagttcgagccgaattaactgtgaaatctttgccccgacaccaaccaccttgtcgggtcggattcatctatgtttaccatctcggtgcggcacaactcggactcctcgtaagacctgctcggggtcttggcttccttcggcgctggagcggttaacttctataatttcttagcggttcgatttttgtgctcaatgaggaagcacgttctggcgacctgttggttacctcggagagtgaagatgccgttgtgcgttgggaacttaacgcactgatgataagtggacaggatggcttgcatttggtgaatccagggggtgccgaggataacgttgtagaccgctggtttgtcaatcacgacgaacttcacccaggcgaataatcctccgacaaagattggcaatttaatcgtgcctattgtcatgacgaaatctccgtcaaaaccggcgagaggtttggagactggcttaatctgacgatccgtaatgttcatcgcggttaaaacatctttgaaaatcacgtctaccgagcttccggtgtcaatcagaacccttgtgactctgctatcgcttatgatcaactcgacaacgagcgggtcgttgtgcagggtatccaaaccttctaggtcggcgtcggtgaatgagatcggagcgctttagttcggatttcttgtcgtgcttgtggatgagggcaagctaccaccatctcggctttctttcggtattgcttaattgagcgcactgaatcgctgcaattctggagtcctcccattatcacgtgaacttgtctaaccacgactggttccgcggcgatagcttttccgcttcgctgtcttttggctaccgggtcgtcagccgaggtagttatcccttgttctgctcgggtcagtggcttggcttgatcgttcaaatattgtcgggccgtagtttcgttacgtcgttgatttttgttatttatcacgggtcggtcgcactcgattgctattccaccgctcttatacttggccatcaggaggccctgcaggaaacggcaattctcggtcgaatgcgctctgcttttgtggtattcccagtacatcggccctgctgctggggaatcggtgtcgcgaatatatttgttccaaggtttaacgtcgggagttttggtgcttactaagaaagaagttggcttccggcccgcactgggattgcgatcgaggtgctgtcgcggctcgtttgattcgtcagctccgaccttaataaccactgcgtctttacatgcgggggttttggtcgagctgtgttttcttgccagaatgagcttctcctcttcaagttcgatgaatctggatgcccgatgcagggcgtcctctagggtgctcggggcgtgcaacgttatgtcgtcccggaatctggagtcgtaccatactgcatttcgtagcgcaactattgcagcttcgtcgggcacagtgatatttgtgactaccagtttgaaacgatcaacaaaagatcgaagtgattctttagctccctgagagatggaccataggtcggcgttcgatgtttgatttttgattagaggcgcgtaatgtttgaggaaggacgaggtgagctgatggaagctgtcgatggaattgggttttagacgtgaaaaccagttgagagctggtccggtcagatgttcgatgaatatttgacacctcccggcatcgaagttgtcgatcgtgagctcggcccggtttatggcgacgttgaacgatgttaggaactctttcggatcgcttctaccgttataactttccagcttgattttttgggcgcctctgatcgagacgctagttattcgtcgagtaaagggggtttgctgagtctcctccagaacgcggtcgagctcgggcgttgtgcttgttgcgcggtggatttggagctcatttcagatatagct

SEQ ID NO: 6002 - DNA, 3561 bp, Arabidopsis thaliana landsberg
tgagtgcttctttcatgttggcctccttgaaatgtgcatcaatcaaagctgtgtaggtcacaacatcaggaactatacctttgatggtcatctcgaagtacaagcccattgcagcttttatgtctctcacattgcagtaaccatcgatcaaagtagaaaaggttatgatgttgggttctacaccacttgctgtcatctcagagcacaaatccagagcttgctccatattgtattctttacaatacccatgaatcagcgagttgtaagtcgcagagctcggaaaaattctctcattcttcatcttctgaaataatcgatttgcttctgctacctgatcttcaatacatagcccgttgataagtatagtgtaagtgaatacatcaggcgaaagattcaaactttccatctcagaaagtaatcccactgcttccaacatgttccctgatttgcaatgtccatgaattaaacagttataaacatataaattaggatcaaccccaaacttcaccatatgcacgaaaaggctcctcgcagttaccaattcgcgagctttgcaaaatccatcgaccaatgtaccgaaaacaacaacatttggcagcaattcagcaacaagaatctccttatacaatccgtaagcttgtctcacgttaccggtcttgcagtaaccatcaatcattgcactgtaagtatacaagtttggaagaacaccatgtttcttcatcaactcgaacattttctccgcttcctccatcttattatccctacagagatcaaggatatatatggtatagatataaacattcggcttgatccctaacgacgtcatttcatcaagaagtttctctttcttggagtaaagaccttgcttgaaacagcattgaaacaaaacaaagtaaatgtggacatcagggaccaacccacgagagatcataagttggtaatcaacccaaactgaatcaaaccgtctccttctaaccaagccattcaaaatcgaaagacaagcttttgaatccggtgaacatttcatctctcgactcacccaaagagcttcttcaaacaaacccatctccagaaactccataatcaatagactaaacactccgatactgaattttggactctgaatatcttccagagcattgaaaagtctatgagacatgttactcggctcactgtggcgtttcagacgttctatgaggctttttatcaaacatctggcgagcgtatacttgtgagctccggttaaaacatgaatcactgccgaaaaagattaaagatcgtttgacttggagactcgagatctcgaagacgtttcgaacagcttgaacgcttcttccgctgatctgcatttcagtattgcttcagccagactcgaagaagagaaagaagatgccgaatttgacagagaaggagattgagataagaatctaaagttgaaaaattgaaacttgaacaagtaaactgatgttctatgttggggaagcagaagcttcaacatctggagaggagattgtacgaatctactggtcaaaactgaaaactacgttactcttcttcgtgtaaatggtacagtactctcattggtttattattccggttaatattggtttattagataattcttataaccaaaattaatcttcgtaatctatgttcgttatagatgttaatgatgttaatgatatagactacagaagtaatttgaagccacatgaggaggttaaaacagagtgaaaataagtaatttggtgcattttggtatgtaagaaaagtagccaaaattgttaaactcagtcaataagtcaagggactttgattacagacgaaggaagtagcatctaatctaaggggcgatccggcgatgcactaaaaagtaaaaacaacacaatgtacttagttctgtacttatgttataaaatttgattgtttgaccagtaatatattttcccttgatttgagagaaagaatcttttttacatgtaaaacgaatctaaaccaaaacaataatatagaaattcctgaggaaaccgactgagaaagagaagccaaatttagaagatggccttttcctagcaaattgggcaaaggaaacccaccttaccaagttatcttcatacttcatataaatctctgctcattttcgataaaaagttgaatccttttcacattttccgctcaattcgatcttacatgttaacaatggttggtctaactccagctgaggatcgttcagagattgcctttttcgacgtcgagacgacaattccgttccgagttggtcaggggtacgcgattctggagtttggatcgattctggtttgccccaagaagcttgtggagctgaaaaactactctgttctggttcgtcctgctaatctcaacctcatcacgcctcggtccgtgaagtgcaacggcatcaaacgcgaagacgtcgaatcagctcttacctttgcagatatcgccgacaccgtctacgatattctccatggtaagatacagaagaaactctcttcttttcaagaattttgggacacaattcgagctcaaagttgttaactttggagcctgttttgttcaagtgtgttgatgttgtggtttaatggttattgtaggaaggatatgggcaggtcataacatattgaagttcgattgtccaaggataagagaagcatttgctgagattggacgagatccaccagagccaaagggcaccattgactccttggctttgcttactcaaaggtttgggagaagagctggtgatatgaaggtaacaattttgctctctggtcctgacttgtttattgttttgagatggtttcttctcgtatactcaaagagtcatgattgatattcatctgtgtattttgaatttgcttgatggaattcgaatttggcggttttgatggttccttattctgttttcctgtggcctttgtttgaacagatggcgactttggctacatactttggacttggaaaccagacgcataggtaatttatatatgtgagtttttttgcattacggtgttttaataggccggttgagttctaatgctttgtacactatgtttatttctatctcttaaggagtctggacgatgtaaggatgaacttcgaggttctcaagtattgtgccactgttttgttcttggtatgctctctttacttcttcgagatggattatcgtgtgttgtgtgtacctgtcgctctgtagaatagattttagtgatgtaactatgaggagctaattcagaaacatgccatttttcaacaggagtcaagtcttccagatgaacttatagagaactcggttactactactactcctgaaactagttcaagaaggcgtaggactataaaaaaatctcctctgcaatctcccactgatcagcagacaggagagaacatgacaactatacctattttatcatttgtttcatccgcagaagctcaaacggatccatttgatatgagcactttgaggaacgaaatagcccctgaagttcttcaatcagatgttcccatggaagaagaacaaaatcagcagtctgagacagt

SEQ ID NO: 6003 - DNA, 563 bp, Arabidopsis thaliana landsberg
acttttttgagtcttacgcattacatcctcagtgtgaaagcggtgcccattaatgacttttcctttataggactgagctatatgccttggtccatgagccaactatgtcaacttagttgaatgctcgtgggaattactaggtatctaatgacacatcagtaaaaaataccaagttagacttatgcatttctaactaagttagtatctgattcaatacatagaaaaataaaattatcaataaccttgttcttttatccacaatgagaatctggctgtgtgaaatttccacagaagagtctcattttttccacatcggatatcattagcttgcaattcttccatatgcatcctaacaatcaaaagatatcaagttaatttcatatacttcacaatcgatttagtaaaagttctcaaaggtgaacttactctacatatggattcatcactgccatgttcattaaaacatatcgatgggctatctctcgttcattatcagtaagaataacttgcctacctttttgcaatggtttgccttcaagaatggttgcagataactcaacatc

SEQ ID NO: 6004 - DNA, 1825 bp, Arabidopsis thaliana landsberg
gtggtatttgtcctaagagtgtgcatggtgggacgagtttctgtgtagctcacggtggtggtattgagatgtgttgtggccgggtgcactaagagcgctcgtgggaggactgattgttgcgtgaagcacggtggtgggaaacggtgtaagtctgatggttgtgagaagagtgcgcaaggtagcactgatttctgtaaggcacatggtggtgggaaacgttgctcatggggaggagactggaaatgcgagaaattcgctagaggaaagagcggtttatgcgctgcgcataacagtatgtcacaagataaagctggaagcaaggttggtttgattggaccgggacttttccgtggccttgtctctacttctttacaaaccacaacaactgcaactactactactactaccactgatcattctcaatctggagtcagtgcggtctctgattgcacggactccattgatcgcccgctgccaccgttgcatcatcaacccgagaaaagacagaagctgatgataccaatgcaggttcttgtgcctccatcaatgaaatccttaagcttctcaaacaccgagagacccgatatcgaaacaaacaacaatagtagtggcagcaatgggaggaacatatttgactttatgattcctgaggaaagagttcatggtggcgggcttatgtctctgcttaatggtaacatgaaacaaacactccgttgatggaatctgaaagcttcctctctatgtggtaacaacaaggctagagtctgtgtaaagcttcatgtaatatgtatagttttttggttttctttttgtttctctttcactcttgggtcctttgtacatttcatgggtctctgtttttgtatggtctctggtcttgacttgaccatctagtcgatggcttgaacccaagtctttgtttatttgatcattgttatgaatgttgcaatgtacaagtaaaatgtgttcttatgttttgtaccaaaaaaaaacagagcttactgggtcgaatcagcatttccggttaaataacttttggtttaattcgccttgaccggtttaatggaaggtcaaagaaacagcgtcaaagtcaacaaacagaaacaaccaaaccaagtcatcaaatggataacggaatctttccgccgttatattttccgttagccctatatatacaccgaggcggttaacaaacatttcgtctctttgaaactaattttttccctcttctctctctctttggccgtggagatttttctgagcaagcttcgtgatgctatcgaaccagaggaagacgaattagcttctcgatcacgattattttaggtatgtgattatgatttaagttccgatttcgagctttaggtttagctctatcgcgattgaatctgtgtttttttcccgttcccgattcctctacaaccctaggttttgatcagaaatttcggttcttcttcttcgttttctacttcaatcgttctcgcttttgatttcttcaagttctgatgatgattatcggtaaatttcaaccttggatctttggtagattttgctgttgtctcgtgaatattcatcgccagttttggcgggaaaatgtttctgcggtggtttgtttttgattgaatctgaaacttactattgtgttgtgctctcgattacattcttcagatcttatcggaaagctttatcggcagatagaaagagtgaatcagtcgagacttctctggtgatttgttattctctttgtggtatttggtgattgctaatcctctggtgatgttgattcaaaaaagcctcattttgaagtttggtgattcaaggatcc

SEQ ID NO: 6005 - DNA, 1616 bp, Arabidopsis thaliana landsberg
agggacccaatgctacaacttctagttacttatctgcattttagtagattggaaggaacccaatattcttgtatttctttttgtgcaatgatatagaaaaacttgcttactgagatggaaacggttacaaatataatgagagaagttgaactaaaggagaaagatgcagagaagtcaaaggaggaagctgctaggggaggtttagatactcttcaaaaggttgaggagctcaagaagatgctggaacatgcgaaggaagcaaatgacatggtaacaagattgttacctgtaatgggctaattcattttgctttaggttcttgattttgtaattagaactaatttaccatgattttgcagcatgctggagaagtatatggagagaagtcaattttggccactgaagtaaaagagcttgaaaaccggttgctcaacttatcagaagaaagaaacaaatctcttgctatccttgatgaggcatgtttctgtctgctgattatgaagacttgtttttttttttcctcctgttaaaacgaaactgagatgtctacctctgtttcacactgtacagagatttgtctaattgtgtttctttgtagatgcgaggaagtctcgaaataagactagcagcagcactggagttgaaaaagactgctgagaaagaaaagaaagacaaagaagattctgcacttaaggcacttgctgagcaagaagccaacatggagaaagtggtccaagaatcgaagcttctacagcaggaggcagaggaaaattccaaggtactatcactgtaacaaacactagcgatgagtttcctctaaactcaaaattcttctcaatctcatatctttttttcttcgtcttctcggcccgcagcttcgagattttcttatggatcgtggtcagattgttgataccttacagcaagtcccattctcgtcccactaaccgtacattggtccattttttataacagcaatgaatcatttagcaaattttttctgcggatattcataatgatcggccatattaaatggaatttttaacctctcttggttctttgcgcagaggagaaatttctgtgatctgtcaagatgtgaagctgttgaaagaaaaatttgaaaaccgagtgcctttaaccaaatcgatctcctcaagcttcactagttcatgcggatcatctatgaaaagcttggtgctcgagaacccttctgagcgattgaatggagtgactgaaacctcaaacaacaacaagttcccagaagcagcagctttcttcatgaacaaagagaaagatgattgtagagatcttcttgaagatggatgggacatctttgacaaggagaccgaacaagttgtttggtactgaagaatgaagttattgtacatatagggttcttaaatgctaaaaataaatggattggtttcctactcttttagaccaaaacttggattgggatttatatgtggttctagctttatttaacttatggattttctcagtctttttgtggttgtttgacaaagccaatgttttaagaaattttttagtaaaagggacgttaaatgatccataaacctgaaagattattctaatctcttcgagagatggttcaa

SEQ ID NO: 6006 - DNA, 1557 bp, Arabidopsis thaliana landsberg
ccacaaagaggtggttaaaaacaccaaaccaaacaataagcaaactatacactgagaagaaaaataaaagagagctcaatagatgttttatactaacggtagattagatcaaagatccaagctttactctacatagagcagaacccagaatcccttcatatctcttttattctagcaccgataatctactgtaaagaagacacttagagctctgtctctttgtcaaagaagtcccagccgtcatccagaagctccttacgttcattaacagaagcttttgggctcttgttattgctcgaggcttcaggtgtttcataagatgcttccaaaggcttctccgtcaataagctcttcatggatgaggcggaagaagccagtttacagctagtctggcttgaggagattgattggctcaatggcactcggttgtcgaatttctctttcaagtgtcggatgtcttgacagatcacagagatttctcctctgttcaaggaagtaccaagagggtaaaagaatagttaagatcaatagcagacaagattcaccataagattctgaacatttaaacaacaaatatatcaacagattcttgattatcatacaactgcgaagaaaattgctaaattggttcgtgggtccgatcatttactccatagttcacagcctcttatcctaatgattcacgaggagataaatgtgaattgctagtagcaaggaagaagacttactgtaaggaatcaacaattcgaccatgatccataaggaactctcgcagctgaagaaagagatcaagataagttaagaagttgtgaaatcagattcagaaccattcattcatgacaatctcaaggtagtgttgttaccttggagttttcctctgcctcctgctgtagaagcttggattcttggacaactctctccatgatcgcttcttgttcagcaaatgccttgcgtgcagacccttctttttcctgtttttcttgctcagcagcattttttatccccaaagctgtcgctagtcttatttcaagatctacacgcatctaaaagtaaaaacaaaagaaacacaatcagcaaaatcttacagtgtgaaacaacagatattagtagcgtgtattgttaaaggttaatggagctgcaaatgaacaaaacagaaatactgagtaaatcaagtaggatctaatcgtgtggcctgcacggacctcatcaagaacagagagagagttgtctcgttcttctgataagctgatcaagcgattttcaagctcattaacttcagtggtcaaaattgacctctccccataaacttctccagcagcctgtaacatacaaatgattagttccccaattaaaacctaaccacagttaacacacgtatcagtaaaatattagtaacaaaaagtcaccatgtcatttgcctccttcgcatgttccagcatcttcttcagctcctcccccttgtcaagagtatcaaagcctcctatactagcatcttcctttgccttttctgcctccttctcttgaagttcaacttctctcatcagattcataatcgac

SEQ ID NO: 6007 - DNA, 3204 bp, Arabidopsis thaliana landsberg
tcataagagaacaaactagacacccctgtgaagagggaaagaaccccaataccatgcttgggaaacatattgcaggtttaaaaatcaataccatgatggggaaacatatcgcgagttcaatcatccgaaaaagcaatcaaatgattcaaggttacgtattggggtttaaaaattattaccatgcttatcttgccttgcatcaaagagaaatcccaagcaatatacgaattttcagattccaccatcaatgagatctagataaacaaaaagaacatgcatcaatacttacgccagactcaaacgaaagtgcttatcatatgctttcgtttttttgccagcagaaaatctgaatgctacatactacagtcatcaacatcacttttcacgtttttgaacatgacaatttcagatggaacaagtgtcaagagtcttagaatggcaataagtttcagtttcattaataaccaaaagcatctacggagaacatattacctcataggttctcccagcttgaacgattatctccttgtactcctcattgtccctaagaagtataaacacttagagctagaaatcgtgaattgaagtgagaatcttgtgaatgatggaagctaaccttgaccacaatatgccagctgtatcagctgaaataaagaagggggaattggcgaatacatcgctgaaaaagtaaaatgttaatgaccctccatagtgagaaagcaatacctaaagacgtccagcataattaaggttggaactggggatataaattttaatcaaaaccgaataaagctgaaaattaacacaaaaataatgaattcgagataatgtctaacactttattagatttgtctctaataacgcatgcctttgcaatttgcatactaggaaaactaataaaagaatacaatggagaacaaaccttaaaatagacataaacgtaattgtccttaactttccaaggaatgtttcaaaagttaagtacatcatatactcaaaagaaaataaagcaacccacgaccaagcccatagaaagagagaaagtacctgataaatgtgacgaatctttcaaactcagaagtgtagactatagcagcttcagacaggagattcatttggtctttactcctgctcatcacacacataataaaatttcactacctctaaatgaaaaagttcatggagcacttcaacctcgctgattattattgacttgtggtaatttaaggcaatcttactttaacaacaataaaccaaaagatggaaaatattcttggactatcttacagtttgaaggtatcatatctttcccacagaagtgttaggaaaacccgaattgcgatcaccatttttgtgagactgtatagagggggtccataacgttctcgctgttcttccattggcctttacattagaacattaattctgtcagttaaagattcatatgcaacctgaaccttctggcaaacactcattgtgtaatataaatgagaccatggtacatacccatcatcatcgtttatttgtcgaataaaatccaacaacacctacaaggtatgagcgaagaagaatcatgaggactattggcggataagaataagaaaattagccataaagacacggtggaagatgaagagctttgccagaaagagtagagacgggtaagcctacctgtggaacccctaccaagtacttgaccagggttttgtagacaccagtggcagagcctagctgagccaactgcctcctcctaaagaaaggtcaatggatgcataagccagactctctgaagaaaatcacaagcaaagcagcaattaagaaatcagaaacaaccaggctctctcacctctccatttgctgcttccaaagaagagcatatgtgtcgcgtatgctccctccagagctgaccaacgcatcaacctccgcctgtttgttcctctccgacctctccttctgctgtctgatgagcgttccccggaaatcttgaggcatgtaggtcattactgcagaaaaaggtaaataacactcgtgtggtaataaattctatgtataccaacagtgtctgcttagaatttatacctgtgctgaatatgcgctcggaattcttcgtctggaaggaaatcatagcagtgaatgcgttatcaaaactgtccttgagagtccgcaaaatagaagcgaattcagcatcttcggatgtggaaggttcccgaagctgcccaaaacaaagagagaattcaagtcaccagaagcaggcgaagtagaggcaacatggacacaaaacgatactaagattcacctgaacaggccagcgagatggtgacagaagaaacagtatctcctccatctgctccctatttttccacatattctcatcaattttgtgagggggctgacggtttgcttcgtcaatcagggaagtttcccctataaaacgacgaaccataaacaaatttttattagtgaatgaattcaaaagcagaagctataaataaataggtggatcggaaaccttgtgaagggggagattggacggtcaatagcttaatcagagatgccatgtcagaggaaagccgagaaacgtcgtcggaaagaggagagaaaggatatttgtcgtagtaagaagcgagaaaagcccgggtgataggcataaggccttccgttgacgccattttcagattctttgcgcgatctactcactcacacacaaatccagagctccatgccaccgccaagccaagcaaattctctctctgccggcgaagaagaagacttattgattatgatcgacgaaaaatgttggacgacgactaggccgcatattcgctcttcccaaaaggcttatacaatacccactgggcctttattcaagcccactggtcctttattcaagcccactgagcctttatttactatcgtcgtctttgtttaatgttttgtgaaattatgatgatgaatcgaagagtgcacagaaaatctgtgaatctagttttttttttttttttttttttggtacaaggttaaattttataccattttctgaatctagtttatagcatcatgttggtagaagcaaaaatacagtcaaatggagcaagaattacaatggcatgacttgggaacaaaggcacaaacgccaaatggcttgttgggaagctggcaattgatgccgaaacagcaaggcatggtggcacaagtggtggagga

SEQ ID NO: 6008 - DNA, 473 bp, Arabidopsis thaliana landsberg
  unsure (1)..(473): unsure at all n locations
aaaaccagagctccatgccaccgccaagccaagcatattctctatctgttggcgaagaataagactgatcgattatgatggacaaagaatgttggacgacgactatgccgcatatgcgctcttccgaaaaggctcatacaatacccactgcgccttgattcaagcccactggaccttcattcaagcccactgagcctttattgactatcgccggatccgtcaatgtcttggaaaagatgaagatgaatcgaagagtgcacagaaaatctgtgattctagtggcttcagatatcaattaaatggnaccaggttgaagcatatcccatgacctggatctagtgatctagcagtgtgtgtgagagaaacacaattacttgacagatggctctagaattacattggcatgacttgggaactaaagcacaaacgcccatggcttgacgggaacctggcggctggtgcctatacagctc

SEQ ID NO: 6009 - DNA, 2499 bp, Arabidopsis thaliana landsberg
caggtggctactttctccagccggtttaagtccattcctagtatagtcgagttcgacagctttaaggtgtctggtgatgtctggtttggctcttccattgttctcaaggtatatatgtaaattgttcattagttcacaaggtggtgttgatatttatatatgctcagaatggtttcttttggatttaaagggcaaggtgactgtggcggcaaaatccggtgtgaagcttgaaattccggacagggccgtggtcgagaacaaggtaatgtaacgaatcatggttatgttcaaactccggatgttttatttttcgccacaattatggttgaccgtttgattatatgttgaaaaactaataaatttatcactcaaacttgaaatttggttttaagcggttatgatcttggttcaggattttcagagtaatcaccaaaatgaaaattaggattgaatttgaggttttatcttttcggctaaaccgaattggcattctacatctttagtttaaacctaaattattttgaattaaaacttaccattgtgttttttttacagaacatcaatggtacagaagacctctgaataaaacaaattcaagtcttcttccctctctcatggaagacacatcttgatactcctttaattggtgtgaaaagatcacaagtggcacagcaaagcaagtttatgaagaaagaataaataatgtttctttttctttttgcagcttagcaaagtcttttcctctttggactttattttaattttgctctttgaattttcccaaaacatcacatttatatgttcgattatatttgggttctatccacaatcatttttctttttgataatccactctttctttccacatgctctttgcttggaaactgatggagtactagtttattacatttatgtcgtctactaatttagattatgtcactgatattcatacagtgtgacatgtttattttcggttttcgtccgtttgatttgtagaattaagttggggactaattcgtatactaatgaagggaactaacacaactactacttatgaaggaaaatgcaataatgaatactaataactaagacgaatacaactttaattagagttctcattggctaatttgtagaataatcgcaaattcaagttacttgtgtagaattactacatcaccaagattcttattcaaattaattgtcgcgaaccaaagaaaattattctacaagattcttatgacttatagtatgtaataatttttgcttacgagttttggaaacaaatagatttaattacaaatgtatcattcaaatgaaatagaaaaccacatagtagcctaccaaaaaaaaaaaaaccacatagtaagatattcacatgcatacacgacacatacgtgtattgaatcttattggtaatctaacatcgtagattcttaattgcactttttaattattgtttttaaaattttcctactttttatttaaacatgtcacgatctaaagcatcagatagctgtcggttacttgaaaaagtggaataaaaatattatgtgtcattgagataatgagatgttacgtacgcgtccaatttattatgatctaatacatcttatcagataagctcttctttattttccatctttattcaaatcttgacaccaaaaggaaagaatattttttattcaaatctataactcatagattgcatctccttcttactttgtttgattagattgtattagcctctgtcttgtcttttggttagtataagtattgataaattcctttgaccagcaagatatcatcactaaaagattttacattaccaagccatctccaatatcatcaggtcggttttctctcgatgtcaattggttacgcatgcatctatcatatcttaaagtttattcttctttcattatttttaacccaaatttaatttttatggaacttactaaaacgttgacgatgatcactactgctagtttgttttgaggcatgcattgaaagtactctttgcgatgttcccacataaattacaggtcaagtgatgttgtttctaatcgcggctgtctgtttaatatgcttttacgtctacaagtccgtgaaaccgcgccgccaattccattgccggagaatgtttctgagatatctcaaaataagctcaacgatggcgatatttagcttacaaagaattagggtttcctaaagataaagccaaaaataagattatcattctcatggattcgggagttcaagttagtggatttaaaaatcacacaggtattaataatattaggattaaatgaaatgattacatgcatatattgcaaactagcttctttaaatatcatgataactggagctactatatatgttcctatggctttcaggaaatgatcgacgaattcgagatatactttttgttgttcgatagagctggttatggagaaagcgatcctcatccctcacgaacacttaaaacggatacatatgaca

SEQ ID NO: 6010 - DNA, 3133 bp, Arabidopsis thaliana landsberg
tgatgtcacgagtagagtttcctggggaaaaaatattggtaggacgaatccgcagggggtctcaagaagcgagtgaggcagatcatggagcttttacgcgagttcccaatcggggactatgtcccggctttggcatggatagacaggatcagcggtttcaattctaagattgtgaaagtgagtcgagcgtatagtgatcttatggaaaaagtggtgcaagaacatttagaggcgggcgaacataaagcggatttcgtcaatatactgttatcaatcgaaaaagaaaagaataatggattcaaagttcaaagaaacgacataaaatttatgatcttggtaggatcattataagctaattcattgataactaacctagagttttcaagtttgagtaatgacatgcaacttttcatgacttgatatcaggatatgtttataggaggtatttcaccaagttcacctctactagaatggataatgacggagctgatcagaaatccagagtgtatgaagaaactccaaaacgagattcggtcaaccattaggccacatggttcatacataaaagaaaaagaagttgaaaatatgagatacttaaaagccgtgattaaagaggtgtttcgggtgcatcctcctcttccactaatacttcccagactattaactgaagatgtcaaagtaaagggatatgacatagccgcagggaccgaggtattcaattataacaattgaataattgaccatcatcttattccaatatatataacaaacgatttggctaaacttgtaatggaaacatttccaggtgttaatcaatgcttggtcaatccatagagaccccgcgatatggggaccggatgcagaagaattcaaaccagagagacacttagattcaactttggattatcatggacaagatttgaaatacatcccattcggatcaggtagaagaatttgtcccgggataaatcttgctatgggtttggtagaggttacattggccaaccttgtaggccgatttgactggagtgtcgatcctggaccaaatggggatcaacctgatctagctgaagattttggtctcgatgtttgtcgcaagaaccctctcattgcatttccatcttccgttgcatgaaatgtttcttttaccctattatgaaattcactaataagaagagttttttttttcttcttcttgtgtgtgcaaggaataagaagagttgtaagaaagaaataatccttcaattaataaacatggttttttgttgacatgctttttttctgcttctttatcacccataagtgtaacttacctgtttcgtggcattcaagtaacaaagaaagttgatttcctctgaaaatccctaaagaatgacacgtttccaaattacatgacccaatggcttgaggaggaagaaacaaggactcaaatctctcttttacgaaatcaaatctgtatctacatgagttgattatcattcttattgtaacctagccaataaggagatcctcgcaaacacacacttgacaatggtaatccatagatcccaaaaaaggttttcatcaacaaccttccaagaatcagatttgaatgtatagacttcaagatttgatgaatcttttcttttcttttgataatgatatgatggatctttaattctgacatcacaacaaaaacttaccacttggtaatcataatgacttgatgattggttataaatgtatccaagaccgtccacatccacagaatggtcaatagaccgtcacaatgagaaatattgaccgccaaggaattagcttttgaaaactgcaatatccaaccagatttttcaggtttgtggaaatcaatacccacacaagaaactgtggaactacaacacgcaggggtactaccgcatgaaggacaaacagtctcgatgaaagctgcatactctttcttcgttaaaaagttaaaataacacagtttcaaatgtagtgacaaaacccaacaacaacaagaaaaaccatgacatcattctttgagtcaatctttctttttgtttccatagtcataacctgacctttcttcttcccgcctagagaaaaccgggaaccggaagcaagctcggaacatagtagctttctctgaaccaccaactgaacgatccatagaagagtatttaactttgtgacattcttgatcctctccaacaatgtagatactaatagaccctaagtgatgaatagatagcacaattttaccatgattctcactgaagtatcttgaatacttcggacacatgggaaattcaggtagaccaactgtcattaacctactccaatgcttcttcatcacccacaagtgtatcttacttgttactcgggacttatgtaacaacgaaagtcgatctcctctgaaaacccctaaagaaagagaatctttccactggatcccgatggatgagtgatgaagagactcgaacaaggtctcaaatctctcttttgagaaatcgaaactttgtatcgaaacggtaccgtagatattataacctatccaataaggagttcctcttatacacacacttgacaatggtaatcgaaagaacccatggaaggttttatcaacaacaacaaccttccaacaatcagatttgaaatcgtagatttcaacacttaaattattaggacaccgaaacctaaccattttgtaatcattacaaccacttggtgactcgttactaatgtatccaagaccatatgcatcgatggaatggtcaaactcaaagctatagccacatttgatccatcttgcttctttcaacaacggattggaaactaaaattttggttcccatgaccattagcaatagaccatcacaatgaaacatgttgtgctccaataaatccgaagatgaaagcggtttaaaaacctgaaaatttaaactaggtttgttgttgaaatccataccgatacaagaaattgttgagcacaatggagaaactgtggccggaacgtaattgaagactgtgaatatcggttcaagaccatgcatgtgagacatgtgcttgttgacgaatatcggttctgtgattagagttttccattgcttgcatgtcctataccaaattagtttggagtatgtcctcaaccaaat

SEQ ID NO: 6011 - DNA, 850 bp, Arabidopsis thaliana landsberg
tcccaattctcgtaacccgcaatgatgtctcgttgcatgctttcatattcaccttgtcgtagtgcggattcctgagccgcataaatcaatcactttcgtaagtgcttttatcattaaaaagtatcatcaagttcattatataagaaaaatggtctaaaacaacccaaggttagtctaaattaaactccataaacttttaaaaccaatctctataaaggtaccttaatatatgcgtgttttgtatgcttatccgcgagttctatatcacgctcggtcatagtttctctaggattctgactaaatggggaaaaccatttctgagtcatccaccaatataataaccatggaaagtagtgtgcgactccaagtgtccactgattttgaattggcaatttcttgaacgctgaagtcgacaagtttagaggcagacaactccaccaaaaattcagtatcggaaccaccaacgttgctccacttagtctatacatattgttagagacattaattcacataggtaaagattatatgaactttaatttatatatgcgaaatatattcaaattaatcttataagttcaaaagatataattactaggccaatatgatatgtacgtaaatccatgtgtaaataaatagtatatttgatatatagcttttaatctaagtgataatcacaattaaatctgaccaaaaatgttattcttagattctacttgtaagagattgatatacctatgaggaatgtacttgagacagccgtaaactggataagccccgagtgacattcataggacatggaactttggaccgatttgcaatttgtcagcaagttcttcgatgtcatatgtat

SEQ ID NO: 6012 - DNA, 560 bp, Arabidopsis thaliana landsberg
  unsure (1)..(560): unsure at all n locations
tcattattaattacacattaaaaacactcagatataaaatctggatttagtagtaaaatggatttaattgtaacttaatatatatatgtgacattgaacatatatggtatataatatcaactttcaaatccagtccacacacaaactttgaattaagttttttttttaaccttcaactacaagcggctttaataatgtcttcaaaatgctgcttctcatggataataagatgtccagcatcagggacttcatgaagctttatccatggaagcttatcacataagtagagtaaaacctcatgcgaaatttgtttgtcttcgagtgcacaccaaatgtgaactgaccctttgttatcatctgaaaatggattgctcagttcggttggatcaaacnnnnnnnnnnnnnnnnnnnnnnnnnnnnnttgttgcatgctcacatattcaccttgtcgtagtgcggttttctgaaccgcataaatcaatcactttcgtaagtgcctttatcattaaaaagtatcatcaagttcattatataagaaaaatgggctaaaacaacccaag

SEQ ID NO: 6013 - DNA, 1799 bp, Arabidopsis thaliana landsberg
atacatccatgttagtttcacaattattgtcagtgattgtgatgtttaatttttttgaaggctgttagttgaaatttcatggtgtggactagtacgttgactcagcatttgtttataagatttggagattcagtgctgctcaagactaattgagctttgagtttgaaatatctgacttctattaagattgttatttatatcatatcttaacataattgcaatgttaaaatccaaaactggaagcaaaaaacttgagaccaaaagatgaaagccttcttagaattatatgttcattataacaaacatgttgcttcctcctgattctgtactcaaatcaggtacaaagccaaataagccagaaactgcataatctttttgcagctcttgatcaattctagtaataatgatttcgtctcttctactcaattttttttttttccttttatcttgtacttactacatacatagagacaaatttcatttcattacacagtcacataggttggctcctggttaaggtttacctttggattgtactgaaaccgaaggctacacgttgtcaggcttctagagagagatcggccctaaaaccctacagagagagtgagagaggttgaaacagtatactccatgtttcatcagcaaactgtccgaccatagcatattgatgcaatgtacagatttttcgcccatttctcctgaaatagaaaatgcaggtccaagtcagtacatagaacaaatggagaagaatccgaattttgtagtttcatgtagccaacatgcttcatttgtttcctaagaacacaccttgacatgggtacttgggaaggcagaagtccggagagtctcttgggtttcatcggctatttttcgtttaggtatactcaatataagagctgcttgatcagctgttgcagcgcattgatgttatcctgtatccactttcccaccttcgatgtattccttcacttgggtacaagaagtcaagctccaccacctataatatacaccacataaacctcgttaatacattatagtgctcaaaaaggaaacaaagaaaagttgaaatgcctcaggtaaagagatcggaacctgttcagagtagcctgagttcctggacattactacaccccaacgactcccagcggtggtcatggatgttacatgaaaaccttctttccactttttatttatccacttgaatggaaatgagtcgctgactttgtaagattgctgggtataaggagttcctatcgcattacatgaagtggaataagtaaaacggctttcatgctttatgaatcaataagttcattggcaaagatatcatgagacgtgactaccgacctttagccataacaaccaacgagcttccattatttgcaccagctatggaactgatatagtagttcttttcccattgttccatgatccagtcctgcaaagaatccagaaacaaatggtgagctgctacagtcagagaataggtatgacagatagatggatcctaatgcttcagctgttttaccttgtgcaggaagactgaggacagttcataaacttgagaactgaaaccagtcccagcatccatgatgatggcccagagattagctgatgatgctacacagcttatgaaaaggccatcctcattacctttctcaacatgctgtgcaagtcttaagtctgcaacgttgtaatgatatctacaagagcaataaacattgacccgttatgcaaagaaatgtaaagtacaaaaataaacaaatatttctaacaatacattaggatataagtcggta

SEQ ID NO: 6014 - DNA, 1435 bp, Arabidopsis thaliana landsberg
ataccaaaaagcaagcacacttgaaggcttaaaaagccctcaaaactttttatttaaactaattcaacttctctgttaccatcttggctatccttttatacttctacatacatacgaacacgcatccatttgattacatttaacaaacaggttgcgttaccttcttgatcgtattatgatccttatcctccaattgtcttcttggctttcatatgatgctaagtacctcagcaaactgtcctcccaaagcatattgatgcaatgtacagatttttcgcccatttttcctgcaaaatcaaccaacaccgggcaggtcctgatcagtattatggaaacaaagcaaaagtccaatctttgttcaaaactaaagaaacccaccttgacatgagtgcttggaaaggcggtggtgcgaagagtctcttgagtttcatccatcattttacgttttggtacgcttaatatgaaagctgcttgatctgcagttgctgccattgatgttatcctatacccactttcccatctcctatgtattccatcgcttgggtacaaaaagtcgagctccacgaccttttcacacaataccaaccaagagtatcaggaaaaatgtcaaaatgtttaaagattatgtcattctaaggtgacgggattgaaacctacctgatcagagtagccagaattcctcgacattaccacaccccaacgattcccagcagttgtcatggaggttacatggaaatcttctttccatttcttgtttatccacttgaaaggaaaagagtcgctgactttgtaagattgctgagtataagatgttcctaccaatttacaacaagcacaaaattagtaaagaagactccatgttatatggttataatgaaagtacgacattttctatagtcaagtgtttgtgtgacataaaaatttgcagattactaccattaacaccaaccttttgacataacaactaatgagttcccgttatctgaaccagctatggaactgatatagtagttcttttcccattgttccataatccagtcctgccaagaatccataaaaaaaaaaaaaaaaaaaaagtggtgagctgctactatatatatatagtcagagcatacatagtggacatgatggtaataccttggggaggaaggtagaagaaaatttataaacttgagaagtgaaaccagttccagcatccatgactaaggcccagagattagcttctgatgctacacagcttatgaaaaggccatcccttttacctttttctgcatgatgcgacaaccttgaatttgcaatgttgtggtgaaatctacaagagcaacgaacgcaaacctaaaaaatttcaaaccttgccactcaagaaaagaatgatggagcccaacattaaaacgaacctctgtttcataggaggaaaattggtatagactgaaat

SEQ ID NO: 6015 - DNA, 911 bp, Arabidopsis thaliana landsberg
ccaagtgaagatataaatcgaaggttggaaagtggatacattatattatcaatggctgcaacagctgatcaagcagctcttatattgagtatacctagacgtaaaataaccgatgaaatccaagagactttacgcacttcttccttccctagctcctatgtcaaggtgtgttcttaggatttcaaacatgaaacttataaattttttgatccttctccattttattgttttctattgtactgacttttgttttcaggacaaatggggaaaaaatatgttcataacatcaatatgttatggtcggacagtttgataatgaaacatggagcatattcttgtatctgttgcggtaatgtatgaggttagctggatatttcagatattcaatgcgtaaacagagttgtcacctagtcaatgaaatgaggtcatgaagagaaacagatacatctttagtatttacatgtttacagtagaaaaacaaaaaaattatctgtttcttgtaagaacatggataatcgtactattatgagtgttgcaagcttcatatactttctcataacggcaccacgtgtcttaccacaacttgatgccatgtactcgcggctcagagcatgatacatttaaccaaattattcttcctctctggtttcgtgacgcctttacttgctgatacagcactgtggagaatccaacgagtttctctctttttgactctccacttctcattgctcaatgacatttgtttgaccttccttgaaagtagacctctcacattgggctctttttgccctatctttctaggaataattctgtttttttactcttctctgcttcttctactttctgcttcgacaacatctttcgtctttgaatgagttcttgacagtttcctgcaaccaaattatatcatc

SEQ ID NO: 6016 - DNA, 6582 bp, Arabidopsis thaliana landsberg
ggagtcatgacattgattgaagagaaatgggatgatcttgttgcaaacatgcctctcaagatctgttttccggctctggagaaagatgaatggcgaataatcaccggatctgatccaaagaatacgtgagtccattcaaaataacattctctttttcgttctttaggaattctgtagatctttggcttcatactttgtcattgcaggccttggtcatatcacaatggcggatcctggccaactctcctctggcaggtacaaaacaaacatgtattagttctaaagtagctgtgttttcagattatagaaactctaaaacccttttactgcatggttttttgtagttcacattggcttgtattaagatgggaaagctagaactggcgaagaaagcagttgctgtagcagaaaaaaggctaaaggaagatgagtggcctgagtattatgacacgaaaagcggaaggtttgtggggaaacaatcaaggctttaccagacttggaccatagcgggtttcttggcagctaagaaactaatagagcaacctgagaaagcatcactcttgttctgggaagaggactatcagctgctcgagacttgtgtctgtggcctcagtaaaagcagcggaaggaagaacaagtgttcgcgtttcacacctccaagatcttagtttcctgaaacttaataaactcacgaaccaaagtccatatttaatcatattttgcttctgacgtttagcaaaacatccttgctaattaggacgatgaatcagtttcaaacttaacgtatttttaatttgaaaaaaggaatatatatgtttatgtttgccttttccttcttgtcggattacttttaaatctcaatgatgtggatataaataaaaccagattcagtaatctgaagtaaataggatttgtttatagatttgtttttcagtttgacaattggatacgctagacattattggtcaaatcaaaaatggatatttgaaggaaaaggaaattaatgtagatgtcgtactacctttttcttagtataaaggcaattattaatgtgtgatactgccaaaagagtgagacgagagaaaaagacattagatttgaagtggctgaggaagaagataagaaaatctaagtggaccactcaccagaatacacacatactatactagtatattaataagacaaaatctttggacaacaatcataaatatattacaaccacaaattcaaaataatctacagtaaatgtaaaaataaaaatctcgaaagaaacagtcaaccacaaattacatatcacatgtcaagttacttgaaatcaaacattaatcaaattggatattaactttcaataaatttactattagtgtacttgctaaatagagaagctcctataatgtcaaaagaccgacaacatacgatgtcgtattagggacacatagagagacgtacacggactttggagctgagccatccacacacgggacacgataaggttgcgagcaaagtgatcaccaccaaccacttcttatcacgccgtttcaatgggcctttaatgggctctttttttaataaacccgttttgttttatcttttctcagtgtcggtaaaaactagaaagatccggtgattatttcatcatcggcgattatggaattattcgcattgttaattaaggtcgccggacttttggccactgtcaccgttggagccaacgtagtttcctactctcgtttccgtcgccagaatctcgcgaagtttcgctctccaatcgacgaatctaaagaagttctcgctgatttcaattccattggtaagaagctctctcatcttctccgactccgattagtattactgtgaaatgtgttcttccttctggtttaagttgttgagcttgatgttctggaactcttttagttaaacgatttctcccttttctgcattattttggactcagaccaatctaaaacaatatcctctgcgtttgattcagttaatgtagaatttaaattatttgtgaaggaattgattttaacatgtttgtttcagaacacgaggaaggaaaattcttctttgggttagctactgcacctgctcatgcggaggatgatttagatgatgcttggctccagtttgctaaagaaacaccatgttcagcagaagaagcagaggctgctgataagaaagctaggaggaagaaggttaagcttgctgtgggagctataaccaaaggcttggccaagaacactcatggcaaagaagataagaatgcagctgataagccaccctctaaaaatgtcgccgcgtggcataacgctcctcacgcgtgagatttctaacatcagtttcaccaagattgttgatgcatgtatagtaaacattagtgtcgacagctcaaagttcaatttgtttcagggaggacaggcttaaattttggtcagatcctgacaaagaagtgaagctagccaaagatactggcgttactgtctttaggatgggagtcgattggtctaggatcatgccagttgagcccaccaaaggaattaaggaagcagtgagtcaagaaaatattatgacacgttatgttttacatatactatatgtgtcaatgcattttcttttgttttgccatttttttgctaaaactttgtatttctattgttatgctttgtaggttaactatgaggctgtcgaacactataaatggatacttaaaaaagttcgttcaaatggaatgaaggtgatgctaacgctgtttcatcattcattgccaccatgggcagctgactatggtggctggaaaatggagaagacagtcgactactttatggactttaccaggtgactgtctcatcaaatgagctatttatggacattctgtaggtcttaatcatctttctataacatgccaggattgttgtggattccatgtatgatttggtagactcttgggtaacatttaatgaaccccatatcttcaccatgcttacctacatgtgtggatcttggcccggtaacaaccctgattttctggagatagctacatctactctaccaatgggtgtattccatcgagccttacactggatggctgttgctcactcaaaggcctatgactacatccatgggaaaatgttagtttttctcctttttcttaaaaaaaaatcctatgaatttctctcactagcacatcttaatagtttccaactcttattttgcagttctttgaaaaaacctttggtaggggttgcgcaccacgtctcctttatgcgaccatatgggctctttgatatcggggctgttaccattagtaattccctcactatatttccatatatcgatagcatttgtgagaagttggatttcataggcatcaactactacggacaggtaagagagctacaagtaaaaattgctattaggtctcaaattttgattaataatattgctttctctcgaataagtatgttggaatctgactcgagaaatcaggaagcagtgtgtggtgctggactaaagcttgtagagactgatgaatacagtgaatcgggaagaggggtatatcctgatggtctctaccgcgtgttgttgatgttccacgagagatacaaacacctgaaagttccttttatcgtcacagaaaatggcgtgtctgatgaaacagatgtgattcgacgacctcacctgatcgagcacctccttgccttatatgctaaaatgctaaaggtctttgtccctgaaactctctgaatcatgcaaaacgttatttccagcttaactattgaaatttggtagcattgttgtgatgagcctggtctgttaaaacctcatctagacctcaaaatccagccatgattttagtccacgggccatcctggacccattaaggcaaaatggcgggtacctggctcatccagcatgtgacgggcttagactcaaaaaggtcatccgttgcagggctgggctggctttgggtcgccataacaaccctacgtattggcatatctctcacttgtgtttgtggctttcacaacagggtgttcctgtgctcggttacatattctggactatttcggacaattgggaatgggctgatggatatggtccaaaatttggacttgttgcggttgaccgatcccatgatcttgcccgaactcttcggcaatcataccatctcttttccaaggtttattataaccccttgtggtttttactacgcttgagagttgagatcaccagatcgctgttcgtctcatatggcttttgtgttttccttgctctttccagatagttaaaagtggaaaagtcactcggaaagatcggtctcttgcatggaacgaactccaaaaagctgccaaagcaggaaaactacggccattctaccgaggcgttgataatcataatcttatgtacgcaggttggtttacaacttccaaccttgcgtattttttttttgtttttccaacttttactttatataatcttacttccaaggctttgttttgtttgtttaaaagatggtctcgacaagcctcaatggagaccgtttgttgaccgcgactggcggtttggtcactaccaaatggatggtcttcaagacccgttgagtcgcgtggctcgaacccttctcatatggccgcttatcatgaaaaagaggataagaaaagttaagatcaagcacaccgatgatgctgggcttgttctacatcctgctttagcctcaccctttgactagagaaagaggtagaagaaatccgagtgtacaaactcatttccctgtatgatttgccaaacctttgggcctttggcgccattagagacgattcaccgttttgttgttaatgtttaaataaaggcaaaacggcatgatgttcggatgaggtgctttgttttttacatacgcctcgggactttaaccaacgacatttggttggaccaattaatagtaagtttaaccgacccaatgtccggtttttgttcagcttgataccttaccctggttggaacttggaaacggcaagcattcagctatttgtataaaaaggaaaggtggaaaaactacacgacttctctggagcaaaattttaggatgaggtaggctaggcccattttaatgtccatgagtgatttactagacttgagatccacggtagtcccagatcaacggctcttattttgacacgtgaacaaaacacaaaaaacacctcgcgttgtgatctgaaggataaagaaaaacaacaggacgttgtattacataaattagaaacgaggtgctgttttggtgttttccttttttcggcattgacctatcttgaccgactcataatataagcatgcttgtgtcgccactgtctctttctctatatataatagctctcactcttctctgattttcttctgttgaatcaaggtctctggaaatttcatcatcttcagtcttactcctatccctattttctcgttgggttgcacaaattgtttactgatgacgagcgatcgattttggcgcggcggtgaccgcgttgaggtggaacgactagtttctggcgcgacggcatattttccggcgagtgttgttagcgcgccttcggtgagaaagaaactcgtttgggtggagcatgaatccctaactgttggaggttccgtttccgtacgtatgaaggagtacgtcactcccacgcgcctccgtccatctccaccgcgtgaactcaacagacggttcaaagctgacgatgaggtcgatgtcttcagagatagcgaaggttgctgggttagaggcaatgttacgaccgtacttgaagattcaaggtacattgtggagtttaaaggggaaaatcgtccagaaatagaggttgatcagttcaatttgaggcttcatcgtgaatggctagatggtgggtgggttccttctcttctccaacaggtaaaacatttctctgcgtttgaattgaatctagggtttgtagaaaaatagtgaatttaatgttttagggattaagatacattgaaagatttgacgaattaattgtaaatttagtaaaaccaaaaaaaaaaaaaaaaaaaaaaaaaaaaattgtaaatttagaaaaaagacttaattatactatatatactgtatgtcaagcaatttgaatttgaagatttgttggaatttggcataataaactcacactgcttttttgatttacagagcaatttctcggaatcgacagcccaaagaattaaactgaagataaaaatcaagagaagagatcaatatgagaagggagctcttgtcgaagtcagaagtgaagaaaaagcttacaagggttcttggtattgtgctcgtatactttgtttattaggtgatgataagtacattgttgaacacttgaaatttagtagagatgatggtgagtcgatccctctgagagatgtggtagaagccgaggacataagaccagttcctccttcagaactctcgcctgttgtgtgctatgaaccaggggttatagttgatgcttggttcaacaaacggtggtggaccagtagggtttccaaagtcctaggaggaggttctaataagtattcagtttttatcatctc

SEQ ID NO: 6017 - DNA, 677 bp, Arabidopsis thaliana landsberg
ggtatccaacaaacgaagctaagttccggtgatggactgtcaaaagaagctccgcctgcatacattttacacttcagcaaccataaaacaacattgtctaatttatcggattaatgattctagtgttacgttacctcgacttggaattctttggagacctgggatgatgatgatgatgatgaagatcctttagattttccaaaagaagaatcgttgatcatctttacagcaatttcagttccatcttcaagggaaccaaggtacacaataccaaaccctcctttaccaatcactttattgaagttgtttgtaatactagagacttcactatatgtgaaccttctctttcccgaaggcagaagtggtcctgaatatgctcctgaatacactaggaaattaaacactcgttttctttcagcattaattctaccttattaaatttaaatctaagtaaaagacactctgtacttacttattttgctttcccttcgcatgatgcatatgatagccaaggcggcaatgagaataatcactaatgtggatacaactattggcaccatgattctgttcccgtcccgacatgaacgtgagtgacaaatgttttgttcatcgacactggagacaaagaggaaatcaataagcttttgaaaatggtagagacccggcaaaatgactat

SEQ ID NO: 6018 - DNA, 6712 bp, Arabidopsis thaliana landsberg
  unsure (1)..(6712): unsure at all n locations
tcttctcactgagcgcatcatattcttcattgtatcacccatcagattgtgctagattttcgactaactcctagccttctgatctttggtaaagctccttggtagagtgtgctcaataatgaagccttcttgaaaacctctcccaagcttcacagaaagtttcattgtttttctgtgtgaagcctgggatctcgttctctcaatctagcggtgcgagcgttagagtagaacttgacaagaaaagctttcttataatcgtcccatgagttgatggagtctgggggcagagtcttctcccagtggtgtgccttgtttcccaaagagaagggaaatagtctgagcttaaacatatcttcagtgacaccattgatcttggtaaggccacagatggtccaggggatcttccataggtaaaccatgaaacttgtttccttggatcatggagatgagaccactcttgttctcaaagtagttgttctgaactggtgtggcactatcccttgtctttgggatgattccttgggtatcaccactaccaatgtttcttggtttatcaacattaggtgggtctggaacatcaactggtctgttttgttgatccatagcagctgttctttgttgatcacatgctgcctttgctttggtttcttgtaactcacgagctattctgtcaattctgtctttgaataatagtaggtgtgtnnnnnnnnnnnnnnnnntttgcatgcacaaagattagtacctgtaccacaaaacaagcagacgaaatgatgagttagtaacttgataaatgtaaaagaacttgatcttaaaagtttctgatatcttgaatgcaacaatacaacaatgaattggcaacatcgccaaattgataagcaggttttttatgcctacttatgtgcttcatgtgtgtgattcagttcaattcccctaatacacacacatgtcgatgcagctatagggggtgtcaatccagtccactgtaatgatggtgtaaagaaactactaagtcaagccagattataatgatggtgggtttctagtaacaatcgtaggtcaggattcaaacaagtaaaaataagaacttaagagccctattcgatcattgggtcgagtagaaccaacaagtgacaaaattaagaaacctaaatgcaatcaacaggggatataaataggggatacaaataacaggtaaagaaaagtgcaatcaacaggggatacaaataaatctaatagaagttctaaggatggattcattgataagggcaactctaggattcaccaattggctaataggcgaaaggtagatacccatgacgatagattaaaaaaccgcgtcaatccactctcgtgacaaagacccgcataactctacaacttcctaatctcaactctcgttgatgaaacatagcagaacaaggtttaagaaacaatctaccaaagtcaataagcagtctaaacatccaatcccttgggctagaatctacaaatctttggatttcgtagatcagacatccatttgaacgacctgagacctaacatctaactaaggaggctaaaactggcaagataaccaattgcagaaagaattaagcgaatccagaagggtataaatctaaacactaaccacctaactaacctagagattaccctaatctaatccatcctcaagaaccctaatcactactcatgcaacattctcaagaacacaaaccaagaaatcctaaaatcataccaaaatatagatctaaacaagctaaacaactttacttaaacaatgaaatgcaaaaacgaaatagattaagagtaattaaaatttcaagattcataaacacaaagaaaaactgaaagataaaacatagatcttttggacaaaccccaaaacgatctatttatactaaaatgttggaaaccctaaattcactagaagacaagagacttgaggcggtttgggcgagtgcttgatcttggggatcgagtaaggagggtgctgtaaagtctgcgcctttgtgtttatgctccgagtgatcaattggtcgagtagatgtttcttcctctcctatccgtatgctcagatgtctggttgagtggggaatgaggaggatacgaagacgctttgatagatcaacaaatcttgtagagttggtcacccttggtcgagtaaatgggtcgagtagaggaacgagtagaaggggcgagtagatcgatcagctgcttcttatgaggctgccttgatcgaggaagagggtcgagtgaattgctgcctcctctgtggctgtctggatcgagtgagtgggtcgagtagaatgcccagctgctttcctcctggttggatagagtagagggtcgaatagaatccttttaagctccttctgtagctgaaaacacaccaaaacatgcaatgtgtatgcaagatgatcctaaatgcctaagagtgcaaaataagctaaaatggtgcaaaatgatatgatacaatgaccaaatgcaaagctaaatgatgataaatatacacctaaaatgagtaaaatataaggttatctgcgaaggcggatcatattgcataggttcatgtcgagtggatccgcttctcctaaaaggcatgtccggtgggtttgccgtagtagaagaagaatagctgaactagagttggagagcgttaaaattcttgttgagtgctgcgagagccttgtcttgaagtttactccagctttagagaaaaccaaggcgcttgtaaatttctttatagtctttactttgccttggcgcggagtactcctcaaagtaaaactgatgtgttgcgtaagactcgtccataggttctgtctcattatctgaatgatggattggagcctcatcatcattcactccttccatcggcacaacttcatcacatgaagcatagaggttctctactagtggacaaaactcgatgttgccgccatctctaatcgaagtggaagcgggatttgggaggagtaaaatagattgtcatgctgtggggtgatcgaacctatatttatataggtcattcttctgctacgaccaaaaactcttggaattgtgatatgtctataatttgcatgatttaggcattcattcttcaccactttgtcattgtttcatccacatttcatctcattaggagtcgttttagtgtgttttacatacttaggacgattttgcattaggattgcatgtgcatggcatatttggttgttttcaggtactttggatgcttttggagttcaaacagaggaaaaacagaacatgaagtcagaatgtccaatgacgccttcagcaaaagtactctatcgcagcctcggagccctgccagggcaaatcactctatcgcaaccccggagaagcaagcagatcagtttcactcaatcgcgaagccggaggaatcaccccatcagaactactcgatcaccactcgaccaccaggaagcctatctgctcattctgcactcatccagacaagctgagaacaaagaagagaagagaagccgaagaaaccactcgatcaccaccttatgacatccactcgatcgcactcgatcacagggtcgctggaccattcaatctcgacttcactgcatctcactcgatcgcaagacggagcccctgaagcccagtttgatcaatgacatactcgatcactaggaagctcatttctgcccgtcagatgccaatgacatattcgatcgcaggatcatgacgtgaagattcgctatatatttagtttccttatttgtttcatttctcgcttatataaactgcctcttagggttttccctagagcatccgttattatccgctattatccattattatctcgcttttacattttcgcaactttgatagccgcagtgtttctcctgcgactttgtagtttcgcttccattccctggtcgtttcaagaaagttctggttgcaaaatacagagccctcctgtaaaaacacataaaggatatccctatagtggactgtctcgcgctgatacctgacgagcacaagtacgtgaaagacctgatcacagaaaggatcaatgaagtccaaggaatggtgatattaagtcatgagtgtagtgcaattatccaacagaaggtcatacctaggaaattgggagatccaggctcattcactctgccatgctcactaggccctctaacattcacaacatgcttatgcgatctacgtgcttcagtcagtctgatgcctctctcagtagccaagaaacttggttttgataaatataaaacttgcaaaatttcgctaattctagcggacagatccatcaggatacctcatggcctgttggaagacttacctgtcaagataggttctatagaagtacctaccgactttgtggtgctggatatggacgaagagccgaaagacccattaattttgggaagaccagttttagctacagcaggagccatcatcgatgtcaagaaaggaaagatcaacctcaacctcgggaaagatcttcggatgactttcgacatcaccaacatgatgaaaaagcccacaatagagggtaaagttttctggacagaagagacagaattcctaactgacgagcttttagaagaactagcagaggacgaccacttacagagcgccctgaccaaagacagtagagaaaaagacttacatgtggaaactttggataccagaagctgatggatatgagcagggaagtcgatgactcagaagactttgaggagttgagaccactcgaccgcacgaataacccactcgatcacgtcactcgatcgcaaggcgagctacatcactcgatcgcttcactcgatcacgattccatctttgatactgaatcaccacctaacgattggtctgagctcaaggcacccaaggttgacctgaaaccgcttccaaaagggctaaggtatgtttttcttggaatcaattccacctatccagtgatagtgaatgatgaaatagatactgaacaagtgaatttgcttataattgaattgaaaaagtatagaaaaaccataggttattcactagatgacatcaaggggatttcacccactttgtgcactcatagaatccatctagaaaatgaatcatattctagcattgaacctcagaggagattaaatccaaacttgaaagaagttgtaaaaaaagagatacttaaactattagatgcaggtgtaatctaccctatatctgatagcacttggtatctccagttcattgtgttcctataaaaggaggtatgacagttattaaatattctaaagatgaactactacccacaaggaccataacaggacacaggatatgtattgactataagaagcttaatgcagccactaggaaagatctcttccccttacctttcattgaccaaatgctaaaaagattagccaatcacccctattactgttttctagatggttatagcggattttttcaaatccctatccacccaaatgaccaagagaaaactacattcacgtgtccctgtgggacttttgcttataaacgaatgccttttgggctttgtaatgcgcctgccactttccagcgatacatgacttctattttctccgatttgataaaggagatggtagaggtattcatgaatgatttttctgtgtatggctcttctttctcctcctgtttgcttaatctgtgcagggtactcaagagatgcgaagagacaaacctggtgctgaactgggaaaaatgtcacttcatggtcagagaaggaatcgtcttggggcacaaaatatcagaaaatgggatagaagttgatagggcaaaagttgatgtcatggtacagttgcaaccaccaaaaactgtgaaagatatcagaatttttctcggacatgcagggttctacaggagattcatcaaggatttctctaagttggctaggccattcaccaggctgctgtgcaaagaggctgagttcacgtttgatgaagaatgtctggttgctttcagatcgatcaaagaagcactgatctctgccccaatagtccaagcacctaattcggatcacccttttgaaatcatgtgtgatgcttcggattacgctgtaggagcggttttaggacaaaagattgataagaagttgcacgtcatctactactctaacagaacgatggatgacgcaaaagtaaggtatgccattacggagaaagaactattggttgtggtctttgcgttcgaaaagtttaggagctacctggtaggctctaaagtgatagtttacactgatcatgctgctctaaggcacatctatgcaaaaaaagataccaagccaaggttgctgagatggattttgctgctccaagaattcgatatggagatagtggataaaaaggggattgaaaatggtgtagctgatcacttatcgcgaatgagaattgaagatgcaatccctattgacgacaccatgcctgaggaacagcttatggccatctgggaagtgaacaaaaaattcaaaagcaaccagttttgggatgagatgcttgcagtagaggagaaacatccgtggtacgctgattatgtcaactacttggcacgtgaagagcctccgaatctgtgagggtacgaaagaaagaagttcttcaaagacataaatcgcttatactgggaggagccgtacctctacactctctccaaagataaaatctataggaggtgtgtctaagaagatgaaata

SEQ ID NO: 6019 - DNA, 537 bp, Arabidopsis thaliana landsberg
tgttcaaaagctaagagacatcaaacccggtttagtctggttgtaaatccccttattgatttgttttccttggcagggttggagtatcttcatcatggctgcaggccaccaatagtacacagagacgttaaaacagcaaacattcttttaaacgataacttggaagccaagatcgctgatttcgggctttctaaggtcttccctgaggatgatctcagccacgttgtgactgctgtcatgggcactcctggctatgtcgatcctgagtaagtttccttaacacatcaccacttttaatctttaccattttggtcatgttggtctcatcataaactggtttcaaaataggtactacaacacgtttaagctaaacgagaagagcgacgtgtacagctttgggatcgtcctccttgaactcataaccggcaagagatccataatgaaaactgacgacggagaaaaaatgaacgttgttcactacgtcgagcctttcctcaaaatgggagacatagatggtgtcgtggatccacggcttcg

SEQ ID NO: 6020 - DNA, 3186 bp, Arabidopsis thaliana landsberg
aaaaaactcatcattatgattgttatttttccttattattgtaggtgaaatgatagatgaatgtttttgaacataaagggaaccaaagaatatgaaatgagtgtttgtttatacgtagaagcaatttgtttgctaatgaaagtgaatgatatcagcattcttgtcgaacattacttgcgacggttcgagcccaaaactttatctgagctttcatgtcttttctcgaatcctttggaacccaaaccggaatcggctgtcccaccaccgctgtagaccggtttttcccagtggtggtgcatgggaccttcctctgtttttcttcgtcttcttcttgcttcttctctgtttcaatgtgaaaatccttcaacatttgaatatctttcgtctcgatgctgcttaacgttttacgcagcgttttgcggtttgggcttttttgtgatttgacgaccaattcttgaatagcgtcttctgatcttgagtttctaggtggtctatgccttggaatgcatgaaacctatacaaagttttaaaaactttctggtcaaattcagagtctcaacaacagcaatgattcaatcaaatcatccaagaattgaaaagactaatgtaaacaaagagagatcatcacctttggaatgttctgtttcgttggagtaaatccagaagaagaagaagaagaagagttagcgatggcttcacggatcaaaaatcccattcttgaatcatcaatctcttgatcttgaaactcatttacatcgtcttctcttcctaagtaactaggcaaagtctgagttctctgcaaactccctcccatcgagcaactctggacactattattgttactacaactaattcttgttctgttcttcttcctcgaaccttctttaattcccttctctcgaactacaggttccttcttttgcaagtaagttcttcgttcttgaaccctagtcttctcagagaactgccttctcatcaccttatttatcttctcaggctcgcctccgccttcttttttctctatacacggcggcggaacaaagtctcccccagtagaagcttctagaagcttaatctccgaatccgaatctccaattttcggtaattcgggtttgggacaagttgaagaagaagaagaagtaaaagggtaaggatctgaatgacagtacctcaagatccttgatcttctgtcaagtaagttatcaaagaaccagaaatcttcgaggagatcatcaatggcttcgaattgttccaactcttgatgatcattcgaagtagaatccattttttttttaattcagacaaaagataacataaagagataagtttgtgttcttgtttcttcttcttcatcttttgttcggttttgtatttgaagcatagattctggggacttattaggaggtgcccatgtgggcaaccattcagcacttataatctaaaaatattgtttttattgttttatgtggagtcaatgtttttgtacataaataaaaaatgaaattttttgagtgaaaacaaaaaatggaaataaattgacttattccgaatttgaaagattctttcttttacaattgttctgaattttggagtcaataatattttaacttctagggaaaaatattggcgccacaagttttttaatttcagtaatctttttgtatatttaggagattgcagagacgtattagctgaataggttttggaaaagaaaaaccaataattaagtgttctaagtggataattaaaataaaattagataacaaatcaaaaggatttctggcaacaactaagaaaaataaggtttttcaacaaaagttatgattgctaagaaacggcataataagccctgtcatgacagtcaacatgccatgtgattcttaaacttaatatgtaaacaattcggttctatatcatataaaataatacatacagtttttgttatatattaatattatttcttatccatcgcctcctacgcgacagctaagaattatagtaatctaataaatacaaaagatattggtaatattaaaatacatgtgaatgtaaaagcattaaatgtcgagctctgaacctacattgttctccaattatagtatgacattgcatataacattaattatgttcatcagccgtaaatctttattatgtgacatgtgggatgtggctaatcagtcaatttagctgcgtacctgatgatttgttgacgatgctgagaaacgaatgctaatcacatcacaaataatcttacgagaaagatattagtacgcactacgcagcttgaagaaacaggagtttgagccaagaaactgctgattttttcatatctgaattaaaatattttactagtcttgtaactgcaaatcaatggcagagacaccagctgatttgagtaaaaagtttacagatgaatcaatcaaaaaggcttcatctcagttgcaattaactctatgagagaaccaaggcagaaactatcatatttacaatgcaaagagcggtcatcttcagtactcaccggaaccaatattccatctttgaaaacgaatactggttcaagccaagtcttaggtcttcgatatgtatttccctcatctaagctcccttgcatttcagcagaatgactgcaacattcgacagaggcaagaaaattaccggataagcgtttgcaaaaacatgcttcgttttctggacattcctcatgatctttgaccttcgcttcctgcatggtaccattgtttttcacagagatgaactttctaacagcagaaataagctccactgataatgaagaaaccgcatcatgtataccctctgttgtgatggaactcctaccaagtctcaattcgcgagtaactaatttatgcattgaatcttggaggatggagacgcactgggagcagcaacggtacaagcacaccaagctagggtcatcctgaggattggttcttccagtcgtttcaacttgttcaactggttcaggcatgttgtttgcggattctaatccatgaactccatcccaggcttagccgttatttgagtcagctgatttgtggggatcttccagggatatagaattggaatccccagatccattaggattgtctagggaaacagcaaaatcttgcaaagaaattactgttcctgtagtttctacctcgcatgatccatgtggagtttcattct

SEQ ID NO: 6021 - DNA, 2932 bp, Arabidopsis thaliana landsberg
ctctgtggtggctgatcaatgtaatgtttttgctagggagatttccatgctgctttgaattttgcagcagttatggaagctcctgttttatttatttgccggaacaatggatgggccatcagtactcccacctcagatcagttccgaagtaactccttttctttttctttggatgtacataccctttacttggttttctttaagacttttggatttgccaatgcttttgcaaacacaatggccaacaggtgatggtgtagtggtcaaaggccgtgcttatggaattcgaagtatacgtgtggatggaaatgatgcacttgccatgtacagtgcggtacatactgctcgcgaaatggcaattagagaacagaggccaatcttgattgaggttaatatgatgtgttgatattagatgcaacatcaaaacacaaaataagttcaaatcctctcttttttttttgtttgcttggtaggccttaacataccgtgtaggacaccattcaacatcagatgattcctctaggtaccgctctgcaggtgagatagagtggtggaacaaagcaagaaacccactgtctaggtttaggacatggattgaaagtaatggctggtggagtgataaaacggaatcggatctgagaagcagactcaaaaaagaggtagccaaaaaaccttgatcatgagcattgtataagaatcattttggttttataaatgctaatttatcctatccttttgggtccttgtatacagatgttagaagcgctccgggttgcagagaagactgagaaaccgaatctgcagaacatgttctcagatgtctacgatgttcctccatctaacctcagggaacaagaacttctggtgaggcagacgatcaatagtcacccacaagattacccatcagatgtgcctctttaggtagactctagttgtatgctttgtgtagtaatttatgtaagccaaataatctacattgtgtattgaaatcttttattgaaatcgagaccaatattcaaaagcatacaatttcttcagtgtctgacagtacacaacggcagatgtgtgatatacaccagatagctatttcaggcagtacatatattacagtttcagttgtgtctcagagagaagcatctcctcttctatggattctctaatggctttcaagagccgtggcataaggttcttggtgctgaccacgatccctgttttgtgttcaagatgatttcctctcgagaagtccagaggattcccgtcagcatcgcaaactacacctccagcttctacacgaggttattggcttattgctcacagcttttggtcactagtgtaattgttttgtttgttttccgtaataggtgccatgaataaatatttgcatacctgttgtgatgattgcaccagcagcatggttccatatgaactctcggtaccctttaagagtgaaacgcaagtatatctctgcatctcctcgagccagagctgcgtacttcacttgactatggattcttagaggtggagctttgatcccaagtttctgcttaccgtaagagagtaagttttagtgaaaagattaatacattggttaggttaggcttgatgccaactacacacataaaatatgttattctgtacattggcaatggagctatggatggggattggtttgtgggatgattccacaaaggttgcttcttcaggattctcaatgttgctcacttgcacctattagcacactttctccactctgttttaagaacacaaaacgagagaacaagcctaagggacatcaaatgctctgataattataataccttctgtggaggatgagagtcgccttcaagcgattgcacataagctccttctcccactgtagcaaagaaaaggcatcctgaagaagaagacttgtgattctcaagtttcgggcaagccatgacaccgagcactactttgccttccacaagcaaagctaatgccacagcgtattcctctccttttacaaacctattaatcagaatctgcaggttagagcaaaaaggagaagattgttctgtaatgagtttcaagacttctcaccctctggttccatcaacaggatcaagaatccaatggcggccactggaaccgccttgtgacctcccgtggtctatcgccttccttacatcatccattgaaagagaagagttggcgtaggaatcatcagaagctagagcattgttcacaagcttagtaatgctttctagaaattcctcggcgccattcttgtgcagatcttctgcattctgcaaaagatatgtaacagagaaagattaagttcggtggtgtgtttttgactggtaataagagactgtaagtacctcttcagcaaccaagtatagtggttcagggtgaagttctctctctagtacatgactgatcacagcttgggatcctgcatatttatcgataggtttggtcaacttaggactggtttgattggacctggttgaccagttttgttacacgaataaaaaccgattgacaacagaatgggattgatttaaccataatcagcagctgtaaccggacttttatcagattttgaccggacatctgattgcaacagagacttctgcacttcctgatcaacacacagttcatgaaaaaaaactgtcattagtaaaagttttgtcaataaattagacatatgtggttactaacctggctgagacgagcagctagagagacggctttcttagcagcagcgagctctttctcgtaaggcatcgaaacaagaaagaataaaacgaagaccaagaagagtttattcaggtcatgtgttcatctattatggatttattcatccaatataaatattttaaagtatatggtcattgttaatatataaccggagtttcgtggaagtttcaacacatttcttagtgttaaa

SEQ ID NO: 6022 - DNA, 3490 bp, Arabidopsis thaliana landsberg
ggcggccgaggatacctcgggctcgggcgtgtcgtcgatcttgacggggggttgatgtatgtctctggagaagacgtctggggaaaccgttgtccgcctcgaggatattttagctagctcatccgcagtcttgttgtaccatcgagcgatatggttgagttccagcctgtagaacttgtcttctaggcgctgaacttcgtcgcagtaggcctccatcttccggtcgcagcagtgggagttcttcatgacttggtcaatgacaagccgcgagtcgccacgagcattgaggcgccgaacccctagctcgatggtgatgcgcaacccgttaaccagagcctcgtactcgacaacgttgtttgacgccgggaaatggaggcgcaacacgtagcggagatgtttcccgaggggtgagatgaggaccaggcctgcgccggcccctgtcttcatcagcgacccatcgaaaaacatgatccaaggctccagttggatcagagccgtcgagagctgggtgtcggcccattcagccacgaagtccgccaggacctgggacttgatggccttccggggggcgaacgagatcgtctcgcccataatctccaccacccacttcgcaatcctacccgaagcctcttgggactggatgatctctcccagggggaaggatgacaccaccgtcaccggatgagactcgaagtagtgtcgcaacttccgccgtgtcaggatcatcgcgtacaacagcttctggatttgtgggtagcggatcttggtctcggacagtacctcactgatgaagtagactggcctctggatgagcagtgcgtgcccttcttctcgtctctcgactacgatcgcggcgctgaccacctgagtggttgcggctacgtagatcaagagggcttctcctgcagcggggggcaccaagatgggcgcacctgtaaggagcgcctttaagttttcaagggcttcctcggcctcgggggtccaagtgaagtgctcggtcttccttaagaggcggtacaagggtaggcctctttcgccgaggcgcgagatgaagcggctcagagcccgaagcgagtcccatgacccgtttgtactcctttcaagtctttgataggccccatgttggtgatggccgcgattttcttcgggttggcctcgatgccccactcggagacgatgaaccccaggatcatgcctcgggggactccgaagacacacttctcgggattgagttttacgtctttcgccctcagacacttgaatgtcgtttcaaggtcagagaggaggtcggaggctttcctcgtcttgactatgatgtcatcgacgtaagcctcgaccgttcggtcgatgtgctctccgaacacgtggttcatgcacctttggtatgtcgcacctgcattcctcaaaccaaatggcatagtaatatagcagtacatgccaaagggtgtgatgaaagaggtcgcgagctggtcggactctttcatcctgatttggtgatacctgagtaggcatcgaggaatgacagggtttcgcacccagcagcggaatccacgatttgatcgatgcgaggcagagggtagggaaccttcggacatgctttgttgagaacagtgtagtctacacacatccgccatttcccccctttcttcctcacaagcacagggttggcaagccattcgggatggaatacctctttgatgaaccctgctgccattagcttgtggatctcttcgccaatcactctgcgcttctcctcgtcgaatcggcgcagaggctgcctgacgggtcgggctccggcccgaatatccagcgagtgctcggcgacatccctcggtatgccaggcatgtccgagggactccacgcaaagacgtcggcgtttgcgcggagaaagtcgacgagcactgcttcctatttggggtcgagcccggaaccgatccggatctgcttggaggtgtcgccactggggtcgagagggacggccttgaccgtctccactggctcgaagttgccggcatggcgcttcacgttgggcacctctttggagaggctttccaggtcggcgatgagggcctcggactcggcgagggcctcggcgtactccacgcactccatgtcgcattcgaacgcgtgtttgtatgtggggccgacggtgatgaccccgttggggcccgacatcttgagcttcaggtaggtgtagttggggacggccatgaacttcgcgtagcatggcctccccagtaccgcgtggtaggttcctcggaacccgaccacctcgaacgtcagagtctccttcggaagttggagggcgttccgaagcagacgggaaggtcgagtcgtccgaggggctggacgcgcttcccgggaatgatcccgtggaagggagcagcgcctgctcggacggaggacagatcgatgcgcaggagcccgagggtctcggcgtagatgatgttgaggctgctgcctccatccataaggaccttggtgagcctgacatcgccgatgacggggtcgacgacgagtgggtatttccccgggctcggcacatggtcggggtggtcggcttggtcgaaagtgatgggcttgtcggaccagcctaggtagactggcgccgccaccttcaccgagcagacctcccggcgctcttgcttgtggtgccgagccgaggcgttcgccgctcgcccaccgtagatcatgaagcagtcgcggacctcggggaactctcctgcttggtggtcttccttcttgtcgtcgtcgcggccctcgcaccctccgcgggtggcccggccttgtggaagtggcgccgaagcgtgacgcactcctcaagggtgtgcttgacgggcccctggtgataggggcacggctccttgagcatcttgtcgaagaggttggcacctctggggggtttccgagggttcctgtgctcggcagcggtgacaagatctgtgtcggcagcgtcgcgttttgtttgcgacttcttcttgcctttcttcttctcaccatgttgggcggacgcctcgggggtgtcttcctttggctctccctgaggctgcttgtccttccggaagatggcttcgaccgcctcctgacccgaggcgaacttggtggcgatgtccatcagctcgctcgccctggtgggagtcttgcgccccagtttgctcaccaggtcacggcaggtggtgccggcgaggaacgcgccgatgacatccgagtcggtgatgttgggcagctcggtgcgctgcttcgaaaatcgtcggatgtagtcccggagggattctcctggctgctgccggcagcttcggaggtcccaggaattcccagggcgcacgtatgtgccctggaagttgccggcgaaagcttggacgaggtcgtccctagttggagatctgctccggaggcaggtgctccaaccaggcgcgacggtgtcggagaggacagggggaggttcggatgataggttgcgtcgtcgtccaccagttggcagcagcggta

SEQ ID NO: 6023 - DNA, 882 bp, Arabidopsis thaliana landsberg
taacggtatattcgagattccagtccatacatgttattaataaagaaagattggatctccatataaaaaatagctgtctcttacattgtagcactagctaaagatctttcaatactacgtacctagtcatacaattctttgaatatggttttaaattgtatgtgaatattattaagtgagaatagtatcgacataacaagtatgaaatcttttatttctatatattttatttaacaacctataacaaacatttcacttcaaattctcactatatgtagtccatcatcaactactttcttttcgcatatctttgaagtttttggttttactaaactaactctatcataaaaggagaaagctttaaatttaaccagaaatgaagatgcccgtggttgtacaattcttcataatctctcttctcctcacatcttcattttatgtactttcaagcgctgattcatgtaagtgtatacttaatctagttagttattttttaggttatttatcattttgaaactagttgtctgaaattctaagatttgatttgtgatggtgataaatgaattagcagcatgcggtggaaagtgcagtgtgagatgctcaaaggcagatcgaacacatgaggagtgccttgaggactgcgatatatgttgccagaagtgtaattgtgttccttcggggacttatggaaacaaagatgaatgtccttgctaccgtgatatgaaaaactccaaaggcggatccaagtgtccttgaacattctttgaagatcctcatcacatacatattatctacgtactatatgtatggaaattacatctatatatgtttgatgtatgaaataagttctgtgagcttaatgaaaattttgttgtcttcaat

SEQ ID NO: 6024 - DNA, 2397 bp, Arabidopsis thaliana landsberg
ttgatgtgtgcgtatctcgtacaattaagttgtataagatgctattataataaccttatgtgacaaaataacatttttaatccgaaattcactaagattaacaagtactaagtttagagtctaatatataatagcatttttcatcataacacatgatacaaatcatacttaaatattatcaacttgatgtaccctttggtcatcatgttatattataacaaatacaatgcatttatgtataataaatcaaccccgacgttccacacaatcaagtgaagtcatggcttagggcatcaaagtaaaaagacatattttagaattcatttttaggctttttatgttttaagagaaatatcatgttttttttacaaatttatttttgttgagctttcttttcatcatattttatgggatttaaacttttaaattaactaaaattttctccaatctcctttgacttcacaaagcgtgtaaataatagtatagctcattacctctcaacctccaattgtattcatggagatttttattctgaatcaggtcctcaaccaccttggttaccaaaactactttgtaaaatctcaattggttaatataattcagtttgcagaaaaaaggtactatgcttataatatattgtaattctatactaataataaatactaatcaaaactattaaataataaatgaaatctgttaaataaataatataatagtagattattcttttagtgtgatttttggtgttatggttggagaggacacaagttttagcgtcaaaaatggtgtaatttaaacaccataatggtgattagccttggagatatcctaacacacaatattacataataaatttataagaaaattaacttataaccctcagtttctttctacccagtttctttctttctcattcggttttcactttctctaaaaaataggtacttccgcatttaccctcttctgcttttgcataacattgatgatgatcacagttgtatgaggtctgctgcttcttgagatgaaaaccaacaggtttacggtggaagaaacgaggttacaggaagttattttttatgtttttctaaaagtggtcgaattgctgttattgttgatccatatgccttatcacaatcttcatctatatgctttatcaagcggattaagcggttctagtggaacaagagcggatcaagcggttccaaataaatgttgaatggtaaaagcggatcagttattacggattctattatatattattaaattatgattttattttaaatatagtaaatagatttattgtgataattatgaaaatatttaatattttttaatttaaattcaacagtaaaaaaaaataaatatctaatattttgattttcccaaaacagatctgcaataaaattacaaatgattaatagatataaaataaaaaaataaatttatgcatgaatatatcttatctcttcaaatagtttatttaaatatgatatttttatattattatgtatgaaaatactcaaaatagttaaaattttatgtattttaaatatatatttcattgtattatgtttataatgttatgtaattctatactaataataaatacttaccgaaactattaaataataaaaataattttaaataaataatataatagtagattattcttttagtgtgatttttggtgttatggttggagaggaaacaagttttaacgctaaaaatagtgtaattggaacaccataatggtatttagccttgaagatgccctaacacacaatattaaatgataaatttataagaaaatcaacttataaccctcattttttttctccccagtttctttctttctcattcggttttcactttctttaaaaaatgggtacttatgcatttagctagggggtgagccgctattaagctcttctgctcttgcataacagtgatgatgaccgcagttgtgtgaggtctgctgcttcttgggataaaaaccaacaggtttatggtggaaaaaacgaggttaaatgaggttattctttatgtttttctaaaaatggtccgattgctgttatggttcatccatatgctttatcacaatcctcatacatatgctctatcaagcggattaagcggttctagtggaacaaaagtaaatcaagcggttccaaataaatgttgaatagtgcaaggggatcaattattacgtatcttactatataatattaaattatgattttatttataaatataataaatagatttattgtgataattattaaaatatataataattttttaaatttaaatacaacagtaaaaaaattaatatctagtattttgatttttccataacatatctacaataatattaaaaatgattaataaatataaaat

SEQ ID NO: 6025 - DNA, 3430 bp, Arabidopsis thaliana landsberg
gatagtagtcgtatacggcagccaacgcagcttccaaaaatgctacatgggtggctacgagcatatcaaaaaagccgaccctgtggtactaatgatagaggacaaactcgcaaaaatgaaaacagtcagatcctcagacccgtctcaacgtggacctcgaaaatcgctgataacgcaggactacatagacgaatcagatcctaaacgatgcgttggggtaggtcacgacctcgacccagcaatacgagaggatctcgtaatctttctcaaggaaaacaaagacagcttcgcctggtcaagcgcaaaccttcgaggaataagcctcgaggtaacctcacacaaactcaacgtcgatccgacctaccgatctataaagcagaaacgtggcaagctaggtcttgaaagggctaaagctgtgaacgatgaggtcgaccggttactcaaaatctgatggataagggaaagtaaaataccctgactggctcgccaaccaaatcgtcgttaaaaagaaaaatgggaagtggaaagtatgcattgactttacggacctaaataaagcatgtcctaaagacagttttccactcctgcatatcgaccgactcgtcgaagccaccgcaggacacgaactattgtccttcatggacgcattctccgggtacaaccaaatacttacgcgcctagacaccaagaaaaaacagctttcattaccgactgaggcacctactgttataaagtaatgccctttggtttgaaaaatgccggagctacctaccaacgattggtgaacagaatgttcgctgaccagctaggtaaaacgatggaggtctacattgacgacatgctggtcaaatcagctcacgaaaaggaccacgtcccacaattaaaagaatgcttcaaaatcctaaacaaattcgaaatgaagctaaatcccgagaaatgctgtttcggagttccatcaggagaattcctcagatacctagtaaccgaaagaggcatcgaggccaatcttaagcagattgcagccttcatcgaaatgccatcaccaaaaacgacacgggaggtccaacggctaaccggccgtatcgccgccctcaataggttcatatccaggtccaccgacaagtgcgttccttttctctcagctcctctgaaaggagaaaaagtttgactggaatgaggactgcgaacaagcctttaaacaattgaaagcatacctgaccgaaccagccatactcgcaaaaccggaagaaggagaaccgttgtacctgtacacgacagtctcccgaaccgcgataagcggcgtcctggtgagagaagatcacgaaggacaaaaaccgatctattacgtgagtaaaacgttgatagacgctgaaacccattatccagcaatggaaaaactagcactggccgtagtcatgccagctcgaaaactgagaccatatcttcaatcacatcccatcgtagtgatgacgtctcaaccaatcagaaccattctgcacagtccaactcaatcaagtcgactagcaaaatgggccatagaactaagtgagtacgatatagaatatcgcaccagaaccagctttaaagcacaggtcctagccgactttgtaattgagctcccgttagcggacctggatggaacaaactccaataagaaatggctcctccacgtcgatggctcctccaaccgacagggatctggagaaggaatacaactcacctcccccactggggaagtcatcgaacaatcgttccgactcggattcaacgcattaaacaacgagtcttagtacgaagccctcattgctggcattaagctagctcaatcaatggggatccgcgaaataaacgcctactgcgactcccaactcgtcacctgcaagttcccctggaatacgaagctaaagacgagcgcatggaaacgtacctcgaactggtcaaaaccttagcccagtagttcgaatagtttgaactgaccaggatccctagaggagaaaacacctcggcagctctcgcttctacgtcagatcctttcgtcaaaaggattatcccggtcgaaagaatagaacacccgagcatcgacctaacagtcaaacatggtaggatggaaacctcggcaacttggaacttcacacgagtaacccgaagcaccaccgccgcaaccatagctctcgtaacagctgtggaggcaagtgcaacggaagaggagccagagcccgaaacccccgaacaacctgccccgtacgaacttgaaccgtacaacgactggagaatcccaatcatcgattacatcaaacgagggatcacacctcccgacaagtgggaggccagaaacgcagcgtcgcaggttcatacatggtgtgtacctacgggcaacaaacaaaagacctcatgaaaagcatgcacgagggacaatgtggtagccactacagtggacgtacccccgccctcagaatcaagaagcaaagctacttctggccaacaatgctacccgattgcatagctcattcactcaggtgcgataaatgccaacgacacgcacctactctgcatcaacctcccgaggaaatgtcctcgatatcttcaccttacccgttcatgaaggggtccatggatgtcgtaggtcccatggaagcctccggtgggaagaagagactaaaaacctaccggtcctcaccgactactctaccaaattgattgagctaaaaactacaaaacttgtcgactataattgatgtcctacgagtaccaagtagaaaccaatgccgacatggcataccatatgaattactctggaataacaggactaacctcacctcgggaaaaatcaaagaattttgcgacaagtggaagatccgtcttaccacgtccacccccagttacccacaaggtaagggacaggcagaagccgccaacaaagctatacttagcaacatcaagaaaagactttattccaaaaaatcaatgtggtccgacgtactccacggagttctcagggcctatcgaactacacctcgcaagtcaacgcaagaaacaccgttgtctctcgcctatcatttagaagcagtaatctctgtcgaaaccatagtaccaagcgtgagaaggaccgccagtcctgttaactcagacctgaacacgcaaatgttacagaacaacatggacttcatcgatgaacgcagagatcaggcaatgatccgagttcaaaactatcaacaagctgccgcccgctactataactccagtatcaaaattcggagattcgaagtgggagagctcgttctacgaaaagtgttcagcaacacaagagagctaaacgccggaaaacggggaactaactcgaaaggtccctatcgaatcaccgaggtggtacgcgacggcgtctataagctagaaaaagttatcaacggagtacctgagttacggcctcgga

SEQ ID NO: 6026 - DNA, 3995 bp, Arabidopsis thaliana landsberg
  unsure (1)..(3995): unsure at all n locations
taaactatgcactttactaaagacaaattgcacataatctatagaaatatatattccctcatcctctggtaatcctttcttggtctactataagatttattcaatactcaaactttaatgtcgaaactaaaactgtcatagagaacaaatatatagccacacaataataattatccgattttcaaatttctttggaaattttctcgttgaatctaccgtaaatcaaatatgaattagttattagttcaaggaataagattatgaaatttcaccacacacacaaaaagccctttttcaataacgagttatgattatatccataaatattaaaacaatgaaagtataataatctttaaaataagcttaaaaattgttttgataaattatcttatattgttgttttaccctcatcattttctacatgcatgatgatacaaaactaccaaacacttctttagttttgttttgtcaaacactattctttctttctatgcaattatatctctgttgtcttcattctatttctctctgtacttcttttttatttttcttcttaaaatcatattcgtacataaattttaaatattgctatcagttgatgaaatttctttttagaaaatcattaatatcttttcatctcgtagatataaaatattcgaatatcctatgatcatttctatttgacaacatatccaatgattatcataataattattaaatttactaactatgttaaagagtaagtagttaaataaatagtttggtagttagtatcagttatcaaaccagagagaatcttttagactcgatcaaacaaagaccttccattacaaaacctcaaaagttgaagtcaataaaaatctcttacaaccacaacaacttctcagattcttcttcgctttgttgttcgttctcttcttcaagctctctgtctctccaaatgggcgacaccggtagacacaaatggttctccttccaccaccaccgttcagcctccgccacaactatgccacaacacaacagccccggcgaaactccaacagagttcctctgtcccatcaccggctttttgatgtcagaccccgtcgtcgtcgcttctggtcaaacatttgaacgtatctccgtccaagtttgccggaatctcagttttgctccaaagcttcacgacggaactcaaccagatttatccaccgtaatcccaaatctcgccatgaaatcaacaattttaagctggtgcgatcggaacaaaatggaacatcctcgtcctcctgattacgcttacgtcgaaggtgttgttcgtacccgaatggattcacttcctccgggttcgggtcatcggatcgctaaatccgaaatcttaccaccggtggctgagaattcaaattcaaattcagattacgattccgtgatgggagcgattcgatctcgttcaaggacttcattatcgtcaactacttctcttccacttcaccaaacccgacccattaatcactcgacccggatccaaagctcattctctacatcggattattcatcttttcctccgatgtcaccggaagaagaagagatctacaacaaattgacaagtgttgacacaatcgatcacgagcaaggtctgattcagctaaggaagacgacgagatcaaacgagaccacgagaatctctctttgtactgatcggattctctcattactccgatctctgatcgtttcacggtacaacatcgtgcaaacaaacgccgccgcgtcgattgttaatctctcgttagagaaacctaacaaattgaaaatcgtacggtcaggattcgttcctttgttgattgatgttttgaaatcgggatcaacggaggcgcaagagcatgtaatcggagctttgtttagtttagcggttgaagaagagaacaagatggtgatcggagttcttggtgcggtggagccgcttcttcacgcgcttcgttcatcggagagtgagagagctcgtcaagacgcggcgcttgcgctttatcatttgtcgttgattccgaataaccgaagtaggctggttaaagccggtgcagtgccgatgatgctgtctatgatcagatccggtgaatcggcgagcaggattcttttattactgtgtaatctggcggcttgttcggaaggaaaaggtgcgatgcttgacgggaatgcggtgtcgatactggttgggaaattgcgagaaagtggaggagctgagtcagacgcggcggcgcgtgagaattgcgtcggggctttgttgacgttgagtgtagggaatatgaggtttagaggattggcgagtgaggcgggtgcggaggagattttgacggaaattgtggagagcgagagcggaagcgggcggttgaaggagaaagcttcaaagattctacagacattgagaggcggagggagtgaattcggtgaaggagcggaggcgcgtgagtggaaccgtatgttggaagcgagtgggctaagtcgttctcagtttcaacaaggagggcaaaaagggggttttgcttattcctctcagttttagctctattcaatttttttattttcattttcttatctcttttcttgttggtaaatttttttctcaaatatttgtttttttttcactcttttttgtgactaatattttgggagtgaatttgtaatatctgattttaatcttctttaatttgtcatttctaatgaaacgacaaacagtaaaatgttgattatttcgtttgtaaagagttgctcttgtttaatttgtgaaaacgttagacaaacaaaagtcgtctcgtggagagttactctgtttggtgtaccgtcttcagatcttttgattaaagtacgtaatataagatttggaacgaagatttagtcgttggtcaaataattctaaggtcaacgtttcaaagtgtaccaagttggaatattctacaattattttgcctgaagtcatgtaatccaatcgccaatttgccattcgtcatgcaaacacgtcatgggtacatagccacacatactctatggaccctatttatatgttacgagaatagctggacgtgttgaatcttctttctgctagagaattaaccacgagcgaattacactagtgttagacagtgtctggtacaaccgtacaagtgacaacattccactattaattagaaattaaactcttgttgcatggtaagaaacaatttgtttttaggttaacttttcaggagttatggactgagaggcccatacatctctccatggatatgaaacaatttttgatcttttgcttgatgccttaacatgccagaaataaaaatgctaggtgacattttctttcttttttatttttattatgctagatgacattatcattgaggcataaccgttgtattggtttagtattgccgttgttgcttctcctgaactcagggactttaattttattgaaccggcccctggattgaataaaaaaataaaattttgcacccaaaacccaaaacaaaaaaaaaaggaaccggatctaatttataccgagaatttagtcaaccggcccagatttcactaaattttgtgggtaagaaataaatcacttcaaaacaagaagagtaaaccgatctgaatattgcaccggtcagtcgttttcctacgagatgagtaaagcccaaaaacggaaacgcctaaacaaatacgacggcgaatcaaaaactccggccaataaatcaaccgtcgacggcggcaatccttaccctacactacttagacctactgctgaagaatgccgagacgtaagggatgctttgttgtctctccatggattccctcccgaattcgctaattaccgccgtcaaagacttcgatcattctccgncgtcgatgatcacgatacacagtgtaatctgaaatctgagacattgaatgaaacggaagaggagagtgtacttgatgggcttggtaagattcttctctcgcagaatacaactgagagcaattcccaaagggctttt

SEQ ID NO: 6027 - DNA, 1051 bp, Arabidopsis thaliana landsberg
tatgtaatctctcgttggaaaaacagaacaaagttaagatcgtacggtcaggatttgttcctctgttgatcgatgttttgaaatcgggaacgacggaggcgcaggaacatgttgccggagctttgtttagtttggcgttggaagatgagaacaaaatggtgatcggagttcttggtgcggtggagccgcttcttcacgcgcttcggtcgtcggagagtgaaagagcgcggcaagatgcagctcttgcgctttaccatttgtccctgattccgagcaatagaactaggctggttagagctggtgcggtgccgactctgctttcgatggtaagatcgggtgattcgactagccggattttgctggtactatgtaacctggccgcttgtccagacggaaaaggtgcgatgttagatggaaacgcggtggcgattttggtagggaagcttagagaagtcggaggtggtgattcagaggcggcgcgtgagaattgtgtggcggttctgttgacgttgtgtcaagggaatttgaggtttagggggttggcgagtgaggcgggagcggaggaagtgttgatggaagtggaagagaatgggaatgaacgggtgaaggagaaggcgtcgaagattctgctggcgatgagaggaggatgcggaggagagagtgagtttggggaaaatgcggaggcgcgtgagtggaaccgtatgcttgaagcgactgggctaagtcggactcagtttcaaggagggcaaaatgggggttttgcttattcctcccagttctagctttttttaaaaaattgtttttttgggcatctctttgttgtttacctttttttggtaaaatgttatcttatttttccttttttttgttttggtttgatataaatgggtgtaaattactaattttgtgtgaattataatatgtgattatggtttttttttccaatcaaatgacaaaagtgaattgtccatttgtttgtaaaaacatgtctaatgttttttgtaattttctatcacataatgttttttgcaattttctctctttacctttt

SEQ ID NO: 6028 - DNA, 1359 bp, Arabidopsis thaliana landsberg
  unsure (1)..(1359): unsure at all n locations
gaattctcttttaagacttatcaagaatttaatgaccacgtaattcacagtattttgctttttacatacatttaatgttgaaaacgaaacttctgaattattgttcactcttactagccacgacccacacgaacgttaaatttctatctaatatttttttttagttacagaagttacaacacatgttacatttttcttataaataaccaacgtatcaaactatacgtcccatcataaaaaatatcactacaaagaactttcagattccaccatacttcacaatcagtttgatgatttcttaagccaaaactctaaacgacgccgtccgatgaatctatcactcagcggtagaaagattgccatgacacgtgtttcggcggaaactcagtatatcactcccatcggatcaccaaccctcgacgagttgctgaaagactgcgacagtttccgaaaaggagattccggcgacggcgtaaaaagcgacgatcctgcacatcacataatagatgtcgaagccttgtacgtaaaacctgtcccgtacgtcttagcctttaacaatcttcaatacgatgtcacacttcgccggcggtttggcttctcacggcaaaacggagtaaagactctactcgatgatgtttccggagaggcttctgacggcgatatcctcgccgttctcggtgcaagtggagcaggaaaatcaacgttgatcgatgcactagcggggagagttgctgagggaagcttgaggggctctgtaactctaaacggagaaaaagttttgcaatctcgattgttgaaagttatatcggcgtatgttatgcaagacgatcttctttttccgatgctcaccgttaaagaaaccctaatgttcgcttccgagtttcgtctcccgagaagtttgtctaagtcgaagaagatggagcgtgttgaagccctaattgatcaattagggttaagaaacgcggcgaatacggtaatcggagacgaaggacaccgtggagtttctggaggagagagacggcgcgtttcaatcggaatcgatattatacacgatcctatcgtcttgttcctcgacgaaccaacgtcggggctggattctacaaacgcgtttatggtggtgcaagttttgaaacgaattgctcaaagtggcagtatcgtaattatgtcgatccatcaacctagtgctcgaatcgtggagttgcttgatcggcttatcattctatctcgtggcaaagtgtgttcaatggatcttcggcgagtcttcccggattcttctgcgacttcggtcgtccgatcccggagaaagagaacatatcagagttcgcacttgatntagtttgagagcttgaggatcccatg

SEQ ID NO: 6029 - DNA, 1807 bp, Arabidopsis thaliana landsberg
caagtagctgaggcagagacacaagagcgtgagatataacatatgaagatgttctgtatgcgttgtgcgttgtctctctcaagaaaatgtatcgttcttggataaaaacagggatgttgtctgcacaacaatagaacattgtggacataccgaacgcaaagaagcccattctctcttgtgcacctcttggagtgttgtcaagcctccaatatacagtagctaagagaagaccagtcaccatgacagtaccaatccgcattcctatgagctcaggcgtgcggatccagttttttatgtaccgtttagctaagataaacgtttccgccaatggcgggtttgcgtatgaagatactgtttccattgatataggattggctccagatgagccagagactagtttccctctagaaacacttgcagcgatggcttcttttagagatacgcgactttgtgttgtggctctagcagtttggttctgttgccacttttcgttgaattctactaaatctctggttccttcagaggatccttcaagctctcgaatgacatcaagtgcgaactctgtgatgttttctttctctggaatgggacggccaaagctggagaagaacgaaggaagactaaccggagatccattgaacacactcttcccgtgagataagatgataagccgatcaagcaaaccaatgatacgtgcactaggttgatggatcgacataattacgacactgccactctgagcaattcgtttcaaaacctgcaccaccataaacgcattggtggagtctaaccctgacgttggttcgtcgaggaagaggaggataggatcgtgtataatatcaattccgattgacacgcgccgtcgctctccgccagatactccacgatgtccttcatctccgattaccgtatccgccgcgtttctaagccctagttggtcaattagggtttcaacacgctccatcttcttcgatttaggcaaacttctcgggagacgaaactcggaagcgaacattagggtttctttaacggtgagcatcggaaaaagaagatcgtcttgcatcacatacgccgatatcactttcaacaatcgagattgcaaaactttttctccgtttagagttaccgtgcctttcaagctatcctccgccactcttccggctaatgcgtctatcaacgtggattttccggctccgcttccaccaagaacggcgaggatttctccgtcacgagcctcgcctgtaatatcatcgagtaaagtcttcaccgaagcggtctttcgccgggagaaatcaaaccgccggcgaagtacaacattgtaactgagattgttgaaggataagagaaacggcacagatcgtgtttcagccgcgggagcgagatccaatatgtgttgagtcggagcattttcgccgggatattttttccggccactgtcgttgaaatctttcaggagttcgccaagcgtcggtgactcgttgccgccggtgtgagaaatatctaaaatttccgccgaaacacgtggcatcttcaacgattaagttaactatttttggttgatggaagtttaacggtgtagctaaagatgaagctaactgctaacagtgtagtatcatagtagtataaaccctgagaaaaccataaagccaaataaattataaaatatatgtaacatacttacgaaaactggattttagtattcttgagaaaagtacgaactaactgcttaaaattctatataaatgtacgaataagttatatgaaaaaaactcacgaaattaagacccaatatatatgggataaattt

SEQ ID NO: 6030 - DNA, 507 bp, Arabidopsis thaliana landsberg
atccggcagcgaacattagagtttcttcgacggtgagcatagggaaaaggagatcttcttgcattacataagctgatatgactctcaacaaacgagattgcaaagcttctccgtttagagttaccgtgcctttcaagctaccttcggctatttgtcctgctaatgcatcaataagcgttgattttccagctccgcttgcaccaagaatggctaggatctctccttctttagcctctccagtgataccattgagcagtttctttatcttagcagggctatgtccgaaacgaagaccaaaacgctgttgaagagtgacgttataggtgaggtcgttgaaagcaaggacgaacggaatgggcggtatctcagattcatcaacatcgatcacggcgtctctttgcagcatctcgccggaagattaacacaaagcgctgtgttattattttattgttggagtaaccttgaagcttatttgaagaagaagctattcaagacaaaggaaattag

SEQ ID NO: 6031 - DNA, 2724 bp, Arabidopsis thaliana landsberg
tctaacgatctgctgatagcacaacaacaggcttctcatctgggaagctgagtatgagtttggcaacttgtatcatcctttctgctgatgccactgatgagccaccgaatttcattacacaggtcaattttttctcagttttgtttaacttgaaagtctctgaggcttttctctctagcagctccactcttcccgcttcacaagtaactctcagagcgatgttcttacaagaacgatctacgtttctagagaatacacgagcagaggacacgagtgctgagaagttgagcccctttgagctaaactcaatcctttttgagtttaaggcaagttctggtgttttaactccgtagaactgcattgaagccgccattactcaataagctctgaagaagaagattgtgatagaactcagagagactggctggctcttgtgatttcgacaaataatagagtatgcttgcttagtgcgcacacctgaaacgaagatccgtagaagcaaaacagagtcaaggctaaatgcatgaataaataaaaaaaatggatcttgcagagaggagattgagaattggcttatataccagttgacagggctcacgattgcttgatacaaagccggacaagctccgagctatgtatcaagacgagtatcgtagacggtcaagatcccaagctaaaaagattagacggctgcggagtgaactcggtctcggatgttaaatgtttataggcaaaggaaagaatcgaacgatcattcgacttcagtgttcttttccaaaatatgaatctgcttaataataattcaaactcctggtttagcacatatatactagtcgttttaactaaagttttgtttttttttttggttggaaaacgtgacatctacaaattccattagtgaacccttaggaggttgagggggtgttagcaaatggtaaatcgaaaaaacgtggccacctactcatagatatacatattttgtttgattaaattagcaataatatacaaactgcataatacgtggcatcaggtgtatcgtcaataatttccacatttagtgtttccttatgcaattacattcactagaggaataaacaatcgatatcagaaatactcaaatagataatggacgtccaatgtcaatgatgagatctaacaaactttgacggtaaagtcgagagacgaaaaaaaggaaagtagcaaaattttattttatatagtgattattgcatgaattaaatattgaaggtaataatgattcatggcgatatgtatatagttagtatttaaacagcgcgggaacaacaagaggcagttggtttgtatgaattgagagacaagggctttaatgggtcattagaaaaacgcccatgggccttaatgtcatatgtgggcattatggagaatagtcaagagaattccgaataaggccgaagaagaaagaaagatctctcactcactcagctctttggatccgccatagcaactctctcctcatttctcccggccatggagtctccaaagagctatgtaaatccgttctagcttttattctctcgctaattgccaaacagagatgtactatttctttcctctctaactcctcctgaaatggtgatatttgtttctccgtctacaacaagtttcatttgtttgaagacaaatggagtcactcatgggccaaactaaaagctcattaaaggccgaaatcaattattcttgagcctctactctcttgcctaagtgtatgtatgtggtttagctatataagatagcaactgcttgctgtttgagaaagcttgaaacatcacacattcgcctcgttgaaaatgaaaacagcacgacaaggggggagagagagagaccgttaagtcatgagatcttcgtttcggctggaaaaaggaaaagaaaaagaaagcacaaaaatctttggtttaaattctttctccatggacgaaccaccacaactactactagcttctctttgcctatggcggccaccggatttcacacgctctctgccgtcggattattcaacggagagaagcacaagcacccccttggagtaaccctacccccggcacgccgattctccgcttctgtcaccgtttttagctcgaggcttgtggactacgagcagccattcgttaagagcttctggaactacctcgaggcggctaaggatttcatcagaccggaagacaacggcccatctcgctggttctctcccctcgaaagaagcaaggatccatgtcacggtgccccgctccttctcttcctacctggttagtcccgattaattgagttagttagaaatgtgcaattgctttctctaattcggaaatgactgtcgttaggtatcgacggaaatggactcgggctaataaggcagcaccagaaacttggacagtgagtgatcaaaggacgtttctatcctttagtttttcttatagcggtggttgttgattcggctgagcgatgtttgtttttacaaggatgtttgatatctggtgcttgcacataccagcgagcaatcgctcttctttcacaggtatttcctctatttcaactcttttagatctttttatctgattctctaacactttggatgcttttagatctagtcgccatggttgaaagcactgtcaaatctgaaaatcaacgatcacctgagaaacccatatatcttgttggagaatctctcggcgcctgcattgcactcgc

SEQ ID NO: 6032 - DNA, 1417 bp, Arabidopsis thaliana landsberg
ggccaacgcccattaaacatatccgataatagtttaaccccggagagactcaaagtagagaaaaccctaattgtatataaactaaaaatacttccttatttctccacttcttcatcgccgtctgcacaaaaccctaatctcacaatctcctacgagatccatcagtctccacggtaaacgacactaatccatttcaatttctccatcgtcttctccgatcgaattctccatttacttatctgttcactatttttccagaaaatgaaggttgttgccgcatacttgctcgctgttttgagcggaaaagcttcaccaaccagtgccgatatcaagactatccttggatcaggttcgttttgatgaatcgcaatcgatttcattacaatatgattagattcgttgtttgagtcgctggagaattcgatttgaaatctttattagatagttgagaacttgcttaagctgaaatgatatgtatattagggatttttatggttcctatcgacttaaacggtgtttatgatagtcgagatgcgtaagtattgttaagagtaatgatttagtgaacaatgggatgcaataatgagtttgggatgattgatggaatgtggcattgttgtttttgtttggtgttgcagttggtgctgagacagaggattctcagattgagcttttgttgaaggaagtgaaaggaaaagatttggctgagttgattgctgctggaagggagaagttagcttcagtgccgtctggtggcggaggtggtgttgcggttgcttctgctacatctggaggtggaggaggtggtggtgctcctgctgctgagtccaagaaagaagagaacaaggaagaaaatggaagaatccgatgatgtaagtttactttccttctaacaaaagtcttgatcttaatagtagcttgaaatttaacctaaaaatgatggctcacttgtgtgtgtttttgtttttaatttgcaggacatgggtttcagtctattcgagtaagctggtagtagcatgaaaagtccggttttgttgtcctcttttaatattgtgaccttttgaaatctatatgttgttgttgtttagtttgtattcgatcatcttttttagacattgctgaaattctcaagagtttttgacccgaatgtcatttgcactttgttgttagcatttctgcttctatctcaatcgcctttgtcactctggagtttttagtagccaacaaaagcaatggtcctagtcatggtcttaaatcttgactcgaatggtgatgagatacctctagccttgactttgctaatgatacgttgtcgttcatttggaacctagattcagattcggcttacgtatgacttcaagaatagtattattgtaagaaaaggataaaaaaaaatttctagtcttgaaatgttccc

SEQ ID NO: 6033 - DNA, 1916 bp, Arabidopsis thaliana landsberg
ctgctttgccgtgagtgaatgcctcttgaagctgaagagcatactccaagttccacagtacatctcccattgttggcctatcgacaccgtagtcttctaaacacttctctgcagcttcagctatcttcttcatcgattcaggattaatcgttccagccaaatgaggatcaatgatcttttcaagaagtccttttcgtttccattgcatcgcccattcagctaagttaacctgctctcttggtagctgaggattgatggctggtcttgcgcacagagcttttagaagatcgacaccaaaggaataaacatcggatttgtcggtaagttgttgtcttctaaagtactccgggtctaagtacccgaaacttcctttcacggccgtgctgacatggttttgtccaaaagctacatctttagaaagaccaaagtcagcgacttttgcaactaaagcttcatcgagaagaatgttggtggatttgacatcacggtggataatcccctgagctgttcctgtgtgtaagtagtgaagcccacgtgcagatccgatacatatctcgagtctttgtttccaggttagaggagcaaggttctttccatacaagtggtccctgaatggaccattggacatgaactcatagactaagatcatctcagagttctcgtcacagtaaccaatcaaggagaccaagtgtctgtgtctgagcttagaaagcatctggatctctgtctgaaactcagtgattccttgttcagactgtggattacctcttttgacagcgactttggttccatcgtcgagggttccaatgtagacgttaccgaatcctccaacaccgataatctgggatgcttcaaagttctttgtggcttcttgaagctctgaaagggagaaatagcggccgagaccaagtgttgagttgtagaagttggatttctgagaaccacctttgcttgtcatgaaagtgctatcaccagcatgtattggtagcaaccaagaggagaaactatttctcttctgccaatcttgtggcctcttcttccacttgtaaaccatggctcccagaccaatgaaagctccaaacatcatcacaaaccccgcggttgctaccataccatgcttccccatgccagtggttctaccatccactccaaactctccatcaaggctgttcacggaattgctcatcttcagaacctcaacaccgttcaagatcgcgtttttggtccctgtatcttctcccatgggaccaatctggacttggagctcagggcccataagtgttgcgttcacaacgatgtctttgtagtaaggagcagctagattcccagcgacagtggacaaatccagtccagaaatggcagttttcccgttaatgtacacattaaagtacaggtcattgagagacttgctaacgatatcacagaaatgaagccggataaggtagttaaacgatgggttggaggggaaattccaggagacgttaaaattagggtctatggtgagagaattagccatttctacagctgttgcataaaccgtctgtggagcaatcaaaggtgtaacttccggtgggtacttgattgccgaaggggttgttttaacgtcctttgccaagttctcatctttcaagaattccttatcgggtatccaggttcttcctaatgtatcattctgaggcatgatcaagggaccgccgacattgactctataaacagactggtaagcgtagtcagacagacccgagaacccaatgacagggaaaagggcagtgccagaatcagagatcagttcgtctggagctgacacgacttcgatagcgttgatgaacgctgcagacctttccataggtctgaacctgagggcgaatagagcaaatgtcatgttgacgagatactccttctgaacagcagcttga

SEQ ID NO: 6034 - DNA, 2366 bp, Arabidopsis thaliana landsberg
  unsure (1)..(2366): unsure at all n locations
tcaaaccttggttgagttacttttgggaccacactcatggagaaacggttatgaaagaaattgcttggaagtagcctcattttagccataaggacattttgtctggttgtgctcaaaatctttgcggtttgctnnnnnnnnnnnnnnnnnnnnnnagctgtggatatatataggtgcttgtgttcattgagagacgccaagggagcataaagagagtgatattacaatgtagatctaagaagaagagttagtaaggtgtagagatgagagaaaacatgtattagtataagcttgttttgttgttctctgagtgatacatgaagtattacagagtgagtctaagtactagtggagggtattagacgggtaacttgtagcttcttgttttgtaaacaccttcttcttcatagtggagttggggatctgttgatccgaccggatgtagtggctcgttaacgccatgaaccgggttaacaacttggtgtgtgctcctgatactattagagcagtaaactagggatcaaacaatgtaataggcaaatacttgtattaatattgaaaggaatacaaaattgagagttttacaatggagtctctcccctcccccgtacactttcaccagattctggataccctctctctatgccctctcatacttcttatactacttttgtgatctcctcctcacgcaagtgcaccgttatggcgagatgcaatgagatgatgccacctacttaatcatggttattccttactgtagttaagtaactccaattaaaccatgactcttatctggaattttctttactcttcttaacccacttgacttcacttcacaggcttctgggccttgctcctcctttggtattgatatagaataggtgggtgttgggccgcatatgtatcagctcctctcttctttcttctctttctctgttctgtttcgacttcatcttttctatgatatgctttgctctgttttgctgtgacctgcgttgatgtttatgacattggttttaagcttgaggtgttatagaggttgtcaaaaaccctacagtggtatcagagcacaggttcgtgcgtaaagtctcaagctttgctctgaatcttcaggtttccgtgagaaagattcaagtttttccaaggagaaatgcaagctttgtcaaaaaggtcacgtctttatgaagtagaagcttctagaagagcggttttagaggagaatgatgaatctggttattatgtctcaaggaagatggaatgctatgctcgtttagagacatagattcgctgaagttgaaaagagaagaagatgtaagatttctgttgaaatctgggtttggcagagaaagcttgtcgtgagctctagtggtgttcagagataggcgacaagaaagacgtcgagattctcgccggagagtggctcgtgttttcgacaacgtcgtgtgagagcaatgacgccgtcatgagcagaacgagtccgagaagaaaccttaggttttgttgtcgaggaacagacatgcggtgagagagaatcgcggaggtgtggtgaccataaagtcaccggataacattgagacgttggccggagaaggtttgacgatgatcggcggtgagaagaagggatgttaggaaggggtgtggtgaccataaagtcactggtttttttcttatgactaattctttcactacatttgtttgtctcagctatcatatatagttgttgatctgatggtatggtggagcataaggacatatataaaatggatgtaatgaaattattgttatgggtttgttcatctttataagtttgtggtccaatgagaatgagtttgagttttggacacactagtgtactgctaagtggactttgaaggatgatcaataaaattcaaaactatatttattcaagagcttgttacaaagctagaaacattctaatctctaactagctttaagagtacaacactctggatcaaatatacttactgtaactcagtagcagcattgtctacaaggtatcaatagcctcaaatctttaaaacctaaatcctcttcaaatcttttgtgaacatcttcaaggaatttcagaacattagccaatgatccattgctttgactctcatctttctttgcttctgcgtccgaatcccacttggttccatcgactttaaaataaacgtatttggtgatctgcaacaagtttctcttgtgaaaaggccaaacatgaaccgtatcatccacaatgaccactctacgtttatcagccgcaagaagatcaagtgacttattaaaaggacaagcttctctagttataactcgtttcccaaagtatactttatcaggatcaatcagcttcaacacctgct

SEQ ID NO: 6035 - DNA, 1753 bp, Arabidopsis thaliana landsberg
gggaaagattcttgatctggctgcttactagagtcaagtttcttgatggcagctgcaccaccgcttttaagaacaccataaaacactcttccataagaaccctcgccgatcaaggtctttgaaccatagttatcagttatatctctcagctcatccactggaatggctggtacagaaataggctgcatgggaataacaggctggttcatgggtggatcagctctttggtagtggcctccattgtaacctttataacaattaaaaatcccattaacttggatgccaaaggatggaaactaacagaaacactgacaagtaatacagttgaaataggaactgagctacctgctgggttatgcgctggccttgggccagtgtcagtagcgttgcgaaaatcctcactcccacaccaaccaaaacagctcattacacccttctctcacacgagctaactaaacttctaaaagagaaaagacaaaatgtcaacaaaacagtggtaagaaacaaggtttgagcagcttctgaaacttattgataacaaagagattgttcagacacagacctctaataaacagtttgcaccaaactataggcatgaagaatagacacagaaaaatgaacagctttgcagagtaagattctagtatctcctgtttatgaaactatatatataaacaaggtaaaatacaagcacaataaacagttttgcaaacacgattcggctatctaagcttaatattacaaggtaaaggcacttatgttaccaacaaaagctagcaaatagtttccaaaaagaaaagattggaagaatttctctaagatgtgcaaatgagtaagcttgtgcatttggctaatcatgccgtgtgcacgaacatgaacatattcagacacaaattttcagtaaatggtgttgcaaaacaagattttctcatagtaataaccaaaaagaagaaaactttcagagaacttcacagagtagttatcagtaaaaacaaaaataagaatagttataaggataaggtttttgagcatttacaaaaacagaattatgaaaaatcaaaaaaaattcacataaataaagccaaatatcagaagaagtacatagttcattgttcatctacatgatgaaccgatcaaaatctcaaacaccaacaacaagaaagagacattttatgttccgtagacctagacttttcacaagtcaacgaggttttaacctaggatacagatttcaaacttgaaaaacatgaaatcaattacgatattccctttaatcatcaaaatcaacctgaaattcgaaaccctcggttcttaaaaaagggtttttgacatttaaggaaagtaccaaaaagagaaactcgtaacagaggaagaagaaaaagcttttatttacctttttcgcttacaagaaaaactacggaagaaattctctgtccgattcgaattctctctgtcaagacttcgatggtggttttagagactttagacgacaatttgaaaaagtgttagtgttgatgatgaatgatcgtctttaacacttttaaaacaaatatcttaatgatcactgttgcgtactttacttacttgcaaaagtgttgaaatacctaaatacccctaacattgttttagaattacagtcatatccccaaaacaacctttagtattggaacggaagcgatttctctctcgtcgccgtcgtatcaaacctcgccgccgtagccgtcaacgcatctttcatttcgggtgagccttt

SEQ ID NO: 6036 - DNA, 1997 bp, Arabidopsis thaliana landsberg
  unsure (1)..(1997): unsure at all n locations
actgctgaagagagcttttttcgtcaacgttcccgagtgacttggtttgcggagggtgatggcaacacacgttattttcacagaatggctgattccaggaaatctgttaacactatcactactttggtggatgattcagggacccaaattgactcgcaacaaggcatcgctgaccactgtgctctttattttgaaaatctcctgagtgatgataacgacccttattcgttggagcaagatgacatgaatttgctgcttacttacagatgtccctattctcaggtggctgatttggaagccatgttctctgatgaagatatcaaggctgctttctttggtctccctagtaacaaagcttgtggcccggatggctttccggttgagttctttaaggcagcttggagttgcattggtgctgaggtcaccgctgctgtgagagaattttttatttcgggtaacttgcttaagcaattgaatgcaactaccattgttctcattcccaagtttcctaatgcctcttgtacttcagattttagacctatctcttgcatgaataccctgtacaaagtcattgccaggcttctcacagatcgtcttcagaagctgctctcttgtgttatctctccttctcaatcagcttttctccctggaaggctcctcgctgagaaagtcttgcttgccactgagatggttcacggatacaattggaggaacatctctctgagaggtatgttaaaggtggatcttcgaaaagcttttgattcggtgcgttgggaatttatcattgcagctttgcttgctcttggggtccctactaagttcattaattggattcaccaatgcatttccacaccaactttcactgtctctgtaaatggttgttgtggtggttttttcaagagtgctaaagggctgcgacagggtgaccctctttctccctaccttttcgttcttgcaatggaagtcttctcaaagttgctcaattctcggtttgactcaggttacattcgctaccacccgaaagcttctgatctctccatctctcatttgatgttcgccgacgatgttatgatattctttgatggtggtagttcttccttgcacggtatttgtgagactcttgaggactttgcttcttggtctggactaaaggtgaacaacgacaaaagtcatttttttgtgctggtctagagcaggctgagagaaactctttggcggcctatggttttccgcaaggctgcctccctatccggtatcttgggcttccgcttatgtgtaggaagttgcgcatcgctgaatatgagcctctcttggaaaaaatctccaaaaaattcagatcatgggcaacaaattgtttctcttacgcaggtagagttcaacttattgcttccgttatctatggtatcgtcaacttttggatgtccactttcttgctgccaaagggttgcattaagaagattgaaagcctttgtgctaggttcctttgagcgggaaacattgatggtagtagaggagcaaaggtctcttggtctgctatttgcctcccaaaaaatgaaggtgggcttggccttagaagattctccgagtggaacaaaacgctttgtttgcgtcttatttggcttctctttaatcatcaaggttcgctttgggtttcttggcactctcatcaccatcttagaagcaggtctttttgggatgtggctccttccccatcagatccatggtcttggcgtatgctcttgttccttagacctttggcgnnnnnnnnnnnnnnnnnnnnnttgggtaatggccgcatagctcacttctggcatgacagttggacttcccttggcccgctgataaaggttatgggtgattatggctccagatcacttcgcatccctcttaacgctagggtggttgaggctcttggtgttaatggctggaagctccccctatctcggtctgctccagctcaagccatccatgaacacatctctaccatcatgaccccc

SEQ ID NO: 6037 - DNA, 946 bp, Arabidopsis thaliana landsberg
tattctgttattcgataatacaatcagatatctgatcagtatgtaatgttttcagatggagatcatcagtcaactgccggatgatttgctcttccgaacatcttgtctttctctactagaagtatagaagagacctttttttttttttttttgctaaaaatgttaagtttcattatatgaataagaggcttttacaaaaacgaaaggcctatacaagagtagccgaggcaaaaaataaaacaaggctacaatagagattttgggaagatataaggttagcgaatccaaagcaccatgaggttgcgccatctctttctgtggtaacgagaggagatgatgttacgaatctcgcggtcgacaatcttgaagatgataagaggtgcgatcctaagattgttatggaggacattgttgcgctgacgccaaatgttgtagatgatagcatgggctgagacttttctgaggagggaaggcgccgaagtagaggaagaacgcatccaagagaggagctctgcccaagagcaaaacagcctctgtcgcggacataagcgagaaaacgctaatctccaaacctgagccgcaaattcacaggaaaaaaggagatggtctctggactcagtctcaatagtgcataagcaacaatcgaaagactggatatggccccaagaggcaagcctttgacgagttgggagtctatccaactgactaatccacatgttgaaggcatgcttaggaacagcacccttgaaccaaacagcctttgcccagtccaattccggtgctcttggtctaatagcatcccaagtccttgccgaagagaaccttgacaaacaacacccgcaacaacccaatcaaaggagtcttcaattgtagcaggagagggggtcatgatggtagagatgtgttcatggatggcttgagctggagcagaccgagatagggggag

SEQ ID NO: 6038 - DNA, 1776 bp, Arabidopsis thaliana landsberg
agttgacaaacactcctgactaatttacttgaattcaagttttataaaattatgctgattaattaatgttttgaagaaaattatgtcatattaactttgtcttgtcgccatgtatggcgttaaaaccgttaataaaattagattattcaaaaattcatgtgcaaaacaaatcttcatcaggtctcctcaatgtcgagtgattctcttcctttacctcttcaatttccttcatcatcttcctggatttcgtcctcatattcctctaaaacccatacctcttcttattcctcttgctctatagaaccctggcggaaccatcgccaacctcgatctcgggagccattcgggcatcacattagcatattcgctagcaactagttcctccttgtcctcaacttgagccggagtcaacactgctaattccattaatgcctcctcagcgtcggctattgcctcctctccctctttcagtttcttcatcttagattcatcatcacacttctctgactctaacctcttcctcttgagaaccttaaccaaaccctcaagcgccgcatcaacatcttcatccttcattagttcctcagcgacttgagccggagtcaacacgtttccatcaatcaaatgctttatatccggatagagagggtgagtatcatcattttcgccagacaggcctaaatagtttgacgccaatgtgttaaatccctcaaaactacaatgtcccatgtaaattgtgcatatccatacggcctggtctgagcaatgccggatccagcttctccttgttgttagtcgtaaatattataatacgttcgtttccacaacttgaccataacccatcaatgcaatttaaaagtcctgataacgtcaatggttttgatacctattcacataaaaaatgtttaagatcggctcatatattgtttgtacgaaaaataatgatataaaactcaaaactaaatccatcgtggagaccaaacctggacagcacctagcggttggctcgtttcggttggaggttgcaaccttgtaggcaaatccacggagcagtctatatcttctacaagaagaatcgagctgttattagtggcaagaagcaagcttcgtagatgggcgtctccctgaacgcttgcgagctggagatcatagatattaaacttgaggtagttagccatagctgccactagactagacttcccagtccctggtggaccgtatgacaagtaacccctcttccaagctttcccaactcttttgtagaaatcttttcttccgacgaaccgatcaagatcttcgatcatagaacgcttgagatcgtcgttcatagccatcgtgtcgaatgttgaagggtgcttgaagttcacggattgccatgtttgagccatgtgcgagtagcaatgcatttttaggattctacgcttgttgttgacttcctttgccttgctctccacgtagggtatataggagttcacgaccaagtctctgtgtttcttgtcgaagctcagctccaaagattcccgttgaatgtttccctgatagctttgtccatactcttcaaccatagtattattcttgtttttagcaacaaacctccacttgagcttaatgccattgtagatatcggagacaacctctccatcggtaaggtataacttgactttcttctccgcagggtctctagccataattagcctgacagaatttggacttatcttagtggagagataagcctgagcagctgcgtaaagctcgtcgggaataaacatccaggac

SEQ ID NO: 6039 - DNA, 5721 bp, Arabidopsis thaliana landsberg
tttattagtatacagaggtccacaccacacatacacgagttaggcaaagccgttcaattaaagagaagatttagaacaatattaataagaaaagctttaaagattctagatcaagtgtactgccattgatgaactacatcaaacttttcttcattctaaatccggcttttttaatctaacttctagttgtcttttcttgttttcttagtgctgaaaataaactttctgtactattaagggaattaataataaccgtttgggaatggtagagatgaaccaaggaatcatttgagatggaatcagccatctttttatctagaagaatctttgtttttgtgtgtgtgagcctatatgtgatctcaatataattggagtcattatgaacttaagtacttttaatttcttgaattatgccgctcatgatatgaaaatgatacaaggtgacgaatcaaatatttcaattgaaggtttccctcaaagtgacaagctttgccttcactattgaggaaattaacagttccacgtcaattttgcaccttctctgtttctacttctctcttagttttttgtcattttcttgttgcgataaccaaagctacaagctgatccaaccgataatcaaaaggagaagaaaagaagcggtatttctagtcgattctccgatagccatagccgcgtaataagaattcgctaatgacgcttcttctatcggttgttgtatctctgtactcgagtcagttccagaaccagattcacctcctgtctcttcaggaggtggttctttcgaagacttcaaactgtttcacacaatacaaatacataatcaaagctttgatctttataaaccaaactctgtctttctttaactgttttaactaaatctaccttgacaatttgggacaaaaagtgatggtgtaatcagcaccactacaagtgaaagtacttgtggcataatcatacgcgtaactgtacgatttaggacaagctgacttaaaaacttgtgagtacatcgacggcttgcagctatctggtgaaccgtatgcgccactgcagcaatattccggtcttccaaacgcctcacacgcacttctacaagccaaactcctcttggctttgagctccgttgggcaattctggtttaagtccgtgacacaccctgtggtggggcacaaaccagaaccctccacgatcatggggaggttatagccatcaacaaggctgacatcataaaagtctagagacccggaaataccgagagtgaactcggctagtgtggctggcggttcagctccggatccattacattccatctcccctgagccgcaatctccggtggatcagctcgtggtactactagaaccatcaaagttgcagccagtacggccccaaaagcgaccagaccaacctgctggtgctcggaaagtgcgagaggtatctttggagagctcgaatccagtggaatcgagtttgggactacctgaaccggataaaatccctggccacactgggaaatcgcatttgttaactagcgtgaacgttgtacacttaacacctttagggaaaacaaaaacagaggaaaaaacaaaacgagcttcagtagaatttgaggaagagtgaaaaaactgagatgaagaaaacgtaaaaaatcgctgaccatcacggagcagcaagaggataaatccaagaacagaggcgtaacgtgggagatggagactgaacagagccatgagaaggagacaagaagactgagaaatcacagaatctcaaagggaattggttgtgagtgagagagaatctctaatcataaggtccaagtatgtttttcctctgcaactgatacttgctttgtgttatttttatatgtcaatgggaattcgattgtgaaagatgtatgaataaacaaatatagcaactttttgaaagaaaatgttcgccgccacactatgaatatagcaacttttttttatgtgttttattgtataacctaaacactgtgattacccgccaattttaacagatatccttgaagtttaactttaattaagataagttgattttgatacctaatgataagtctcttatctctttgcaagcatcaatatacttggctagattattatatggctttataatcagacttcaaaattgtaaagtttatttgtttaagttcttccatttatttatttatcattttatgttattttaaaattttaaaacgcattaccaatcaattagttgtgcaagcaaaactgttatatatcttacagagacaccataaagactgaacatttgtctaaaaaattacgtagaaactaatagtaatactagaactaatccaatctaaaataagttgttcttctacaaattatcacctagaataaatcactcctcgactaactaaaatcttctcttcaatgatcttttctttctcgtcgaatgattgagattgatgttattaaaaacttcaaacgcagccgtacatgaatcacaaaacgcgttgcatcacccaagacgcgacagccaaaacgccaatcgaaaacacggcagaaagagttggcgacgcgtttggagatgccttagagtagctaacagctacgggttggactcccttcgttgcactcttcacactgaaagacaaattacacaagaaaacaaattttagtatcaccaatttattaaagtaacgttttctataaaatatatttgaactattttgcaatgtgaacaaaagagccgtgttggaccacggttcaccgacgtttgaatgaataaaaatctaaatgcatacaacagagaacattagatattttttctattttcatttattttggttgatataattatgccaacgggtgaaaatgtgaatgtcgtcttgtcatatgatttcacaaattgacaaaagaacacggaccattatgaaaaagtatgttccatgatttttattcggtgattgacctcaaattcaaaacgttacacaaacaaaacaaaaaggtgaataattcatctccaaccaacattatcaaacttttgaatgtgataaaaaaatcgaaaccggacttcttctaaaggaatcagaaccaaacttttttcctttttcaatatgatttgatcagatcatcggaaccaaccttttctaattagcaaaaatataccatttttttggaaaaaaattctaactcgatttttatactttttggtgaataatggtaatagaattttttttaccttgggttaggagaaggacagaaagtgatgacgtaatcagctccgccacaagtgaaggtactagttccgtcgtcgtaagcgtaactataagctctcgggcacgcgtttttgaaaaactgtgagtactcgcttggcttacacgtgtccggcgttccaaacgcgccgctacagcaatactccggcgttccaaacgcttcacacgcgcttttgcaagctactccttcagctcccgtcgtcgccactttcagctgagcaggacatggaccgttgagctccgcaacgcaaccggttgtcgtacagtttccggcgacgcctccggcatctcctccaccctgagggacgatggtcatcgggatgttgtaaccgtcgacgagactgacgtcgtagaaatcgagaccattagctccgtttaaggtgaattcagcgagtgtagccggaggtgcagcaccggatccggagcattctacggtggaagaaccacagtccccggtgatgcaagtgaatcttccggtggttgcgtcttgtgtgcagagagtacgaccccaaatacgaccggaccaagctgcggggatcgggataacacgtgtctcggtagggtttaaggagaatccggttgtaggtaaaggagaggttccggcgccggagagaagtccaggccagacggtgtagctacactggttaacgatggtgaaagtggtggaggaaactccatagatgaaaacaagaattagaagaagaaagagagaaacttgagattgacccattagagcagagagtcaccagaatctaaatatatgaacttttgtgtttttatgtcgccggagatgagtttaccggtgactctgtttctgctctcgagagaaatgtataaagagtgcaaatgtgaaggctttgtatttatatggtaatgaaagaaattggagtgagagagagaggtttaggggatggttgaatcttttaaagggcttggagattttttagaaaggtcggcttcacgtgagcccatgccgcctttgtctaagttagtcggccaatgtgtcgttcatgttcacgttattattatttttaatgagcatttatatgtagaaacatttcttttgaatcatagaaatattattatatcatgttcttaattgtttgttttgtatgattcgtgcaatatgacaatatgggttgcatatggatattgatcagtcttgatgtcggtgatctaaaatagaacttgtctcctcctttggcttaaataatatattagacgatccattacttcgtttgtagttttctttttctttaagtaaaagagcagagcgagaaaaaattgtttagtggtttatcgatcactaacgcagactaatcaccataaaatggaaatgtattgaaggaaataaggtgaacaacaaaaaaggctgacaaagaaaacgtattgtgtgatgccatccttagattctgccctcttctttcttccaagggacacggtcttacaaagtatctatagctactatccacccaagttgtgttgtgtcactgttaattaattattacaataagtacaagatgacaaaactaaatatgatgatgtttgatatttcgtgagactctcaaacatctatctctctctatttagaattcaagcaggaacatacaatacagaagttcaggagaggaatacaatttttttttttttttttttttgagttattattggaaagagatacagtggctaacgttggatgagaatttccgtaaagattgttttataaagaaagggtgttgggtcaacgacattccaaggtttagttgtgtgatgtagagatattaacttggttggttcatgcttcttccattgttacaagttatttatgttttgactaagacatgtaaccggttcttatgttcaaataggaaaaacaaatactacaagtggggtaggtctcatgtatgtttctactatgcaaatttattgaatttgatcttctttccaaacatccaagcaaaattggtatgactgattagagatttggctatatagttgcgtttatgtttagtgcatatttctataaaatgaagtataacctttaaatccatgtgtggctgaagatccgagtttttggatgtaaaactagtagaagttgcaggttcgattgcacttggaataaaaaaaaaaactgaccaaatatcaaaagaaattgatccataaccttaaaattgctcattaagctaccatttcaagagacatctatatgacaatggaacttaataccatgaaaaatattagtgattaatgcgatctgaggtgattagcaaggttttcgttgattggatccaagtgatgatataaacaaggagatgtggatgatgtttaacctaatcaggtttttatatgtggtttattactataatcttctaaccaatgatcatatgattttgtggctttgtttggacatgaaaaggtgaacaccaaactttggtttccagtttcttctatcaggaagattg

SEQ ID NO: 6040 - DNA, 2721 bp, Arabidopsis thaliana landsberg
  unsure (1)..(2721): unsure at all n locations
ccaaggtattcatgcttacttacactgttctgtaagaaggaaaaataattgttcttaaggcaagttcattctctaaacatagattaatctttgaaggacttatcagtttaacaaattttgaacctaatatacctttaagaaagctccccaaccagaaatatcagatattccaagtaaaacctgaaattaacataaaaaagaggagcaaatttagccatttcatgtttaatcatttgattgcagatcatagatatttagttaacaaggctaagtatttaccctttgttgttgtttcaggagcaatttcatattcctgcactcataattatcgcctctttggcttgggaccccaagcgaaccatccccaccactacacattcaaattcattcagacacagtataagtgcatctggaactactaaaaaaaaagttgcatttcttgagcattttctaagaaaccaattaggatggatttgcatccccaataagacttacatgacccagcagtttctacaaacatctgggtcacattcccgatctgcagcaaagcatggacactggcggcttcgacactgacttttggcacaatgacaacctctaaacctattcttgcagctctttgggcaactacacagaaaatatagtttgttggtaatgagattcaaagctaagaaatacagatgtggataatcatagattacattacccgcagtacttctcgcagcaagtcccgtttagcaaacaaggacattccttcccacaagcaattttgcagttacatggattaaactgacggcagggctggactttcttctcagcaattcttttcctaattgaatgatatgcagcacacttccaggtatacttcaagcgccgcactttgcctctcctacgtagaaatcttgaccttctcctcacttggttattaacctggttagtccagaaactaaagcattaaatctgaagagaaataaatcgattttatcaggaatttgtaaacaaagtcaaaaaggtttagtgttaatataccatatttccattgatatcgaacttggaagagccatcaggattcaatccatcacctccaaagaaggaagctttattttccgagcacgtcatgtattggaagacctcccaacatgatttgaaaccactcaaaggatttctagcaatcaagcagctgcaaagaaacaaagaatccatatgactatattccacaaattgaaaaacctgaagcagaatgataatttagcagtagctaaatacatcaaaattacccacctattcattccaaaaatctcaacacctttatcaaaaaggcttttctcaagtggtctccacaacttatttgtagccaatcttcctcgagatacagtttcacccataaactcttctttccttagactttcatcactacccggcgcatcaagctctgacgcaacctcatttgactggcaaacaggaacgtcatccttcacagaattattggagacttcggcaggagtgccattcttccttgacttcccggagttcccagattttacatgcttctgagaagaggaagtagcatcttcattatctttatgttttgcannnnnnnnnnnnnnnnntccactggcgatggaatcactatccgaggcttctgtcttcttctgcctcttctgagtcttacgaggaactcgctcagcaactcggttgttgttcctcttacgacctactcgtctcccactacctttcacctttggcgatgatgaaactttatcggaattggtatcctgctgtagtccattctctgagtcacttgtttctagtgcgcacttttcattagacgatgcactttcacttgggaaggtctttggttttctcccattaagtttgctggagaacttcgtgggtgtggttttagtacctgcaccatctgatgaagtgccagttttaccttcaatggggccatatcccggaaatcttccagacttgagaagctgataaattgaaaacaacgctttttgttaaaccagtctttctaggagatgagcttagcaacgagaaaataacaaatttaccgttttatagcagtttgcaccacaggttaaattttcatctacaggaggacaccatggagctggtttctcagcctaaaaatccataaaattagataagtaacactaaagttatagtaagattttttcggttggcactaaactcaccggaaaaatgagatcctgtgaacacccatgaagccggcaatcaaatacctgcatagatgcatacaaaagttaaaaagagaccaatgtttgctcgatcattaagcaataacccatgaaacattagcctgagaaaatcaaatggactaacaaggcatctacggcagaacaggttatcgaaagaatctaatgctccttccatatctttgttgagaagggagctctctgcttgattatcgccactctcggatacttctttttccttcataagcactccatgtcttgcctgtataagatggtcggtgttcatatctctgcaaaaagtcaattgggaaagggctggaacaatactaattggatttccttaaacaatgcatccctcactctgttttgaaatcctacaactgaagtgcttgattctaaagaaaatagcacatgatagttcacacaagcaataggcagagaaaaaagttgttgataccttgatttcactagtacttctagacaagaaatttgc

SEQ ID NO: 6041 - DNA, 4450 bp, Arabidopsis thaliana landsberg
cgtatcacgtatgcataaattactcgttctttaacttcttttagctaaatgttttaatattacaaaaaaaaagttgtaattaaaaagcatatcttcaaactaaataaacccagtttataaaagagacaaggaagtgtgaaactaaaataataggcaggacatgaaagatagattcatttccaatttttttgtctgaggaattaattttacatgatgacactaattaatgattaacaacaacaatctctagttaaaacacacacaaacttaagagtaatagtaaatttgagccatgcgtatttttattttgaaggtgatagtacgacgcggtttcttgttttccctcgtcgtgctccatttgctgtcctctgcattctatgctacaaaacgctgcgtcccctctacaatttattcacgttacaaagaaatatatcaatactactttgtgatacattagaaaacgaggaataaatcattgaatccctaccattggaaagatatggtgttaaaaataaatttcataacttggttgtagcttagttcccttgattatatttttaaaaaataaccgctttcaattttgaatgtattatataaaacaaataacttgttcaaatttaaaaagaaaaattattttaaactattataaattgagatcttaaaactgaagacttgtaaaaatgaaaaataattaagaaaagagtagttagtatatgtaaacatacttgtacatgtaaatatcacgacccggagctagaccgcgtttgcaaaagccacagtttacaagaaaagacgacggtgaggatctcccaccgtattttctctcgttcctctggtgatttaccggcgacaagaaccgctggtcgtaattatctccgccgtcaaccaccgtcatagacacgtcagagtcttggccggcggtctgatcaccatcaacttcgatagtgatcctcgttatgcttgctgttctctgcatttgaggccgtggtcgattccctatcaacatattattgttcctataaagaaaaagaaaaacttttttatttttctctataaaatttagtttgttgcttggagaggggaattgtgtgttacgatgccaatcagtttaaatatagacgcaatcatatggtgtattgattatttaattcgtgcctacgtatttacttgtaatgcttaaattttatatgatatgattaaagatacaattattattcgtcaggtctttataggtaggccaataatttcagatatttggtctgtggacaccaaacatccctccgtagctatattttattttcgacgagaagtgatttattaatttttttaaatatggattttaccatttctattcattttataaaatgatatctcctagatatggtacaaggagtaaggaattttttatatatgatcttcaaaagaatgcctaaacctttgtatttgagtgttcatatgattcaattcataaaaatcatgtaaaacaacatttcccaaaaataatagtgtcgacattataatgaaaaagtaacatacttgggggtgtgggtgggtctttaagaggcattcgtacgaaaagtcaaggcttgcaagattgcttcaattactaaaaatgtatcgtagggattataacagtatcgtactcattaagtgtcctttagacctttactgttactgccactattttcagttatagtagtacttggaagaactttgagacagttattgtcatggtaggatttgggcctaggaaaagggaatagtgtcattcactgtttcaaagttttaaacttttggtagacactattatactatattactctccataccatcttacaatatgcaacagcccatatctcacttttaagaaatgttaacctccattctttcttgtcccttgtcacattctaaatgaaaattataaagtcgagatattttaattttaatatatgtagagaggctaaataaagcccacgtttcaaggagtcgttagagagaccctcgaaactaaacaagagtgatttgctcaaacccaaagacaattacacgattctccatacaaaagagttccctcccttaggtggcccaattacgttaaagtagcttaacctaaacttaaaccgaattatttttaataagcgtttctttttgccgtagactttttttaatttttttgaacctaaattataaaattttgaatccaatctttagtagagatgactatggaagatttaataatgtaaatcgaaaatcacaaaactaaataaaagcaggaatatatccgttaagctgttgacttggttttccctccctctctttccccagctcgatcggaccattcacaaccataaccggaaaaaaaagagtcactaggtttcacataactctcgtagaatcgtactgtaatccaattaccgaagttaataaatgagaagaaaacaaaaatattcaaagtgtgtagctttcatgttcatattcaataaagagtaaagaccataactacagattttgtagcatctagagagagagaatctgaaattgttgctgctaggattttctcactgctttaactttttattttctagctcagcttttgaagtaaatgatctgtattggaatgaactaaaatctctgcacttttttttcctttactaatgttttatcttcttctcgtaaaacgatgcaaccaagacaaaacttctccacaccctctctctgtctctctctctctctctctcaccattttgtctgatcaaagctcctttttcaggtttctccttgaataagcattttggattcttccttatatataaattccccaactactctcctttccgcatggtgatagctacttctcactctcttcttcttaattctcacaaacgccattaaaggaaaacaaaacaaaacaaaaccccaaagacttgtcattttctttttttttcgaaatgagttctttagtttgttctgttttgtaaccaccgtgagagatttcagggtagaacaaatccaaagtttcgatttttattaagtttttctccatgggtcattcgatattggagaaaatgggatgttcaaactcgaaagcatcgatgaataagaagaacgagccgcttcatctatgcaaagaaaggaagagatttgtcaaagaagctatggattccagatgtgctttagccgctgcacacgtgtcttacatccgttcactccgtaacatcggagcttgtcttcgtcaatacgcggaggcggaggctgctcatgaatcatctccgtcgttaaccgccactgagcctgagaaatctccttcttataactcctcttaccctgacgattcggttgactcgccactgagtcataactcgaatccaaaccctaaccctaaaccccttttcaatctaagttacatgaagacggagacggctagttctactgtgactttcactattaaccctctgagcgacggtgatgacgatctagaagtgacaatgccggcgttttctcctcctcctccgccgcgtcctcgccggccagagacgtcttcttgggactatttcgacacttgtgatgattttgatagctttagatttgtagggctaagtgaacaaaccgagattgatagtgaatgtgatgcagcagttataggattagagaagattactagtcaagggaatgtagcaaaatctggttcagagacattgcaagactcgagttttaaaacaaagcagaggaaacagagttgtgaagataatgatgaaagagaagatccatcggagtttatcacacatagagccaaagactttgtgtcgagtatgaaagatatagaacataagttctttagagcttctgaatctggaagagaagtttcaagaatgcttgaagttaacaaaatcagagtcggattcgccgatatgacaggtatgagttctgttttcattgtgtaaatggctgttgaaacctgttgttgattcgtgagtgtttgttttgttaaccaggaaagggaaattcaatagcgtttcttgcagctttgaagcgagcttgttgtagagggaaaagttattcaccagtttctcaaggtaaagatttatcatttacctgtgtctttgctatttttggttttagtgttctgagttaaactttaatgtagagccattgagtcatcaagttactaaagtcattgtgtggaagagaacatcgtcgtcaagatcctccacttctagaaatccgttgatccagacatcaaaagaagatcacgatgatgaaagtggaagtgatttcatcgaagagttttgtatgatctcaggaagtcactcttcttcgcttgatcggttatacgcttgggagagaaaactctatgatgaagtcaaggtaaaaaaatcatgactctatggaagtgttggtgttgtgcttcctcacatctcatttgtttttctttttatgcaggcgagtaaga

SEQ ID NO: 6042 - DNA, 795 bp, Arabidopsis thaliana landsberg
gtttgctaagaagtaactcataaggtgatttctctcctaacaatggtgatggtaaatgatttatcaagtgagcagctgtaagcacacaatcactccaatatggcaaaggaacattcgactgaaataacaaagatctagccacatttaaaagatgctgatgctttcgttctacaacagaattttgctgaggtgtatatgcacaagaaaattggtgaatcatgccatgttctttaatgagatcaggaaaagctaattcaggagcattatcagaacgaatggctttaatctttgcattatattgtgtagaaacaaactttaagaaagatggaaaaacaacagaaacttgacttttattcttcaacatataaacccacgtaacacgagtacaatcatcaaccaaagtaaaaaaatacctataaccttctacagactcaacactgaaaggaccccaaacatccaaatggacaagatcaaatggattcttttctatgttattatttgaaacataagctaatcgtttttgctttgctaaaggacaaattgaacaatgtaaaacatcaggtgaaacagacttcagagatggaatgagactagcaagcttctttaatgcaatggatgatggatgaccaagacgatgatgccaaatgagactatcagcaacaattgaaccagcaaatgaactagcttcaggaaatgatgggatgagagatgtgtcctgtgtttcaagaatatacaaattattgtaaagtttacccctcccaatcatcaagccccgagaaagttcctgaatgtaac

SEQ ID NO: 6043 - DNA, 911 bp, Arabidopsis thaliana landsberg
tgagcagactcgtcgtcatattttgatgttgaagccaattcctactattgaggaggctttcaacatagtgactcaggatgagaggcagaaatccatccgaccttcttccaaagttgataatgttgctttccagactattgcttatagtagtgaaactcctatgatggagaatggtgactatggctatattgcagcttataatacagcacgaccgactcagaaaccaatatgttctaattgtggaaaggttggccatacagtggcaaagtgttacaagatacacgggtatcctccgggttataagatcaatgctaatgcgaatactactcgcaatgttcaacagtttcaaccacggatgcagatgacttcatatccatctcaaccccggatgcaacaacctgttgtagctcaaatgcaaatgacacagccacagatgtttgttccacaacaacagttacaaatggtgccttatccaactgcaatgcaaactgcaaatgcggcttattctgagaatggttcttatgtgccaatgatgccacatgtgacaagtggagggaataacctgaatttacaagatcttactcaagaccagattcaacatcttatttcacaattcaatactcaagttagacttcaagagcctgcagctacttctaatggtgcttctagttccacagctacaattattgaacatggtctaatggctcaggcttccacttctggtaacattccttttccctctaccagccttaaatacgagaataatgatctcactttccaaaatttagctctttcgtctatacagaaatttttagctagtgatgcttggataatagatagcggtgcttctagccatgtttgatctgattcagcaatgtttagagaatcgatacctgtgactggtgtgactg

SEQ ID NO: 6044 - DNA, 3652 bp, Arabidopsis thaliana landsberg
gttctcgacttgtttctcgattacctgatggaaggctttagcctcaatccatttggtagaacagtcggtgaggaccagcaggttttttagtctcttcttcccaccggaggcttccataggacgtacgacgtccatggagcacttcgtaaatgggtaaggggaagatatcgaggacattttctcgggaggttgatgaagagttcgtgcgtgtcgttggcatttatcgcacctgagtgaatgagctacgcaatcgactagcattgatggccagaagtaaccttgctttttaattctgagggcgagggtacgtccactacagcggctaccacattgcccctcgtgcatgcttttcatgagatctttcgtttgttgcccgtaggtacacatcatgtacggacctgcgacgctgcgtttcatcagtctcccttccatgatgcagtaccttgcgctctcggctttgagttttctggtctccagcttgtcgggaggtgtgatccctcgttcgatgtaatcgatgattcggattctccagtcgttgtacggttcaggttcgtacgaggcaggttgttcgggggttccgagctccggctcttcctccgctgcatctgcctccgcggctgctgcaagggttctagccgcggcggtggtgcttcgggttactcgcgtaaagttgcaagttgtctaggtttctgtcccatcgtgtttgatcgttaggtcgatgctcgggtgttctattccttcaactgggataattcttttgacgaaaggatttgacgtggaggcgagagctgccaaggcgtccgcagaggtgttttctcctctagggatcctgatcagttcgacgattcgaactgttgggtcaagtttttgactagttcgaggtacgcttccatgcgctcgtctttagcttcatattccccatggaattggatggtgacaagttggaagtcgctatgggcgtgtatatcgcggatccccattctttgagctagcttaatgccagcaatgagggcttcatactcagactcgttgtttgatgcgccgaatccgagtcggaacgattattggatgacttccccggtaggggaggtgagttgtattcctactccggatccctgtcggttggaggagccatcgacgtggaggagccatttcttattggagttggttccatccaggtccgctaacgggagctcgattacaaagttggctaggacttgtgctttcaagctggttctggtgcgatattctatatcgtactcacttagttctatagcccattttgcaagtcgacctgattaagttggactgtgcagaatggttttgattggttgagacgtcatcactacgatgggatgtgattgaaaatatggtctcagttttcgagctgacatgactacggcaagtgccagtttttccattgctggataacgagtttcagcgtctatcaacgttttactaaagtaataaatcggtttctgtccttcgtgatcttctctcaccaggacgccgcttatcgcggttcgggagactgccgtgtacaggtacaacggttctccttcttcgggttttgcgagtataggtggttctgacaggtacgctttcaattatttgaaggcttgctcgcaatcctcatttcaatcaaactttttatccttccggaggagctgatagaaagggacgcatttatcggtagatctggatatgaacctgttgagggcggcgatacggcgggttagtcgttggacctcccgtgccgtttttggcgatggcatgtcgatcaatgctgcaatctgcttaggattggcctcgatgcctctttcagttactaggtattcgaggaattctcccgagggaactccgaaagagcatttttcggggtttaatttcatttcgaatttgtttaggattttgaagcattctcttaattgcgggacgtggtctttttcgcgagctgacttgaccagcatgtcgacgatttagacctccattgttttacctagctggtcggcgaacattctgctcaggaatctttggtaagtagctccagcgttttttaaaccaaaaggcattactttataacagtaggtgcctcagtcagtaataaaagctgttttttcttggtcatctgggcgcataagtatttggttgtacccggagaatgcatccatgaaggacaatagtttgtgttccgcagtggcttcaaccagtcggtcaatatgtgggagagggaaactgtctttaggacatgccttattcaggtccgtaaagtcgatgcacactctccacttcccatttttctttttaacgacgaccgggttgacgagccagtcagggtattttacttctcttatcgatccgatcttgagcgatcgatcgacctcatcgtgcaaagctttagccctttcaggacctagcttgcgacgtttctgctttataggtcggtaggtcggatcgacgctgagttcgtgtgaggttacttcgaggcttattcctcggaggttcgcacttgaccatgcaaagttgtctttgttttctttgagaaaggttatgagatcctctcgtatcgctgggtcgaggtcttgacctatcccaacgcatcatttgggatctgattcttctatgcagacctgtgttatcaatgattttcgaggtccgcgttgagaaggatcagaggatctgactgttttcatttccgcgagtttgtcttctatcattagtactacggggtcagcctttttgacaagctcgtagctgcccatatagcattttcgggagctgcgttggctgccgtatacgactgttattcccttgtccgaggggaatttaatgcattggtggtaggttgatgggacggctttcatggcgtgtacccatggtcttctcagtattgcgttgaaaagagctttcttgtcgactacgaggaaactcgtgagtcgcctcactcctcgtgcgatggttgggagctggatgattcctaaagaaaaggtcgtatactagcaaacacggtaagtggcattttcctgccttgcagctcggaatcgtggtgtcccatttttttgaaggcgtcgtaaaagagtacgtcaactgagcttcctgtgtcgatcattatacgggagtgttcgtagttgcctacatcgattcgaataacgcgagcgttatcgtgaggtttatcaaggtcggtgagtttcactttcccaaaatgtgatcccatcatcgggcttttgccttttgtgcaggaatctgctttcttttgatgagttttgatcgagttgatcgggtcgttgcagagctgagatcttcccatgatgaaatcgatgcgtttcggggagaggtgcttggttacgtttctgcagaaatttgggaggcgtaatgggaacctcgtgtttttcttttgcgcggcgggaggaggtgtagtgactgacttttctgtcatgcttcctagattgagttccgcaaagactagatcccgtttctttccgggcaggtgggggagagtcacctccttctggtgttcggtcccgtttctttcactagggagcttgttcctcctcctgttcggcgggaggaggggtttcggctttgcagttcaaatcttgtttagttttgccactggctgggattagttttttaacggcgcgacattcctcgg

SEQ ID NO: 6045 - DNA, 1306 bp, Arabidopsis thaliana landsberg
gaatctctgttcgcccactttgtgtaagtttcatattagatggtctttttccattgatgctaaaaatagtatttcgggtaaaaacattattgacatttttttttttggacatatcgtttgacttcatctatatatgatttagtttgcaaatgaaagtaaactagtactttttaaaagatctgatacttgtaaatttgttatatgttatatactttttagtttttacctttaaaaagtctcaaaatataataaatattataaaaaatcaaaaattataaatattttcaacattttatgaactttaaataattataatatctaccttttaataagtataaataattataatatttgcattttgaattttttaaaaacatttattatattttgaaactttttaaaggtaaaaaatacatagtatcatataacaaataacaaataactcgtctgagaaaaacttaacccgacaccactacaaccatcactttgccgcttgtatggttcaccaccataacctttcgaagttgtgataaaataattaagccatcaaacagatcaaatgtttttttttggtataacgctaattattcaacagtagattaaaatgactcatcttatatatttttattaacattcgagataatctataccttaattttatagaacataatttttaacaaattaaaaaaaaaatgctcaacgacaaagaatcgattacatgttacaacttacacaacttaggttgcgcatcactaccaccagtgcaccatggctactccgctgcttttaaagctatattttaccatataaaaaaaataaatacaaattgatatacttacataaataataccaaaattgtaatgagataaataaataatactataccaaatgttttcaaacatgtaataattcagttttttttgttgtcataaattcgtcatatttttcggggcttttacaaaaataaggacattttagctcaaatatttgaagatgggcattttcatgtgggcttatgtaaatgggcattttttttatcactagacgattttactctgattcagcttcttcttctttttcatcgatctatttctatttttatttccagatgcttcatagatcttcttctcatctattaactcaacaaatccaattaattacgttttttaaaaaaaaaaaatatacccctaggggatgatgtttaaggaacccaagaatttcaaaaataccaatgaaatcaatttttagatttggacatatattagtaggtgggttttggtttcggaccgagacttgtcaccagttt

SEQ ID NO: 6046 - DNA, 764 bp, Arabidopsis thaliana landsberg
caaaaaattgtttacaaaaaattcagaaaagttacagcacaaatatagaatgtagatatctttgttttctcgggaaaagcttgcggaaatccgttgcgcaacaaaattcacttcatcttctccgttgcgcaacaaaattcccaaccatgaaaccttgcttctcacagtcggctcttgccttatcaacgttgactcagtatttcatcaacatcatcacttttaactccatcaataccgtttctctcgtctctttataccagaaaacgttgttttccctaacctcttcgattaaccaatttgctcaaattaaacgagagttttgatagtagaaatctaaatcctaaggggatactatttagggaacccaagaaatttaattttagatatagatcgaatcaattaaattccaattcatctatatttgcaaaccatattcggtcattattgtaaaccagtttcgatcgttattgtaaaccaagtgttcttattcattgctttgtgtgtctttcaaattctgcaaaagaaggttctgggatttgttttgttggtgtggatgagagacggttatgcaaagacaaaagaaggattgaactcaagtattttcttcattgatttaaaaggagaaaatagtctttaatggtgtctaaatctataagcatattcaaaagtactacattagacaataccctcactatattggacccatcccataattgatctttggtttctcttcttcatcttctttttaagggtctgataatttc

SEQ ID NO: 6047 - DNA, 310 bp, Arabidopsis thaliana landsberg
  unsure (1)..(310): unsure at all n locations
accatctccaagcanaccnnngcacacagnaccgggaccgccaagcccaaaaaccccacnacccgcgaagggaacaggggccaccaccagcccccacgagccaaanaaccacgaccacccaaccccgccccgagaagcacccaaccggggcagcaacaacagccccccacaaccgcggaagaaccnccccccgcgcagngncaacccccgccacccaagaagcggccgcaaccaccacagagcgccgcccacgangaagacaaaaaaaccngcacccaaaccggcaaacaccacacaagaaaaactagac

SEQ ID NO: 6048 - DNA, 578 bp, Arabidopsis thaliana landsberg
aggtattgtctgatgtagcactttttaatatacttatagatttagacacattcatgcacgatgaaaacctattttcttctcttaaaccagtgaacaagataatatataagcgtctcaaatccacactaacaaaacgatcccaaaactttcttttgtaggagtttaaagacacacaaagcaatgaataagaatatttgtgatcgtccagagaacgctacaatcgtttatctttgataataacgatcgaattttgtttacaaatatagatgaattagagtttaattgatttgatttatatctaatttcttgggtttcctatatattatttctttatgttttagattccttccatcaaaactctcatttaagcaattgggttaattgaaggagattatgggaatcaacgttttgtgagtctaatgagactgagagaaattgtattaatggagttaaaagtgatgatgttgatagaatactgaatttatgttgataaggcaagagccgacggtgagaagcgaagtttcatggtcggaaaatttgtggcacaacggagaagatcaagtgaatttatcaacaat

SEQ ID NO: 6049 - DNA, 725 bp, Arabidopsis thaliana landsberg
tacttataattgagaagttctagatacaatatctatttcccgctttcatactaaggttaaaattgttagaatcgagtcaataaattgttattgttgaatattgttgaatcctacggtagaaaatacctcttttgaaagaaacttttttaagatgtccattttgaatataagctcaaaaaaaaaattggtatattttatagagtgaatatgtgatccaagttttgataacagatttgagtagtagggtcagaccgcgctagtcataagatcttagacaaccgattgcaacgtactacaaaaacttgtttgtacccaaaaaaaaaaacgtaaaaaaaaattgttttatacgacatttcagcaccaaagaagttagtcatctaccatcataagcacaaaaataggaatagtcaatgtttacgaaaatctaggcagaacaggcaatgctagggaatgaagccgtgaacatgggggagcctccttatctagattttcaattaagtactagtattaaaaagttactttcgtaaaccaaacgcgtcttagttaagataaagagggatcatgtcttgttattgttattcgtggctaaaatagggattattgtagaaaatgctatctggtccggctatattttttttagaaattttgccatttttgtttaatggaattttaagaaaaattggccttttttttggcccattgaaaaatggactttttcttttatc

SEQ ID NO: 6050 - DNA, 642 bp, Arabidopsis thaliana landsberg
tgtattttcatcttcatgtaatgtaaaatattataatcttcaacggtttttgacactctcttctctactaagaacgcaactatgagtctcaaaaggttttggaatactttaccagcttgtctaacatttacgtactgtaaattgaattgtttgggttcctaaatcccaaactatggtatagtttttactaatgtctagactatgtaccatttccatactgataattgagaagttctagatattatatctgtttcctgctttcataccaaggtcaaaatcgtcagaatcgagtcaataagttgctactgttgaatcctactgtagaaaatacctcttttaaaaaaaacttttttaaaatgcccgttttagatataaactccataatttaaggcttacatgcctattcaaaatctactgaaatttttttaaaacatcatcaaaagaaatttgggaaaatgtttaacaaaaaaaaaagaaactttggaaaatacacaaccggccaaccgcaaaaggttcattaaagttaatcaaacattgtgttttaggccgagagaatactgctcttcacttcgaaccaatttttgttggtgcgtggtcctttgttctggtaaacatataataattgtttttatatggaaatgg

SEQ ID NO: 6051 - DNA, 2859 bp, Arabidopsis thaliana landsberg
  unsure (1)..(2859): unsure at all n locations
cttagctttgagttcttaagaagaaaaaaaaatatttaaaaataaaaacattttaattttgaaaactttaataatgattacaacataaattttgaaaacatttaacaatgtagttaatattttacactcacccaataaaaacttgacacatgtctagctcttagatttaatttttgctcttatataagagcaattcttaccaaagaaatcaattaaaacattaaatttctaatctaattaacataagaactagtctgagagcttaccaataaggatgttctatagtctttctctctttcgagaatttaatccaagtcgttcacagtgtacgagtcgagggtaaattagtagttttacactgaaatatcaaccaaaaaatttcaaaattgaaaaatctccataaactgttttgcgacccaaaacaacatcttttaagcttctcccgcaaaattcagcaaagctttcggaggaatctcctaacagtcaccaccaccaccaccgagtgagtcaaatctcgtcttcctcacgctctatttctccatagaatatttcctaactccccctccggtttatccgattttttcaatttttctaaggtttcgcgccgggatctaaaaaatcacaatcatgccggtgagtttgactccgaacgcaatcacggcgataaatgacggcgacgtgaatttgaagccgttgttacaggttttagaaatcaaaatgataggaagaagtcaagagagaagccaggagaggtatcgtttcctcatttcagatggtgtttctgctcaacatgctatggtcgcggttcagcttaatgatcgagtcaagtcaggacaatttgagaaaggatctatcgttcagcttattgattacatttgtagcgacgttaaaggccgcaagtaatttttccattttctctctggttagatctagttttcgttgtgttgaattgcttagttttctagtgatctctgatttgttgcttagtaatgtttctgagtattcgtggctatgtatttggtttagtatgtgtaaggcatttgttacaatgagtttgcagaagcaatgatagcttcgcttttggtagagacctttcaatgaggtttcgtgtattgatgaatgattttggttaacatgtactagtgggaaagatttgtgttgttgtctttgtagttcatggtatttaatgggtggtaggcagatgttaaggacaacatttaggatgataatggagatgattttgttgattgtgtgagttggaaaatatagttacacaattgttttggttgaacatgacatatttgaaggagttttgctctctttgattgtgattttcttatggatttattcatactgtgtacaggcttattgtggtgctgaacatggagacgatagtacaacagtctgaaaccattgggaaccctacaatatttggagaaacagatacagaagcccagaagacattttcaggtacgggcaatataccgcctccgaacagggttgtttttaatgaaccaatggttcagcattctgttaatagagcacctcccaggggtgtaaacattcaaaatcaagccaacaatactccaagcttcaggccatctgttcaaccttcatatcaaccgcctgcaagttacagaaatcatggacccatcatgaagaacgaggctccagctcgagtcatccctattgctgctctcaatccataccaaggtcgatgggctattaaggctagagtaactgcgaaaggagatatcagacgatataacaatgcaaaaggagatggaaaggttttctcgtttgatctgcttgactatgatggaggggagattcgggttacgtgctttaatgctcttgttgaccgtttctatgatgttactgaggttggtaaggtatatttgatttcaaagggaagtttgaagcctgcacagaaaaatttcaaccacttaaagaatgaatgggaaattttcttggagtcaacatcgactgtggagctttgccctgatgaagatggctccataccaaagcagcaattctccttccgcccaataagtgacattgagaacgctgagaacaataccatactcgatgtcattggtgtggtgacttctgtgaacccctcggtgccaatcttgagaaagaacgggatggaaacccataggaggatcctgaatctaaaggatgaatcaggaaaggctgtagaggtaacactttggggagaattctgtaaccgagatggtcggcaactggaagagatggttgattcagcttttcacccggttttagcaataaaagctggaaaagtaagcgacttcagtgggaaatcagtagggacaatatcttcaacacagctcttcataaatccagatttccctgaagctcataaactacggacctggttcgattacgggggaaaagacactgcttccttctccatctccagggacactatgcctggaggagtttccaggaacgagataaggaaaaatgtttctcagatcaaagaggaaggtcttggaagatcagataagcctgactggatcactgtgaaagcaaccatatcattcatcaaaacagatagcttctgttatacagcttgtcctttgatgatcggggataaacaatgcaacaagaaggttacacggtctggaacaaacaggtggctctgtgaccggtgcaaccaagagtctgatgaatgcgactatagataccttcttcaggtacagatnnnnnnnnnnnnnnnnnnnacttggataaccgcgtttcaagaaacaggagaagaaataatgggatgtccggctaagaagctttacgcaatgaaatacgaattggagaaggaggaagagttcgcagagattg

SEQ ID NO: 6052 - DNA, 361 bp, Arabidopsis thaliana landsberg
  unsure (1)..(361): unsure at all n locations
gactatagataccttcttcaggtacagatnnnnnnnnnnnnnnnnnnnacttggataaccgcgtttcaagaaacaggagaagaaataatgggatgtccgtctaagaagctttacgcaatgaaatacgaattggagaaggaggaagagttcgcagagattgnnnnnnnnnnnnnnnnnnnnnnnnnnnnnnnnnnnnnnnnnnnnaaagaggaatcgtatggggatgaacaaagagtgaagatgactgttgtgaaggttgatagggtgaattatccatccgagagtaattacatgcttgatttgctcgaagggcaattccgtcaaggaattcgggggggttcaacataaccccagaatatgc

SEQ ID NO: 6053 - DNA, 1499 bp, Arabidopsis thaliana landsberg
atctcaccaccgcaagcatcaccgttcatcttcgtcgtccgatgacactgaaaaagcatcgaaacgacacatgcatcgtcatcacaagcatcatcaccacaggcatcgccatcaccgagataagaagcgcgaaaatgaaattccatccgccggcgatgagacagagatattggatgttactccggcggctccaattgttgttagtaacggctgtgaggaggaggatgtggaggaaggagagattttagaagaagatgggattggtgatgttttgatgaagacggacgattccgacggcgaatcaggcgaaatcaaatttgaagataataatctggtctgttctaatccctctaatacgtctttttcttcctaaattctgtttggattgtgggatcagaggggtggatttgggtttgattgattttttcatattacaaacagcatttacgcctgaattaatgataaagctttggtcttttgagagttttctttagataacctgagtgttgcactaggcgttcaatggagactgatggctttcgcttgatttgtaagaactggttttatgtagatgttctttttcccttggtttaattgtatgttcttgcgtttttagtgtcatgtatttctcttctggtaagtattctgaatatcttttgcgatgctttcagcctccacttggggaaaaagggcgtcaaggagaagaaaagagttctaatggtgttctaactcgtgaatctgaaagggaggataagaggtgggataaagaagctggaggtccttcagagagagttagtaaattaagttatgataatggcagaagtttgttttctccgtcaaacagcaggcagtctaacgaaggccgtgcccggagtagatctaagtcacatgatcgggagagagaaacttctaggtcaaggtttgcggaggatgagttttcggacagaggaagacatcatgattctagtagggattatcatcatgacagagttgactcagttaggactgaggaaagatatcatcgacgtgggcgatatgaggaaaatgacaggcaatatagtcgagaagtcttggaaagagatagaagtaaggagagagatatggacagggagggaagcataagagatagggattcggaaggaagtaagcggagagataaagatagtgatcggaggagggaaagagaacgagagaagagaagggagatagagtctgaccgtgaaagacgaaaagagaaggaacgagagcgcagcattgatagggataggagaaaggagagggaaggagattatttacgggatagagccaatgagagaggtaggagtagagatagaaccaggtataacagcagagagaggaagagagaaaaggaaagggagggtgaaaaagattgggagagaggaagagaaacccagaaagatagggagaagtacataagtagtgatgtggactacggtgagatgaggcacaaacagtctagaaacacaagatatgatgcg

SEQ ID NO: 6054 - DNA, 2980 bp, Arabidopsis thaliana landsberg
attttattaaaataataaattaaagatttaatccatattgaaattaaattaaattaattaaaatttagatatcaaatcttatatgttgattttgattggctattatttttgaaaattaataatgtatttcgttttttaattaatttaattaattaaattagtatttgactttttaatccttaaatacataaattaatttactctttaaaattttatttctaatggcatccctatgtaattacttacaaaaattaagattacatttaaaatgtatttcccaaataatatagtaggatatgtagatcgtttgtgattacattgacacgtcacgcacttacgcccactggattaccaaaactgggccttttcgatatctataaggcccagaccaactaggattcaacataatgtgaccatataggcccaatgaacgaaacacaaaattctgaccggcaagagcgggggatgataaaacgggaattgatcgttaatctccgcacgttcatcggaaatttcgtacgctgctgctctgaatcagaatcagctccaatcttcttcctcctccattgaatctcttttcgctacggaaaaaaactcgaagcttatcgtcctgcattctccggtaatcaatgtctactctctcgttttttttctttttctttcgcggccgatgctttgtcgaatttggaagccttgtttcatttttgatctgcctctgctagatgatgcacttgattttctgatttgagagatctagttccattgaatttggcgttgagagagatgtggaaatgaatgcgacctttggattatagcaatgtgcactagtacggtcttagattccttatcctccgaagcaattttgcgtattcagtgctattttcagatgattatagaagcgaatttagccaaaacctttagctggatattgcttatgtataatgtgggaatttggagtcgtttctgtatattctgctaagtgtttgattaaatgagaaactggactcaatactcaaacgtgaaattgactttttttttttttaggttttcgttttctcgtaaagtaaggctcatcgttgtctgagctagcgttggattgctaaaatggaaactgatcctgctaactcttcatcgaagtctccagctgtagtatctgagaaagatgtattgattcctgaaccttctgaaaatactgtgggcgttgtacaagatcctgtgagcgctgaaagagaagctcatgaagactctattagtacagaagcttctgttgcaaaggttgatgatactcaaatgcctgctagttctaccggctctgaacctttaagtaaaacagatgatatagttccatgcccaccaggttcctccccacgcgaatcaccgccgtctatattttcttcttctggtctttcttcttgggccaaaagttttaaattccagcagcaagatccaaatcgtacagattctgggatgtcagctttcacaagattcacctctgaacttggtctgcatttgccaacgaaagggtctgaggaggttggtgattctagatcatcaaacacacaagttggtggtgcttttgagtccctcacaaaagctgtggttgattcatctcgtggtgccgttaaagcaatgcaggtgaaagcacgccacattgtctctcagaacaaaagaagataccaggcatggtaatgctgtctttctgcttttgtagattctttgaaactgaggcaccttatagtcacaacagcttgttgcagcacactaccctattgcagtgaatgggccaaaactagcagtcgtttatttttatgagctttccctgctgtctagtgtaatgcatcgtttagattatagtatatatgtatgccctgatcagtaccacttacatctctgctttacatggcacctggtgcaatcttcaggagggggaattcgatttggacatgacatatataactgagaatataatcgcaatggggttcccagctggtgacataagctctggtcttttcggatttttcgaggtaaatagcttggtctggtttgaaatataagttccccagccagttcttttcttctcttagtcttgagtttctcattgacaaatgtcatattcagggactatatcgtaatcacatggaagaggtgataaagttttttgaaactcatcataaggtaaccattggcactgactggaagcctcttaaagagtttttgacaactcactaattctcataagattcacaccagttggatttgataagacactgcagcccagacatgtagtggttacttggtttatgtttgatcatattggtacataccagaactctaaaccttgcccccgatatgcaggataaatataaggtctacaacctttgttcagagagattgtacgatgcttcaagatttgaggggaaggtatatacaaactctagcacttgatatctcagaccatatatcttgcaggcagtttctgtggttgtcattgtttttaaagctagtgtttatagacctcttacagtgtttgcttcatcgcttgtctgatttccttttcttcaggttgcatctttcccatttgatgatcataattgtcctcctatccaattgataccatcgttttgtcaaagtgcatacacatggctgaaggaagatatccaaaatgtagtggtagttcattgtaaagctggaatggcaagaaccggattaatgatttgctgtcttcttctatatctcaaggtgacacttcttaaatgaaacaaagtcttggctgatgcacgcattcctcctctgtaagactcttgtgacagatcttactggtaactccattgcagttctttcctacagctgaagaggctattgattactataaccaaaagagatgtcttgatgggaaagctcttgttctcccaagtcagattgtaagttctgagctcacaccaatcttttaatgtgcttattcgattctccctcagcctat

SEQ ID NO: 6055 - DNA, 819 bp, Arabidopsis thaliana landsberg
  unsure (1)..(819): unsure at all n locations
tcagtcctcataccaacggttgtcaccagcatttttgcagagccgttttggactttggtttctgaaagcagaaacggcttctctttattcacatgtgatggttcactctcgcccgataagcttgactcgtctatctccagattgtatccggatataaaaatcccatcagctggaacttgatccccaatagataaatggaccacatctccaacaaccaagtcatggatggagacctcttgtctgctgccatccctggtgacttgaataataatcttctttttctctcgatccaaatctctgaactgcaaagattgcttgtagtcactgatagcagtaaccatgaccaccaagattatactaagcaagatccccgtcccatcatacatgccctttggaaaaccttctgttgcaactcccactcctattgatactacagcgcagaccataaggatgataagggtaatgtcttgaagcgcttcccaaacaaacgttaaaaatgatctggctggtttctcagtataacggttttctccatagattttttctctgatgtgtagttcactcgaacgtacaccttcagcgagagatacagatactttctgagcgattccttcaggtccnnnnnnnnnnnnnnnnnnctntgtgtcatgattgcgaaccatagaagcaagctcatctgcttcgacataaaatcctgcttttttgacctcatcagtgagtttatattcagggcgggcaccagctgaagatataaacaatgaaaagaaaaaagaattaaacccagtcggccaccaatgatgcatctctgaaactcaacat

SEQ ID NO: 6056 - DNA, 430 bp, Arabidopsis thaliana landsberg
taaaatcctgcttttttgacctcatcagtgagtttatattcagggcgggcaccagctgaagatataaacattgaaaagaataaagaattaaacccagtcggccaccaatgatgcatctctgaaactcaacaatgtgtttcttaccatcaataaactgaaaagctgccttttgaacatagaagacaacccttatcttttcctgataatgatataaagaaagagtgagctcatagaagaactacaacaactaaatcattagtcactacaagaaataactaacatccattgatcttttccagactaaataacagcatcaaaacatgccaaccgctacaaaattttgattttattatttctttgcattatgctttttatgcagaggaggatataataattctgaaacaccagctacttgttggtggatggccaa

SEQ ID NO: 6057 - DNA, 467 bp, Arabidopsis thaliana landsberg
aacctacccgaacaagttaagaatatccttatacaggccatatttcttatctactggttctgaagttgttaaggataaggaaggaaaaactcagatcctgggttcacctacagaaagggcgatactggaatttggtttgcttttgggtggtgacgttgacacgcaacgccgagaacataagatactcaagatcgagccattcaactcagacaagaagaaaatgtctgttcttacatctcattcaggtggtaaagtacgtgctttctgcaaaggtgcatctgaaatagtcttgaaaatgtgtgagaaggttgtggattcaaacggagaatctgttcctttatctgaagaaaagattgcaagtatctctgatgtcatagagggatttgcttcagaggctcttaggactctttgcttagtttacacggatcttgatgaagctcccagaggggatcttcctaatggtggct

SEQ ID NO: 6058 - DNA, 3282 bp, Arabidopsis thaliana landsberg
gaaacacctagttaacacacgcgcttccacacgcgccaccgcctctgctctcttcccttcacggtatcaaacactatttctctttctactttccttcttccaaattatttgatgtttcttaacctaagtaagcaacaaataaagagagaaaatactcatttttctgtggaaacaataattaattcccatgaaatggattagcctatagtaggaccttgattataatgaaactgatatgaacatatatatctgaaatttttaactatcactggctcgttggtaaaacaattttgtattttccacttgattaagtacaagatgatattattcccagatctagaaagttcagaaatcagggtttcttctaggactacggattcagatcagttaagttatataatatttgtgtattttatgtattcaatgtcatatatttgctgaattcaaacgcaatggatctgaaaagaaccctttgatgtttgcaaaagtgtattttagttttaagtctgaaaaaacttgtttttgaaaatattaatatagtttcttgaagataaatatattcgtacagaaagcataagcaatgtactagtgtacagtgcacaaaaaggcatatgccattaggcgtaaatggataataccaaaacaaatccagttcaggttttgacacgtggtagtttagtaagtttacatacatacccctgtcgaaaactcgcaggtaagagtgttattagcttgacccaaaactcaaatctcaaaactgtaaccaaatcatgatttttcatcttcaatatgaagccacatttagttacatgctgtgtagtccatcttttcgtaacagtgtaacacattatttttcatttatgatatgagtagacatgaggtggctgattttctcatagcgttaatttaagataagaatttggaccgacagctttgaagatatagaaatgttgatggagctgactatgacatatttggtgttacttgattttatttttaatttttaaagaaaaggcatttacggggtcactttttatgaaaaaccaaactttccatctttaataatatactaagacctgataaagaaaaaatctatataaagaccatcttcgtaataattcattctttttggggttgttgtgggtttgtggtggcaatgtctcacctacctagcaacaatctcccacccaacaggaaatttgtttttatttccttgatatgattaataaaattgataccgaaattatcatattaataaattgaggtcggttagatataaaattcgtctgaaatattctttttatttccttcctttttaacagtcggagtggacattcctcggcgtatgacaagaacgtggaggatgaattgcatgcgagtgcagtacctgacgaagttataaagccagattctgataaatattggtctcctcaccccaaaacaggagtcttcggtccctctacgactgagcacagcgccaccgccgagggtgcacaccaggacacagcagtgctggaggagaccgcctggtttcgcccaacaagtctcgaggattcggacaagactcaccatgtttgagtctttctttctctctgctttttactggcgtaatgttgtaataaagttctacgtaaacaaactgtaatgtcaaatagcgtcctcctgctatgtttgaacgcttatgtttaagtgattgattacgttgcccataaatattaaagaatcaaaatgaagtttggttttaatttggtacggttaatcaaccacgacaaatattaaaaagaatctccaaatgacaaaatcgataatatgtgtaacttgattaaccagtgaagattcataaatcaaataaacgcaaaaaagctctctaagactaataaactaaagctgaggctaaatcaaagatacatcaaaagctttctgaagagagaaaaataaaaatatacaaaacgaaccagtggtatattgttctacttcttcaccgatctgtaccaataagtaaccagagcctcctctctaagtaaattgttctccctacaactaaattttcccttagaatcatcacataataaaagcctgatggttgctcaaaaagacccatcaccccagaatttgtaatgccctaaaacgtgattctcaatctacgaaaaccagagaccagaaatggttatgtgtttagtacctgtaaatctcgttttcacttgagtagatctcttgttattgaactcttcttctctcgttaaaggctttcgcagttggctttgatggcggtctatttatcttctcaagtaatctgctatatactagtttgaccggtatgcaggccacagttggtggtcccggtaatacccgtctgttagagagctcgtgtgtccggtctcgtgacgccttcatcccattgtgtccttgttcgccgctgaatgacgatagtgcccttgtcttttggctagcagttgcatttgtgttcttcagcaacttcttttgctgctgctgatgctgttgctttctctctgcaggtggtcgcggaattcgcaatgaactgtttctcctcaccgagttatcatcattactaaaatgtcccaatccgagtttcttaacaagcggtttccttccctgatctgccagagaataatcataggttgcatcatcatccgcttctacggacgatgagaacggctgcagccgtggaacccgggaattactccgccttgcagtcttccaagcagagggcagaagaaaggttttgtcctggtaagttgtttcattaccaaagtaatcaattgtctgaatatatgactcggaggaaccatctgctaagacttcgacttcgaccggatgcccaatgattgctctgccatttaacttactcataagggagacaattgggacaggccctttctgatagcttcctcgcacttctaaatccacatccatcaatgaagaatacgtttttctgccaaaatgtcgttcagaaacatcaaactcctgacctaaaccttcgagtttttcctcccctcgcttcttcataccaatccggccttcccaagggtcatcatcccagtccagcatatcatggctgtagatgttcttacatctagatgcaaccacatttgagagctgataatcatcacctggtacaatcattctgtcaccgaactgcctttcgttgggatcagtgtcatcagttccatcgctcatatcatttgtcccattaaaatctaacccataacccatcgttttggcaatgcctttctatattccaatatcttcatcttctagacg

SEQ ID NO: 6059 - DNA, 2959 bp, Arabidopsis thaliana landsberg
aaaagcctgtattgggaatcaatttgcccagaaacggaatggcgaaaaaggattggttgtcccttgttgctgtccacagtgatgcttggcttcctacagtagctttcttttttggagccaggtttggatttgacaaagctgataggtatgtatatccttctcctctttaagtctaatcttcttacatctatgttccttggtggtatatagatgcaagcctctcagtcactcattgttctactccttcaccgtttatgtagctctctgtgatttatgttctttcacatttgttacaggaagaggcttttcaatatggtgaatgacctcccaacaatctttgaggttgtagctggcactgctaagaaacaaggaaaagataagtcctctgtttccaacaacagcagcaacagatccaaatcaagctccaaggtagagactttgttttccactgtacttcttctctacagtttaatccttgtactaattctggtttctttgtctcacgttacagcgaggatctgaatcccgtgccaagttctcaaagccggagccgaaagatgatgaggaggaggaagaggaaggtgtggaagaggaggatgaggatgagcaaggtgaaacacagtgtggagcatgtggtgagagctatgcagctgatgagttctggatttgctgtgacctctgtgagatgtggtttcatggaaagtgtgttaagataacaccagcaagagctgagcacatcaagcaatacaagtgcccttcttgcagcaacaaaagggctcgttcctaaatttgttgaccgctcgcttctgtgtatctacctttgcatatgatgatgaacagcttaactgtttggtttagatcagatttgtcatatggatttggtaattttaggaagacattttagttttttcattgttacattttggcgattgaagggataactctttgtttaggggtaatgatcttttgctctgttttatgtttgtttattaacattcttcaaactcaatcaaaagtattttggttagtcttaacacaacaaggttttatcaatatatcatttctgcttctttgttgctaggcgcttcaagaactcgtaggttgtgatcatcgttgttgcggacatcgacattgagacccatcttggtcctaatcctctgtaacaagcaccaactcctccttccttcatcaagctcttcactgactgcatcactgtcattgctcgtctcctcccgttctcttctgcgtctaagacttgcaaccgcgtcttgattgtgtctactggcatagttactaaagccgagcaaccgcttgctgtcgctgcactcaacgcttgaaccaccactgagccaccagcatcttccttgtggttgtaggagtgcttgtatcgagaccaaattgatttttgagccaatgaataagacgcccaccatacggcgttggaaggtgcgtaagtcaagatcgagatcccgaatcctctgtagaaccctcttggtccatctgtgtaaagaatctttctaaaagcatcaaacccatttctgtatctgcaagagttcatcactccaggaagatgtttactcaaggaaacatcgccttgaatcataagccgttgactcacaacatcaatcggagtccagacagtctgagcagccacagccgaggtcaaaccagctgcaccattagcaacagctaaagacgtagtatcagacaaacctaacctaacagttgcttgacctacactactcttcgtaatctctagagcagtcatatagagagcacgagccgggatggttccaagcaaagatgttccaaaacccttgtaaaaccctcttagaccttcaagtctagcaatagccagagaaatgttggcacatgagacacgagtcggagagacttgttgccttgttttgagaactacaatagggtaaagagcagtggatacaccggagaaaagagcagcaccaaggaagaaaaacctcgatttatcaagcatttgccaatctatatcatttgacatatgtacctgagaagaagaagatgaagttgttgctcttctcttctcttccatcaaagcacctaaactcattttgagctaatcttaccttaaaaaccaaatcaagattccaactttagagagttttgacctgagtaagagatgagaatagagtgtatgattgaattgtgatcaaagagagaaaatctctgtggatttattagcttcaaaatctatgaactcgtgtattaatattattatagtgaatatagagtcagagccaaaacgatgggtcgtgtggataacataaaaggagcggcctttaacggactcaagagatgtgtgaggaggagtaatgggactgggcacgtggcaagtgttggttggtttatgttagagaaactcacagtttttaaggttacatgaggctgagaagagagtggcttctgtcggaatcgccccttgtttcatctttctgtggattatatttattattttattttatttttactgatttctgtaggttttgcatttgattattttgtgatataatgtatttatcaataactgttttagttacattttaaataaaattagatgcatatgtataatagtatggataacagagcctatttatagaatttcttacatttgatggaaataaataacttttttaaaaggtccaagaaatagtctagattgcaaatgcaagttttcgattgtaaatgaaagtttattgattttagatgataagtaaagtgttaagtgtatagtgttttgacaaacagaataatactaaatcttgtgatctatgtgctctctatactagtagtctagtacttaatataattgtatttatgtttatttttgtcaatcttctcggttcctaccctcccctgcttgtttatccttgttggttcgaaaaaaaaaatgtgattaagtttgatttttcttaggataaagtac

SEQ ID NO: 6060 - DNA, 5380 bp, Arabidopsis thaliana landsberg
gacaaaattataaattgtttaggaaacttatcagtaaattagtagaaacctctataaatgttggatctttagtgttactactccaattcttgtaaacaagctcttaatgataatccaaatgacgttacaaaaaaggatcatttgtaccaagaagttatattgaaatggctatgatgtggccaacaagttctggttaacaacttgcattatcaatcacatcttctttcattgttaataggtttagctacatcatctagtcttaagaggatacaccaatctcatctcatcttcacctgactatgaagaaaacagaacaaacatcactctgtatcaaaattttgttgcactctgattgtctttagctaccaattccataaccatccagaatttgcaatcacataacaacagcacactcaaaccaaagtgagattctttaatagtaaaatcttatatccatgatcagatgatcttgaactctgtgagtatacaaatacatacattcttaaaacaaaagcatacacatttcaataacaaaagcaacaattttcacaatctctcaagtctttcttaatccttaggccaaacactaaccttctccttctcaatcttgacaaacatagcagaaacagccgcaacgaaatagatctgaagaaacaccacagaaggcgtgtggtaattcaacacactcttacccgtcgcaagctcaactagaagcaaagccgtgagccctaatcccgcaatccttccattaatcctttcgctgaagggactaaaccctggttccactttcaaaccacctgaaaccgcttcttttaagcttaccggcggcaaatatattcccgtacctttcgacggagacccacttgaccctttcttcgattttctcacttctgctttcttacccgtcccgcttcggtatctgagtctgatgtttgagagacgagactcgaattggtccggatcagtgccggattcggactgtgtagtttccgggtcgggttgagtatcctccgtggactcaacgtcggtagcgtggacggtgaagattcttaaagcattgggctttccggcgggaataaagcggagagatgggaatgggttcgtgattcgcagaggtgttatcgccattttttagagcttcgcgtctcgctctctatcactctccttctgtgtgtccctctttggataagagaattatattttctcttcttttaattcaactttgacatttttgtttataatccattttataagaactatatatagcatacaatttttgtggtgttcattttttctgaattttcatgtttactatataacttccacataattttctcgaggcaaagaaaaagtattaaagtaagatcacaaaatttacagatccctaaaaagaaagcaaaataattatgcaattttccatcatagtaacgactgtataattttatattataatcttttttaacatactataatctttgtcccattttatacgaggattacgaattagatacagtaaaataaatttgcaatggaaatataatattttattataatctttttttctataaatgaaaacaatttggaatgacatcccaataatatttttatcaatttcccattaatgatatcccgataatatagtcagccaaattcgaaatcaggaattttgtgaaccccataattcgttcgatagaggactatttcgataaatagataaagttagaggttaattttgtaaataaatgataaagtcagaaaaggaacataacagatgcgcgaatatgcgaccacatgagatgagtttcacatcttaccaaagtctctgataatttttccgacagaagtttcatctgagaaaagatggctacatttgcacttcccttctgcgaaattcccgaggatctccagctccgaatcttatccttcctcacaccagcggagatctccagcttcgcctgcacatcgaaacgcttcgcctcgctatgtcaagaagacggcaaaatctggcacgttatgtgcgatcagagatgggggaagaaaactaagatccagaaatgggcaaacggtcaaatcccttatagacacctttacaagactctaaagggattggagaatctaattggcttctggcgtctctgcggcagagcaaatcccgccgcttcatcgccgccgcttgttttcttcgattggggttcttcttttatattgggatctagagttttatccaccggagatgatacttatgaggtaaagaagacaccttttctcttaatggggatttcgccggagggacgatctgagaatttcttggatctcgtcggtggtaatctcagatctgtggatgatgatttgaaagaattagaagcttctaacaatctcgtctcggtggatgtgaatttcatggggaatggtcatatcatggtggaggagaatcgatgttttaccaacaacaatcgtagagaagaccagaggagctcaggggatgagagtgatgatttgatctcatcgcccaatttttcggaaatgtacactcaattggcgaataagacgagtccaggcggtgacaggaggagacagaagaggaaggagaaggagaggcaagcgtcgaggactaagtgggaaccagaacactttctcaaagttgctgattgctcccccacgcctactagacccttacaaggcttatggaaggtctcaattataactccttatcatattgttttcattgataatgtttgagattgagaaaagcctttgtctttaaggtaaagggaatgcaaaatttggtttttttctaagtctagttgattgaatagaccaatctttcattagttatcttcgttgtaatgatgatggttgtgttgttaagtagtttatctccatgattcttgaactcggcagggtttctgtgagggaagcatggagttgtatttggtcaaatatgatgaagttggaggcattatatgcagaaaagtagaggacttgtccctctcacggtacactcctcctgtgttctggacacccaaacatacgttcatcagatctcctttttcagctgaagaagagctgctactgaatagtcgaatccatattagccctttcgctgaagttcatgaaaatgttgtatctggaatgttgtacatgaagtctagctgcgatctggtgttgccaggagaacctggcaatggcattggttttcttagaggtgaagggcgggtctggttgtatgacaatgggactttcggtttcgggtttcttcgagatcaatttatcattgatctgaaacgtgttgctctggaagatgggtgtctagctgacgaggtagaagcttgtatgtgatttgctctttggttgtgatttttaaattctgatggtgatagatgatcacctctttctgtacataaaagagtttggtgactttagaagtttgaactttcaagtttagtctcattttagtggacgtaaactaggatgatggaatatcaccttgtatttttacttgtttatgtagatatggttctaaataagagatttgtagaggttcatgtatcaattgttgaaaaagaataataaacttgcatacacttgccactttgccagtataatgttaatgatgcggtttgtacagcaaagcttttccagcagcatttcccgtgtagctatgaagctgctcccggagatgaatttcaagcagtgaggctaatgcattgtgctgtttggtggtggccagtttgagaatatagtacatggccaagctttgcgctgtttttgttcatagtatagactatatctagaatatgagcatcatggttgaacttcatgagattgtccactgtctttgttggctttcactgcctctgttttacgatccctctttccgtttgcaaactgcaacgagagtgacactcatggtgcattcatcgacacctttttgtataaacatttcgttgttctcagattccagaggtaaacctactacctgctaagcatcatcactggattcagaacttgactaaactgttgacagatcttttgatgttgaggacacaagtaaacataacccgttgttgcccacaaaagctatggtgttagagtctctaccttccaaagggccaagttttgtctccaaagtaaagagagtcgattcagtaatatagataaagttggaggttggttttgtaaataaaagaaaacaaaaaagtaagaaaaggagtacaaatattttagtcatgccattgaccacacgaagagaagagtctcctttttctctatatctaaccttcttcttctcactttcccatttctctttcccaaattacatctcaaatacacaatccagcaacacctttctctctctaacagcttcgagcttctacactcatggctgcatcatcctttgtagacggtaacccaatcattctaattaaactttacttgtacttgtacacatctctcaacttttttagtcttgttccatacgatctataaacttttgatccgattttggttagttttcgttaggcaaaaatatataaaatattctcttagctgattaattgttttgcatgattgtcggagagaatcttcagacatgtgatcttcatggtccctcgtcttgtctgtgaaataccgaaccacccatatgtttcacatgaattttgtattatcataattatatccaaattgatataaacttgattgaaggaataattgaattcatgtttggagtctcccaaaattcagatagagatgtgtgtttgtttatattctagatctgtgtggtagttgaatcctgaggtttttgttctctgctgaaatttttcaggagaaagagatatggagaaaggaggaatgatattactacagtcaagtgagaatcaaaatcctatgatagatccttcaccaacaccttcaccatctgcaactgctactgccccagctttggttttgtctaattcaggcaagagaatggatcaagctggcaagaaaaagtatgttaagcaagtcacgggtcgccacaacgacaccgagcttcacttagcggcccaacgaggtgatttggctgctgtgcagcagattctcaaggatattaactctcagatggaagggattctgagtggggaagagtttgatgctgaagttgcggagattcgagcatcgattgtgaatgaggtgaatgagttaggggagacggcgctcttcactgctgcggataaaggacatcttgatgttgtcaaagagctgttgaagtattcgagtagagagagtattgctaagaagaatcgttctggatatgatccacttcatattgctgccatacagggtcatcatggtaatgctccttaactcgtcgataggcttttgatcaaatgaactacgt

SEQ ID NO: 6061 - DNA, 6455 bp, Arabidopsis thaliana landsberg
tgcataaaaagaaatactacaggcataaataggtatcatagtcaatccattatcaccagccaacacagatgcctttatgaagtctatttggtcttcaaatacaaacctgcaaaagtaattttcatggtcaaaaagatagcaaggataatcagtcgaaggtaaaatttgaaatcaaaatataacacgagtaggacaaaaaggtaacaaatcttactcgtaattgtctgagacctccttattctttgcaccaaattttaatgctgcgttttctgcatgaaaatgtcatttagttaatatcacaaatgatgtcgtttaaatagagcatgcatttaaaacaagattggtcattggtaaaagcgctaaacagaatactaccaatctgatggtcctcccaagcttcttgctctgcaaaggggttcattttctctgcggaacccatgtccctaatcaaataagataatttagaacatacgttagccttttacaacacaaagaagagtgatcttttaaaagtgtaagcaaagtagaatgttatggattccaagtcatgcattctttctcatctcacctgtaccgttgtacagaaacagcaaacctcttctcctgatcaacacttccctgttgatcatatgcatccggcattctatactgtactccaacgaggttgaaaaaaaagagataagtacaaataattcagaagaaggaaaactaaaatcatcaagaacacttgaagcattctaaaaaatagccaaaaagttaagaagggtacagtaagatgcaattacctctcctacattatcttcttcttgtgtacttttctttatgagctcatagatttctctcttgtatctgtcaagatatcagatcgaccaatgctcaattatattagccaaaaattaacaaatcctagcaaatcagaataaaccacagcttcagattgtaacaaaaaaagtccaaaagtaagccactactgtgactttttataatcaccaaagcaaccaagctccatcttggtgcaatagatgtcttaattacctaaattcacgaatttctctttcagtgagcttttcatctccaaaaaggtatggttcatcttctatatcatccctgtgaagaaaagaggagaaaggagaagtcaatttaggatcaacagtataattaggtacagaacttccaaggagaaatataactcttaaagtcatgtactttagctctagtactttcttctgtttccttttcttcatatattcttgccatgagaatttcctgaatcagcaaaacataatcaataacaatgaatgagtgaaaagacattaaagagctaattttcaaacattaggacgactagtaagaattgttaatgaggagacagttgacaacgtcaatagttcttaactggcaactttacatggtatttcaattacgggaataagatttaacccacaagtatcttacatagtcaatcatgccatgttactgtatttcaatatggatggatatgtttatgtctatctcaaagaggaaccatcacataccgatgcagggaagaaaagattaggtagagaacgaagtaccttaatgattcaatatcacccttgtctacagcactatctcttcgaacaaactcttctgttttacaatcgaagaattactaaatgagtccagcagaagaaacaaaattttggtttcacacacaaagatgcttatacatgttcaagtgagctataataggccggaccttgctctttctttgacattttttggctcggtttgctgttcattaaagaaaagaaagggacaggtcagtaataaaaagatcagatagcaaataataaatggatcaatgaatcctcacatgcttttcgttaactagcaaaagcatccaaagaatgcaggattgaatggcatattaagtgtagagatttggcagttctgttatctaacttaaccaagttgaatgagataactagttcatcttgtatattgtttccgcaaaactgagccaaaacaagatgtcaagaagagaacggatagcttgttccttgtgaggtatgcaaaggaaacacataagaactactaaaaacaggatcttttgaggcgcacataacagatcacgacatacctttcgtgtccgtgcagtatctcgttctcttaggtgctgctctagttcttctctctccctttggtcacgtaatctttcctctacagactgtgccaattatttgtgattaaagcagattgtcagaaaaacacttatgaaagcaggtattatccacacatcactatgtttttcctaaggatccaaaacataaataaattgcaaacaccctaatggtagccactagtaaatatacctcagtgccatcatcctcgtcttcggaaacctttctcctaacattccttttgtcctctctaacaatcactacctgcattgttgtttagtcagaaaggataccacatgattagaagagctatggagctatatcttaccataaataaaatactggaagtctgtcattgaatagaaaatatcaaaataatttgcctcatcatcgtcgtcttccaattgctcacttttcttcctgaacctcttttggcctttatctgactttccggttttcgaagcagattgtttcttcacattgttttcatcttcatcatgatcagcctctaaaagggaaaaagttttctgcttcttcaacagcatcgctgcctctgcttcctgttgctggtagagctgaaaaaaacaagaaaaccaaccaaattatgactctgtttatgtcatacattctttaccaatagcaagaatcaacaatatatctactcagaaaagagcacgagagtcattgagggcctcacattcactccaggggttttccggggagctctagcataaatttcttctgcgaacgcgcgggtatcaccggacaaagaaaacccgcattccaccaattcacggacgagttcacctggtgattttgattgtttagctgcaagaaaagacaaactcactttgtcaacaacaatcatagctaaaaattgcttgatccaaaacggaacaccaagatttacccattgcaattagatactgcacgacagcagtttgtgaaaagcctagcagaaccatcaacttgtccgaaacccaggtgttcaaatcattgctccccattctcactgcactacaatcataaaccaacaccacgaaatcaacacagatttcgattatcagaagagctataaatttcaaatcacttgtttcagagatacaacagtagagttagagagtatacataaacttctctaaccaaaaaggagaaagtccccaggaattgaattccgagagaagacaaataatttcagaatgatcgaacaaggtagaaaccctaaaagattagggataaaaacttagagatctaggttttctgaaactcgaagagctggagaaggaggatgatgataggttatgaagaagcttaccccaagacgccaagtaagaggaaacgaacggcggaatgtatcgaagaagtactcaccggtggcgactcaagtctccgaaggcggattctacgtcgaatgttttttcgccgattaatgtactaacctctatttatacgtacgtacgtaattctgtagtgattttttttaatacatagatttgaatttccgtattttgattggtctgtaacggtgtagaccggtttggtccgaggttgttgaaatgtcaatagagttctttccaaaaattttactagacaaaattaagtgaaaagaaaaattagcttttgtgataacaaatgaaacttgttacagaagaacaatgggctaatattagaaattgaagcttaacttgttttagccacaagttagaagctaaaaatgaaatttttgtgataggttcatggtaagaaaaacatatcaagtgattcatgtgtatcagaaattgtgagacgacgtttcagggttgggtagaggtggtagaatttttatttacttacattgtgaatcctgggaagatcataaaccaggcaacatcttctttgaacaactcaaaacaatgtaaaagatgcgaatagtccaaaccccctcagattgaagataagagacaataggaagtagagagacagagccataaacaaacaaacaaacaaacaaaaaagtattacacctgacaaaagaagttgtgctgtgattaatctttggaccccagataattatctttgttactaagaactcgctccaaagacacggattctctgctgaaccggagctctgcaacaaggacaggtcgctttgccactgcccatgaagctatcgctgcagctcgcacagaccacttggtgagcacaagggagaaacacaaccgaaacctcatctttcatgcagatcagacattcccggtcatagtttgcttccttctcatatgatccatcaagcctattcagctcttcaagcagcttagacattgtttctcccttcgacttgtctgatttcacctttgtgtgagaggtgttattggattggaggcttgagtcagttgaagaggctttgttgagccgagacagctcttgttccagtctttggagatcatctttgtgtctctggaagtctatttcgatctttaaccgcaggctttccacctttcttttgttgctagcctcaattgcttccttcgagcgctgttcttcttccacttgagccaaaacttgctccttagctttctgctcctgcctccatttcgcctgcaaatacatattaacaagatgaaaagttgcctgaaaaagacaacctctctatgcaaatatgatccatctagcagcatagagagaaagacttggcccatgaaaagtatttacaggaataataattccttggaacagataattagatgcgctttcaaagagaagggttcattatcttatgttctaactaaatggacttccacaggttatagtgtcaaaaattgtgaagaaccagaaaaatctcggtgtgtaaacgaagataatgcattacttggtacctcatattctttttcttcctgagtgatctgagctaaagctctattgagtgccttaatcttctctttctcagctgtaatctcgtcctgcaacttcattttctgcttctcccacgccagtagtttctttaagcattttttctctttcttcgaggcctccatgcatgccgtgagcgattctgatgcacttaatttggaagcttccatttccgcccggatttctgcactttcgttctcaagtgcccttactaccgcatttgccttgtcaacttgaccgctagcttttctaagagcattttccatctctgataattttttcaaggttgagtcctcacgagtttgtttcccctttttcacccgctgaatttcttctctctcactcctcaacgatttaagctcggacagttcatcgctgaccttttgggcagcttgcattgccttcttctgagcccagtctttcctctccttcaattgctttttgagatcctgaacctgctgaagtagtcctattaaagcatcatccttcagctcctcaggtgccgaatcaacattgtcatcaaggttcagatcccggaatttctccagcactgaactgaaacattcttcacttccgaagacacgtggctgctcacacttctctgaatgtgtagcagcagccgtgcaagacaagctagtaccactagtttcagactgcatttgcacctgcttcttttgctccatactagcacgatacccagcagcaaaggctgcaacattctctctcaacaaagacttcatcgaaggtgagagattaaatctcctcggacaatcaatctctctctgcaacgttaactcttcactgtgcaaagaaaacccattaccagaaaacttgggtcctttcccattaccaaaaccccaacctccatggaatctacacaatgccggagcaatagcaccaccaaccccatttacagtactactagcaccaccaacccctacattactactatccccttttccagaactcggtatatccatagtactcgccctcccaacatgaagctcactcattagcaaacaccacattgcatcacctttactcaaattaggtttaacttgttgcaacaaataaaccatacccgcaagtgaatactcctccaactgtctcaaatccgtaaaaaccgtctctgattgatcctcattgttcacattactaccttcaccagtattactcttaagataagccaacgaattatgaagaatattagtcataacatccattccaccataacaatacccattactaagaacagctctcaacgccacattctcatcataaccagaacccacaagcttcgaaatcgcttcattgtataaatactccaaatgtttcaacaaaatatcctctaattgctcctccgtacaataaccccaaccattattatcctcaaaactgccacta

SEQ ID NO: 6062 - DNA, 1551 bp, Arabidopsis thaliana landsberg
aaaaatagaacaagtcttcgacggactaactacggaccgatattacataaagaaaaacttggtccgccgcgtcggtttattgtccgttccaaatataagtcaggtccgcttttttccattgcattcattcaaagccatatattttttctattttagatgcaatatttatctataatttcatttacaacacatttctaaagtattcaacatacagattatgataatccacatttattacaatcttaatattaactttggattcaaatatcttgtatttctaataattatgtttttttttcatttttttttcgacacttatgatttttataagagtacactttaatgaaataagatgcttcaaatgatagtatagagcattataatttgcaaccaatgggagttggccatttgaagatttgtgatcatgaagcttgtcaaagaaatagataaagaatatcaatcagttaggactaaatgtaaacaaaaaattaagcaaatcaatgtaactgaaaaagtggtcaatatgctacctacacacaactttaattgtaggtttagcttataaaaatacaaaaggtatacatataaattcataggaataaaaaagaaagaattattaacaaataattttcctcttacgtgggacgaacattgataattcattttatctcgatttatctttatacatttttgctgttgtgcatgtttgtgcttggtgatgagggtatcctaccaacttcctctacaattgcaaaatagcctcgtaatagaaacatacacttacaccctaccaaaaaaaagaaacatacacttacatatttaaacaatgtcaaaatacttacaaaaaaaaaaaaaaaaaaacatacttacatacatcatacatttttttattaatttaagtaatttatttgttaatttcaacaaatttgcacaaaagttacatacaactcgaaacaaacagccgaaaactcttgaaagcttctctttgtttctctcacacgtaacgttttttgaagagattgtgtcgtttggttgggtctttaggtttcttgaattgctgaccggatttgtgacggcctgagttgtattccatgtagaccattccttttgaaccggacattacgctcatcgatcccatgcttcgtctcgccttttgcagagccattccgtctgtgtcttcttcgagttgctctaaaccgaccagatcgtctccagcattcatcacctttccaagaagagacaactgttcttcttgactatggtagctcaagcttgaacccgcgtccggaggtgggaggcttgttataaccttaaagctgtaaccttggtctatcaagaactgttgtcttttcgtcgaataatacatttcctgcattttcaacattcacaatccttaaatcagccattcacatggagatacgagtacgggtgtttgtattatcagttcaagtttcatgtttcgggttttagaaaacgaggtcgggcaagaactgaatcatatttttggttctaattcggttccgtctgaggaaatttcagttttatgcctac

SEQ ID NO: 6063 - DNA, 1349 bp, Arabidopsis thaliana landsberg
cttgacttttcaagatttctgttttgttttaggtgcatgtggttccagcccatatgtttaggaaagttatcagtatcacaaaatctcactgcaagctaggacttacaggtaatttaagggttcatttcaacatacatttacatatgtatacttcagttgcagaagctaagtttcttttttggacttttgttcagccacccttgtgagagaagacgaaaggattacagatttgaacttcctcattggcccgaaactctatgaagccaattggctagatttagttaaaggaggctttattgcaaatgttcagtgtgctgaagtatggtgtcccatgaccaaagagttttttgcagaatatctaaagaaagagaactccaagaaaaagcaggttcatgaatatatgcttttttgcattttctgaaaataatatctgagattgttagatatctgatctttatgttagtttcatctgatgcactagagtccatgaattttatgtagtctggaaccttgaaatattgtaagcatcaatataggttctttttcttagtgtgcttttctaatttggaaaatgctctaatagaaccaccatggaaagtctatggaattggagctagtaaaccttgacagttgttctgacatgagtcttctggtatctgcaggcactttatgtcatgaaccctaacaagttcagagcctgtgagtttctgattcgtttccatgaacaacaacgtggggataaaatcattgtctttgcagacaatctttttgcgcttacagagtatgcgatgaaactccggaaaccaatgatttatggtgcaaccaggttcgttcaagttctattgataacacacttttttcgttttcactcaatttccaatttgataattcaatttttttttcaatatgtagtcatatcgaaaggacaaaaattctcgaggcgtttaaaaccagtaaagacgtgaacactgtcttcctgtcaaaggtataaacattgtttccttcattatagaaatttgtccttcctccattccatgttcgttagggaacttaatttccgtttggtttatttgactacaggttggtgataactccatagatatccctgaagctaatgtgattatccagatttcgtcacatgctggttctagacgtcaagaggctcagcgtttgggtcgtattcttagggctaagggttgaatttcgtactcatcacttaagtgtctctcttagtttctcttggtggttggatcaattttttttgatatttctccatatgatgaaaacagggtaaactcgaagatagaatggccggtggaaaagaagagtacaatgcattcttctactca

SEQ ID NO: 6064 - DNA, 1829 bp, Arabidopsis thaliana landsberg
tggtcgagtaacaaggagaagtatattatagaaggatcttcatacagcaaaaccattaacattacatgaatatctatctaaagcgtacaacaatcactaatttactatgtacacacgcttctagcttctgatatatctcttctacatgtcgtaagagtttggaatgtgacagatacaaaaccacaaaccaaatgaagaaggaaagagtctttacagatccgagtcttgccggctagccaagcagagttcatgtaattcattgagtatccattcctcaccagtgtgaccaccaaggaccaatactctagttcctccaacaacgcatgtgctatgtccccaagctaacttaggcggtttcccggggacattcaggatcctccatgacggtttctcttctgcaggatctattagaaacagttgcgaaggagagtgaagccctgcaatcgaccctccaaagatgatgaccctaccacacggcatgctcacagccacatggtctagtcttggaggcggtacaaccacgcctgggaatgcgctacactcaagctctctccatcttggttcttcatcctccaagtctatagtgtatgcctcccctgaccttagctttagatgaccactatttgcaagcccgccaaacattaggattttagtccgaccaaagaccgataaagaatgcccaagtctagaaggaggagcccatgatgtcgggatctctttccatgtcggtttatctgttgtcagatccaacaagaaggtgtcgctgagaagcactccagcgtctgtgcagccacctgagacaaccagtttagagccctcaatggtgcacgagctgtgccaagatcttggcaatggaggagttcctcctgctacttccttccatgtgggatgcttagcgtctagatcaagcacaaatacatcattaagcaatccttgtcttccacaccctccaaagactaccaaccacgacccgttgagacacgagagtgtgtgtccccaacgtcctggaggcgacgacgtcaccctcacacgctgccactcaggacactctgcatcaagattgagaacaaaagtatcatccaatggctgcatgttaaccccttccccaccaaatagcacaagccggttcccaacagcacacgcgctgaaattgcagcgggaaggttgtacaatccctccaacagtaaatttacgccaacacacagcttcaagagtggtgagctctctagctaaccgaccccatcttagcttcttagtcataatctccagtgttccagttatctcttttccccacgcattctgacataccatcttcctcacactctcgttcttcgtcaactgcctcaacctcctgcaagcagaaccaattgaagcaacgtcccttggagttaaccgagataagatgttatgagccaaaacttcatcagatagctgcaatatcccacagaaatcttcatgatgctccttaaacctcgggcttccacttggaaacaagcactcagatgtttgatcaagctgttgtttatgtttgaacacaggatacgagacacggtcaaggtctatagtcgtttcagagaagacctgtatcccaattacgtgtgtaatggttccatcatcgtcacgtattggagcaagccgtagtctgttaaccaaaggagtaccatcttttctgaaattaagaagctctccttggaattcaataccttcttcaagacatctcctaatctcagatacaaccacaggatcaaccaatgggtgacgcctttgagctcgaggatctctgtactgtaggaatcgactgaaaccaagcagattcaaccacaaataca

SEQ ID NO: 6065 - DNA, 1724 bp, Arabidopsis thaliana landsberg
tgtttaagttaggtgtgttctgtttttgttcttgtcagagagcttttagggacggttaagaggcggaatgaagtgtatgagtacctgagagatgctataggagattcaatgatcagctatgacattgaacttgttggccctgaaatcacagcttgctcaacttcctcgtcggttgcagaaacattgttctcctcggatgtgtcgggagagcattcgagtgggttaaacacttcaagcaatgtttctattgcagttgacaactcgctaagctcagctcacaccctcattcatatcacttgtcaagatcacaaaggtcttctctatgatattatgaggaccttcaaggatttcaacattcaggtttgtgcaagtctttaatgggttttttctgacccttcaaattcatatgctttgcttaaaccttgcgactgttatttacatgagactcgttttctcgaatcttatttgatgatcagatctcatatgggcgttttacaatcaaacgaggaaagaactgtgagatcgacttgttcatagtgcaatctgatggccgaaagatccttgactcgagcaagctaaatgcattgattactcgtttaagagcagagctacagcaacctctgagagtggtaatgatgaatcgaggtccagatactgaacttctagtcacaaacccagttgagttatcaggaaagggacggccacaagtcttccacgacatagcacttgccctcaagaagatcgatacctgcatcttctcggtataatataactcacccaatcacatcattcgagctcataccaaaaacagtccatttttgtatcatctaaatatcgatgaatctgatgtctttactaggctgaaattggaagacacgtgactggagacagagaatgggaggtgtacaaagtgttgatcaacgaataagacagcttaccaatcccgagaagcaagatagaggaagaagtatggcatgctttgatgggctgggaatgcaaatcttgcagagtataggaccattagctaacctcagactcttcgaaagagtatggctataagatttgtcactttatgatgcaatgagtgtatgtagattaatatgatacgaggagatatatctgataagccacagtgtgtatatatggtttgagtctttctttttgtgttgatgagaaattgtaagtagagaaaagcagaacgttggaatgttgtaaatgagtactgtgtgggtttcatagtaagaagctaaagtttttctctttgttgtattgagctgagatttttctcatattatatgaagtgagtgactatatcgtaattaaacacttaatgaggggcaaaaagtgaaggagaaacctaagaaaaatggcgactctttaagaagcacacgaagacaatccgaaagctgaccacaaagttttctactttgcaatttagataaatctttctatccactttgagaataaattaagggctctcaatttcgaattctgcttctccaacgaaaaaaacgaaatctttaatggcgaagaaaggaggagcgacgctagctgaggatgcaccatggcgagtttcgtcaggaagaccagtgcctaagatcagtcgctctccggttttatctatctctcaaaacccagaaaccgattacgccatttacgtcatgaaagttgtttgtttgcggattgcaatcaaatttgggaattgtcacagctttttttaatta

SEQ ID NO: 6066 - DNA, 576 bp, Arabidopsis thaliana landsberg
ccgaacaacggttatattatataagctgttaacttttctatgcaacttcctatgtaatctgaaacgggaccttaattaagattctctttcatgggtcataaaagtaactaaaagataaagtcacactctccaaccttttccacaaagttgatagagactcggactatccattaattagtgctaacagatagttatctctaaacttaaatgtggttgttaattgtttgctcaaaaaaaaaaaaaaaaaaaaaaatgtggttgttaattgttgttacacacaaattaagtttcattttgcaataatatattcagactaatatttccatgtctatcttctatatatatacaacttagaatatcatttgtaattttattctagattttataaacatattactcacaagggtagtagtaatgatacctagttatattctcttgctgtcagattcaatcattattgatgataaaataagacatattaacattaatacacatatacatatgtctcatatggaataaaaatttgaaaagacgagttataaaatatcggaccttatcaaaacggtcaaactttgg

SEQ ID NO: 6067 - DNA, 3496 bp, Arabidopsis thaliana landsberg
acacagtaaaggacattgatagtaagcaagttcttcagtgcatgtaaggtctcaagtaatcctcttgcaaaatcttcagtgacatccagaagaatcatggaaactggacggagatccgaccacttggtaatactcctttttgttagtgatctatgcattgtcttgtagaactaataccttagacactaatgaccatggttgccttttgcgcggtattcagcatccggtttcaggtggtggtaccaccagcaagataattccatcagctcgccggacttctctaccactcacgaaaagagctacaaaccaagaagttgcagcttacaacccaatagttgggatcttgcagaatgtcaagtctccagaatattccattaatgagccacaagttgataagattgccatttttccattagctccatatgaacaagacatcttctttactcccatgcaaaggaaaacatcgtctaaaagctcctctgtctcagaccgctctataacaaaagacaaatgcacagttcaaactcatacgacgtggcagggaatccaactcaacatggtagataacataagcgacgggtcatcatcatctgatcagaatgcaacagctggtgcatcaagccacaccacatcctctagttcaagaagatgtcggtttgacccatcatcgtatcgtcaacgggctgatgctttggaggggttgcttgagtttagtgccagattgttacaagaagggagatatgatgaactcaatgtattgcttaagccttttggtccaggaaaggtgtctcccagagaaaccgcgatatggatcgcaaagagcttgaaggagaatcgagacaagaccaaaatggtagatctaaatgtttctagagagataccacatgtgggtctcctctgacaggctccacattgtcataacgttcggtttagttcggttttagcaaaaagagagaagagaaagaactgggttatgcttctgggatttgcaggagctagagttggtttaggtttagtttgatggctgacacttttaaaagatgagtaacagtattagtaggttgcgttggatggtctttgctttagtcgaaccggtagctttgcatttgtaatctgtacacttgatagtgttaacaccttttataacttgtattactatagacttcataaaagtttccaatctctataatttttttgtttggtaggaaggtggggagacaaagacaattagaactagcagaacaagttttggctattgaagcagaattataaaattttggatagtcacttagcatttgaccggtccacatattaccggtggagcggtcaattagaactagcagaacaagttttggcctttgaagcagaattataaaatttggatagtcacttagcatttgtggttcatctaatatttaattactccattttatctcttaatctaataaatttatcctcacaaaataagtatacaagtttttaataacattatattttagtataatttttctttgtcaaaccacaagttaattaaatactaactccatgattggttactagaaaacaattacgaatgatatattttagtatatttttttcaatcatgaattaaataataaaatagtttgagttaaattaattattgaacaatattcataaaacttttggggtgagtaaagaaataagatggattgaaaaaaggccacgtggttgtcacaatgcttttcaaaaatcttatccaagcataagtctccttggtacctctcctctccaatggatcatccgtctctaacaatgaccaaactccgaaattataagaagtaaagacaaccatggcgagtgctaccttctccttctgtcccctctctcaatcccatccccattcttctctaatcaaaccgacaccgtttctcagatatggcaagaaactacaccatcttcaccaccacatcttcatcaccatctcttacccatctcaccattctcgctacttggccgtttcaagagacgatgccgcgacgcctcttttttcttccgaccaaacccaagagacagagaccagaagaagtggaagacactatagagaaacgaagaatggaggagaagtttgctgttctaaacactggaatctatgagtgtagatcatgtggttacaagtacgatgaatcagcgggtgacccatcgtacccgattccaccgggttttcagtttgataagttgcctgaagattggagatgtcctacttgtggagctgctcagagtttctttgagagtaaaatggttgagattgctggttttgctcagaatcagcaatatggacttggtggtaatgctcttacctctggtcagaagactggtttaatctttggctctcttttactcttctttgcgctttttttgagtggctatttcattcaatgattaaatattttctcactattactatgttaaatcatgttaccaccaattttataatgtttcaatacaccattcttctccatcaatttgtactaccacttgcaagcctggtctgaaaaaccttaaatctaacaatgttagtccagaggtaaggaaatacacttgaaaatgttaaaaccaatagcgaaacacggtagaagaaacagagagtcgaataacatccaattgccaagagatctcttaaggactctaaacaagtttaatgtaataagtatatatataacaaaagaaatgtccaaaggtacattatacatttgcctttagccagaaatttaagagaactgatggcagatgatgctaccatacataagaccattgcagcaaaagaaaggaactcacctgtacagaagaacctccttatgcgcctcaactaatatctcacaagtttgcacctcgatgacttggttgtgtcttggcctggtaaattactttctttaccgattttccatttgtttcactgtacccaactccatccctatagtatccaccgacaaaattaccacctggctgtgtaccgatccattgggtggggggtgatggcaacgggttcaaatttgcattagcagcttctgtataacttgaatacaattgtttgcttctgccgttatcttctatcgataaaccagacattccagctccaagtccaccacggttgtgctgttctgctactatcttggagttgtagttccggttatagtcttgtgacccatttgatggataaggatatcttggaccattgttaaacgttccctgtgtgctattgttatactttccatagtaatagctcgagtcatcgtcataagctttccggtaaggagacggacccggtgctcttggtctattgactccaccataagaataattacccggtacatttcggtagtatccgtttgggtcaattaatcccgaagccgcaccagtagaggatttcatgttaagggtgtttttgatcagacgatgagctgcttctcccagagaaggccctgctatagctccaaccacttgcggcctgcacaat

SEQ ID NO: 6068 - DNA, 1727 bp, Arabidopsis thaliana landsberg
catcccgggaaccactgacccggttaggttcttccagagaaactcaaaagcttttttctggtgcaaatgcagttttctcttaagctgaggtattaaagaccagacattgtcactttcttcagccgatggcatatctgaggaagcaactggtatagtgaaagtatggctctcaactccatcttggttaactatagtagtattaatgtcatcttcgttgatttgcttagtctccgtcgtccatttcttgtgccgcgcctatcgaaaaccataccaccaaaatatattacaagtaactcatcgaaagtaggtgacaaaatgttgtctggtatagagtttccacttacaaaaggtgcagaaacatgttttatctcagttcctacatgaccacacaatctgcaacacattccgatttcttcattcaattcatagtcatgttcacaatcacaggttgctttatggaacgcctcgttatccactctcacctgaaatttcaaatcaaactattaaacatataaaaatgtaagctcatggtcatcaagaatgttttcaggaaaatataaaaagatttccaaaaggtatatatatataacctcatggtcatcaagaatgtaagaagaagccaagcatagttccatttccctccatagaatctcattctctgaagtctcgccatcatcctcctcctcctcactcaacctttcttcggcttcgatcgaaaagcttgcggggttctttaacccttgccactgctcaacaacattggttgctttgtccttggctgcaattgtagaatcaattctactcatgtacgagtctatcaacttgttatacgcacctgcgctcaacgttctcttcttataaatctgcggttcctcagaaactccggtttccctagaaacggaccttattcgagaatgcggtccatttcttttatgaaccacattcccaataggtccattccaacctagatcagattccatctcttccatttcaatcttcttcttcttcttcttcccgtatttcgctgctttactacgatacttatcgatctcatccatcaaatttccagagacaccaccacacaaactatttgcattgagaccaaactgttccaacggtataggttcaaagacaggagtgaaaggaataaccgaaagctcacaacttcgactaaatccctctgttttctttctcttcttcctctcagttttgtctaccaaaactatctctctctgcttatccttactaaatccctttttgcttcctttctttctaagtaaatgcgataacggtaagtataaatcatcatcagtatctttatcatcctcgcaatcttcttcttcatcatcatcatcacttgaaacattccatatgttgtacctatatggcatcatccttacccatccatccttcgaatccggctgaatctcagagtctccgtatctctcaggccgcccgcttcttctcttggaccgacgcagctccattacctcctcttcaatctcctcctttacatcactatcttgacaagtatcctcagctggattgaacaaaacaaccttagacatgacaacaccgtcttcaactgtaatgttcattgcactcaaagagctactagagccttcgcaatcttcatccgtcacaatctgataaaccatcttctcgtgaacggttctaatctgaaacacaatgtttttcaaaactgatgtaacaagcaaccatgtaag

SEQ ID NO: 6069 - DNA, 1641 bp, Arabidopsis thaliana landsberg
gattctttgtggactgcacttccttgatgaaaacaagactgtctttgggaaagttcttgccggatctttcgtggttgactgttacctcaactttgaaaagcattgtgtttcacataagaacagtgcaaaccaagatggtttatcagattgtaacagatgaaggctctagcagtacgttgagttcgatgaatattactttggaagacggtgtttcgttatcaaaagtggttcagtttaatccggcagatatattggatgattctcaagatcttgaaataaagcaagaaaccgattattatcaagaagaagatgaggtagtggaactacgtaggtccaaaagaagaaacgtgagaccggatatctacaccggatgtgattatgagccagatacaattgacggttgggtgcggatgatgccgtaccagtttggaaaatgtgctgttaatgttgagagtgatgaagacgaggacgataacaatgaggatggtgatactaatgatgatttgtatataccattatcgcgtttattcatcaagaaaaagaaaactaattctcgagaagcgaaaccgaaaagtcgaaaaggcgagatcgttgtgatagacaagaggagagtacatggatttggtagaaaagagaggaaatccgagctttcggttattcctttcactccggtgtttgagcctataccgttggaacagtttggtcttaatgctaacagttttggtgggggtggtagtttctcaagaagccagtactttgatgagactgaaaagtatcgaagtaaaggcatgaaatacgggaagaaaatgacggaaatggaagagatgatggaagctgatctatgttggaaaggtcctaaccaggtgaagtcgtttcaaaaacgaacatcccgatcttcgcggtcagttgctctaaaatcagaggattctgatgaaccacgggtctataagaaagtaacattgagtgcaggtgcatataacaagctgatagatacatacatgaacaacattgagtccacaattgcagccaaggacgagcctaccagtgttgttgaccagtgggaggagttaaagaagacgaatttcgcatttaaactgcatggggatatggaaaagaacttgagtgaggatggtgagggagagacttcagagaacgaaatgttatggagagaaatggaactatgcttggcttcttcttacattctcgatgacaacgaggtacaattctctttgagatatcgcatatactaaaactaaaactatatacaagcatttgcctgctaattccattgttgtggtgtatcaaaatctctaggtaagagtggataacgaggctttcgaaaaggcgagaagtggttgtgagcacgattataggctggaggaagaaatcgggatgtgttgcaggttatgtggtcatgtaggaagtgagataaaagatgtatctgcaccatttgtaagtgaaactcacaacttacaaatgcataatgttaatgttactgggcttgtaataaatgattatatttcatggtttggtttgaataggcagaacataagaaatggaccatatagactaagcatatcgaaaaagatgacataaagactaagttgagccacataggagcccagactaaagatttctcta

SEQ ID NO: 6070 - DNA, 559 bp, Arabidopsis thaliana landsberg
  unsure (1)..(559): unsure at all n locations
tgtggaaagatccttccacatcagtcctttcatatgtatgagctccaaagtagtctctctgtgcttggactagaggtgccggcaatctctctctcctgtaagaatcaaagtaggctagactcgcagacatacccggtgtgctgatacccgagttgatagctaagcagacgactcttctccacgcggactgtctctcgattatctctttcgcaaactctggatccaccaagaggttagctagctctgcgttcctgtcataagcttgcttgatcctgtctaggaagattgctctgatgatgcagcctcctttccagattctagctaactcacctagcttcaatccccaccccttttctatgctcttggcannnnnnnnnnnnnnnnnnnnnnnnnnnnnnnngattttggatgcgtaaagagccttcctcacgtcatcgactagctgtttcttgtcaactttctgatcggtcaagatatctccaaacccacctgccttgaagactntagctgcttgcacacgttcatctttaagcccgctaaggaacctcgcatcaagaga

SEQ ID NO: 6071 - DNA, 1941 bp, Arabidopsis thaliana landsberg
ttcagtgccctacttatatctcctttagcctcatcaatgatgtttagcttcataatctcttaaagattcagaacggttaacaatatcaataaattgatctgtcacttctttgtatgcttctgaagcatcaatgtggaccatctttttatctgtattgcattcttcagtctctgaaccaacactaacagaattagatccaccatctaagaccttattgaaaaacttaaaaagtgttggctgccctggaccaactggttttgattttggatctttcttggccttcttgtttgacttactgcccgagcttttgcctctcttcccaggagaaatagtaccctttgttaaattcatttttcttggtaagtcaaaacctttttgaattgcttgaacatctggacaaatgcctttcacaggattaggttggaggtcggttacatagtcatcaaacaaaacagcctgattattcaaggaaggcgtgggaagagaggcttgcttgtaaagctctgcttcatattcataaaagttacttactatatccacgggattaccagcatgcttcttaatcagatctaacatctgctcttcagtgacccaagcaggcaaagaatcacgtagttttatcagcaatcttgaatcactacttggagttgtatcatgcaatatgggtcctctagatgatggaacattctctccaccgtcttcacatgcatttttctcttcctcttcgtaaacctcagcactgtgtgacacaacatctacatcacttttctcattcttctggtaagactgacgatagaaacccaataaaaaatctttcttgtttgccatctcatcaaccaatccagagaaatgcttctgcatcttattaacctccttgcaatcaaacttctcaatatcaactccaacagtaggaataactcttttaggtttcaggaactttataaactctctaagttcatcataattcgaatgctcactatacggtacaagatgaatctccatcgaatctttaaacctaaccgcaaacttattccgcttcacttcataagtccaccctgtaggcacaaaacctacaaccttatcataccctttctcaaccataatctcattcatcttcacaaaattcggcctaaaatacggccaagtctcacccaacacattccaccccacaacatgaacatcactctcattctcatcttcagtaaacattccctcctcaccacaccccaaaaccgacaacatcgacatctttctcgcatcgacaacgattttcctcttacatctcctagcaatctcaaccaaaatcttctctttaccaacaacataagtagctacaagaaacaaaaccttctcctcactaatcttatctatcacactaacaacataaccaacagactcttcttgactcggaaaaacaaacttaggattacaataagtagtatcgagaaaaacaccatcacaaccaacaaaaccattaagaaacggatcaaatctcatctcatcacagaatctaaaatctccagtatgaacatacttttcaaatccactgctctctaatttgactttaaacaaaaactgtaccgctcctggacaatgattagcttcaatcaacacaacttcagagccatcgatcttaaccatttggttcataggtaaagcgaaaacgaattgtgaaggaacttgaaggatttctgcaacgagacgagcggttttgtgtgagcagtagattattcctttggaccaggaagaggagagaccggagtagtgatcggagtggaaatgtgagaggaagaaagcgacggaggatgattggtgtgggaggcggaagagatcgacgatgaagttagtattagggattcgttttcgaatagggattgaaggacatgaagatgttggtttcggtgaggggaattgtggagagatagaggaaattgctgatga

SEQ ID NO: 6072 - DNA, 1521 bp, Arabidopsis thaliana landsberg
catgcttcttccaatgcagaagagattagacttccaccaatgttaagctcctgtccaattgatacatgatcagaaaaatcttaagggtttacttaaaaaaaaagagaagcaagaagagatacaacgtaaactgacaatattctcatggtcagcggcaatcttatttgtgcaaagataaacagcgggcagaacatcttctggagagagagcaaacaagctgatggatgaatttacacaaatttaagtaccaattatcattgctgcatcttattcaatagagtgaacgagaaagaaagagagtaggcaaccttctaaacatgttgcaaagcatagacatagctttgatctttcccttttcactttcaacagaagcaaatgttcggacaaggtggatatatggagcaggctgtccctccctccaacaagctgcattttaccaaaacacatattggtgtagatgcacagaaatattgcagctggttgactaaatattcctactacaccgcaaataatttggctgcaaacaaattctctctaatttaaggaaagtttaactgattatggtataaaatttataagattgtgcatataaatacaccaaccgtgctctttaggttgatatttttcaggaggtagagatacataattcttgtccagactttcctctgctgatgtctccacacatatgttgactgcatgtcctgatttttctgacgcctttttgccctcctaagaggagcacgcttctggacaatgcgaaaactgaattgatttgctggatagtcctccctcaccaggtatggggttactgtaatagatgttcagtgccctatttatatctcctttagcctcatcaatgatggaagcagcataatctcttatagattcagaaccattaacaatatctataaattgatctgttacttctttgaatgcttctgtagcatcatagtagaccatgtttctatctgaaatgcattcttcagtcactgaatcaacaaaattagatccactatccaagactttattgaagaacttaaaagtggttggctgccttggaccaactggttttgattttggatctttcttggccttcttgtttgacttactccccgagcttttgcctctcttcccaggagaaatagtaccctttgttaaattcatttttcttggtaactcaaaacctttttgaattgcttgaacatgtggacaagtgctcttcacaggattagggttgcaggtcagttacatcgtcatcaaacaaaacagcctgattttccaaggaaggcgtgggaagagaggcttgcttgtaaagctctgcttcacattcataaaagttacttactatttccacgggattaccaacatgcttcttaattagatctaacaactgctcttcagtgacccaagcaggcaacgaatcacgtagttctaccagcaatcttgaatcactacttggagttgtatcatggaatagggtcctctagatgatggaacattctctccactgtcttcacatgc

SEQ ID NO: 6073 - DNA, 2085 bp, Arabidopsis thaliana landsberg
  unsure (1)..(2085): unsure at all n locations
atgagcatcatcacaaatattttaaacatgaagtgcttgtcatttggtgagagtaatttgaaaaccatatataagttacaagttatcctgcccacacatataattagttatttgataatgctttgtttaattagcaagtgattgtattagggttaagttctagatatattattgattaaaaaaacaataactaatccagtgcagtctatatattagagaaaagactgttgaccagtacaacaaaaaactcataggctatatagttgacctgcacttgtccaaaaaacactcattaactttaccacctacctccacaacttaaattatatcttctcttcgttattgctaccaaattattcaagtttcccctttctttgttagacccaaattttttacttgtgacctataatatctggcgataaaagccatttacaaactttggttttactgaatttcaggttttctacattgtttttttctcccctaatttttactacaaacttaattcatacgataggtaagagactccaaaaaacagattttttttttactgtatgtactaaatcggttgaagttaaaagacgttttgtcaataaatgtacgcagtcgaattgtcatatattgattaatttcttgacaattttggtttatatttttgtactaaataaaacttgttgcaaagtaaaaaataaaaattaaagaagtagctaaatatttttggttatgtatgagaaaattctttggttacatatatatttaagtgagaaatattaaatttgttgtcatgattattaaaaaaatgtcatagctttatcaaaagactatgatgccatatatgtcaagcttctcacttattgtaccaaaacgaaaggccaccatacactactcattcaaatccatcccaccaactcacatctagaagcaattataagttcaactctctttctctctccttttctatcatctagaagcatttgtgtatatatatatatgtgtatattcctctctagctttaagtcaaaaccctatataaactatacaccaaagctttgaaccttcaaccaaacccaaaatccaagtgccccaccaaatgcttcaatcctcttccactacacaaaaaaacaacttaatccctttatacccttttagccaaaaccctcgctaaaagccaatccctcaatataaaataacaagtagaattgatctgcctatatataagattttgagacgaaataagatctaaaccacaagaaagaaagtaaacataaaagtatgggaaggtcaccgtgctgtgagaaagctcacacaaacaaaggagcatggacgaaagaagaggacgagaggctcatcgcttacattaaagctcatggagaaggctgctggagatctctccccaaagccgccggacttcttcgctgtggcaagagctgccgtctccggtggatcaactnnnnnnnnnnnnnnnnnnnnnnnnnaaacttcaccgaggaagaagacgagctcatcatcaagctccatagccttcttggcaacaagtgagtactatactctctaaatatgggcttatttaactaagtatctgtttttaccaaaaaaaaaaaaaaaaaactagtatagttttaatttatacaaaaagaaaatcttggagtttccaatatctaaatgatgttttttttgttgatgatatatagatggtcgcttattgccgggagattaccgggaagaacagataacgagataaagaactattggaacacacatatacgaagaaagcttataaacagagggattgatccaacgagtcacagaccaatccaagaatcatcagcttctcaagattctaaacctacacaactagaaccagttacgagtaacaccattaatatctcattcacttctgctccaaaggtcgaaacgttccatgaaagtataagctttccgggaaaatcagaaaaaatctcaatgcttacgttcaaagaagaaaaagatgagtgtccagttcaagaaaagttcccagatttgaatcttgagctcagaatcagtcttcctgatgatgttgatcgtcttaaggacatggaagtcaac

SEQ ID NO: 6074 - DNA, 1937 bp, Arabidopsis thaliana landsberg
ttcatatttcctgaaaccaatccatatttataagatatctctttttatcaacaatatacttatgcgtttttaaacacggatagtaatattatgatgatgttctcctctcataaagatagttgataattacaaatatattaggagatgctctatgttttaaagattttaagttattgggaaaaattaacaattctaatattgcggccgtttatgcctttgtcccacatgttacaaataaatcttaaaaaagaattatcatctattttgttcatctataaaaccatcaacttctccatcttttcctgtggatacaaacaacatcatccattatctctctaaacataactccaaaaagtgactcttttcatttcagaactcactcaaagacaagtacaaagctaagtcttgatttttttctttgaatatctctttgtgggtcactcttcatcaatgggtgacaaaggaaggagcttaaagatcaacaagaacatggaggaattcacgaaagtggaagaagaaatggacgtaaggagaggtccatggacagttgaggaagatttagagctcatcaattacattgctagtcatggtgaaggtcgatggaactctctcgctcgttgcgccggtatgatactctaacatctacttacacatatacacacttagattaatataggcatagacggtgtgtataaatgtgctccttgattgaaaacaaataaaaataagtaacaaaccatatattatacacaagttgtttcgatctccatatgtgtcttttttaatttactcagtgcgccactttttctgttaatcatatctttttgtttcgaaagttctttttttttttttggataaaagtttgttgtgaaagttcaagaaatggattttgccttgtatgcacacaaaaaaaaaaggaaaaaacaaatcatggggataaaacaaaaagagtgtcatgcttttgtgttccgttctctcattatttttcttctttctgaatcgttaaaattatctatgatcattcctaatgaaatcgtgttttgctattcggactcaattattataacttttaggaaatggattcaattatttaaccctctaggttttgaatagagtaactctattcgtgttgaaataaatgaaataattgatcaacatctatatgggaagagcactaacgcaatggaagaaagttttcaggagacaaagaccctttttgagagtttgcctcatagcaacggtccctataatttctagagtaaatttgataactttaccaaatatatatgatcattatcatgagtttcttgcgtatgaaatcatcatacaatatacgtgtacacgatgatgtctaattaaataatagtaacttccaatataaaacagaactcaaaaggaccggaaaaagctgcagacttcggtggctgaactatctccgaccagatgtgcgccgtggaaacataaccctcgaagaacaactcttgattcttgaacttcacacacgttggggcaataggtacgttttttaattacggtcatttatacactttattttctactaacaagattttgatcacaaagatggctaaatattattgtacacgaattagttcacatctttagtcatcaatacattttattttctgttaacaagagtttgaaagattggtttatttgtactagtaatgaatttgatcacaagttttcttcttcttgtgaggacagatggtctaagattgcacaatatttaccaggaagaacggataacgagatcaaaaactattggagaacacgtgttcaaaagcatgcaaaacagcttaaatgcgacgtgaacagtcaacaatttaaagacaccatgaagtatctttggatgcctcggctcgcagaaaggatccaagccgcgtccatcgagtcttgttttcatgttattttgcgtc

SEQ ID NO: 6075 - DNA, 678 bp, Arabidopsis thaliana landsberg
  unsure (1)..(678): unsure at all n locations
tatattttggtatgtataaatgattctaataaaaaacggaatgagagtttaattacgatgttctataaaattaatcgtgtttttaataatggagttagttttgatattttttctattgtgaaggtggtcaaagattgctcaacatttaccgggaagaacagataacgagataaagaattattggagaacacgtgttcaaaagcatgcaaaacttctaaaatgtgacgtgaacagcaagcaattcaaagacaccatcaaacatctctggatgcctcgtctcatcgagagaatcgccgccactcaaagtgtccaatttacctctaaccactactcgcctgagaactccagcgtcgccaccgccacgtcatcaacgtcgtcgtctgaggctgtgnnnnnnnnnnnnnnnnnnnnnnnnnnnnnnnnntttggaacgttggatcatatgacaaatggtggttattggttcaacggcggagatacgtttgaaactttgtgtagttttgacgagctcaacaagtggctcatacagtaggcatttcatgggtttattaatgaatgtaatgtataataaacataaactaatcattcaaaacaaaattaaaggttttccgggttttttccatttttttattggtttaattttattgtgatgtatgattttacaaacaaaaaaaaact

SEQ ID NO: 6076 - DNA, 961 bp, Arabidopsis thaliana landsberg
ttgtgaacatcagagccagtttcatactccaaagtatactcccttacaacagagttgctcccatttaagagtgactcagctgattggagaatgttgttcctcgtggaacattcagcaccattggaccctgcagattgaatatatgtgatacacttagaagattgtccaccctctcactgaagcatctcatcctcttggctcttctccttaccacaaaccgccaacaaatccacacttacaccatcaaccaagtaaggtagagcttcaagcgatagcaacaaagttatctgaggctcactctcccttaccctacggaagttccttacaaccatgttggtagcaacagtgacaggcgacctagtgttgactaagaaaacagagagttggccgggtagccagtaacttattttgggtttccagttgtttccatcaagttcaaactctgaactaacatgtttttgcagctctgcataagtcatcttcgggttcatacatatcgtcctggcataacaatcctttgcaaccacaaattcccatacacctttgtctgaacattcccaggaacaagctataacgcacacagctacgtcatccccctgtcacggaaacatagaactttaaatcaaagaatatgagcctgaaatgcaatttacattaacaggtgagtgtaattacattcacaaaaaccgaaacagtagacaacttacattaacatatgagtctaattacttaattaaaaccattggattgtgttacagacagcttcaatagcttacacattaagttgaactactttatactcttcacacaactaaacaaactactcctcatactaagcaattcttttttacagaccaagccattgtttgttacagacaactcgtcatgccaatttactaaacaattacttacttacagagactaagctattgtttgttagagacagggtcattaccttaca

SEQ ID NO: 6077 - DNA, 1386 bp, Arabidopsis thaliana landsberg
aaaatattgcccgattctaggtgttaagaaaacgtcaaaatatttccgaatcgatttctatgaataaaggtaaattggttaatatttcctacataattgtgaaactcattgatttttaaatgtttaggttatacgatacaatttttcttcaagttttgaaggtaaaagatatttaacttcacatagtgattctcaaagaggataacgttattaaaactaaagccttcttgatcttgtcgaataaggtagagattgaagaaaaacaaaacacttttattattattaaccaagacctcatgtatcctggtcaatcacaaactacaacataggaaagaaacattgaacagaaaaccaaatcctcaaaatataacttaaagctcatccctcttgagcgcggatggacgaacaccttgagcgaggaaatctttgtagtacttggctgattctttctcataacgtgtgaggttatttttgaaatcgacgtaatagagtccgaatctgtttttgtaaccatcttgccattcgaagttatccaacaatgaccatacaaagtatcccgtaactctcaccttatcgatgctgcacaaacacaattatgttcttaattagaccattcaatagaatcgttagtcaatctatcaaataataaaaggcttaccaaatagcctcgttcatagccagaagatgcctctgaagataatatttcctgttatgatcagcagtaccaacgtcaaccgaatctgtggtcccaagtttatctccatatcctagaaaaaacaacattataatgatcagtatattactcttaagagttaagattaaatcaacacacaaatataacaataaatctcgagttaccattttccattatcataatctccgggtttgcgtatttgtccttgatgtactttaaaagctttctaaatcctttagcgtagacgggcaatgcagcagtaagaggctgaaataaagcaatggtgaaaatgttatgtcgtagacaaaaaattaacaatcacaaactaggactagtttaatcaaacgcttaccatgctaccaatggcgctgtgatctacattcttagctgaaaaataaaaagtgaaaatgtatgcatatcaattagtattataaaaccttttatctttagtttcttggtttggtttcatgtaaggaaaacaaaaaaaaacttacgttcccaggaaacaagagaatcttgcttccaacttggtttagacggatctggcttctcattataaattgaaaatgtcgaagtatagtagttaagccctacgaaatcggtcgaatctttcaattttgctttttgtgcagcagtaaattgaggcaatctgtaaccaagaaggtctttcatgatttgtggataatctcccg

SEQ ID NO: 6078 - DNA, 1547 bp, Arabidopsis thaliana landsberg
gtgttgaagttattagtcattaaaatatttgcacgatttagttgttaagacgacgtctagttattgcataatctatttctttaaatagaggtaaattcgtattttcaatattttaaaaactatgatatttttacttcatatttaaaaacacccgtccttttgtaaatttaagattttttcatacatatataatatttatggtatacgcgatacaatatttcttcatgttttgaaggtaaagataccttcatataaggataatatatttatactaaagccttcttgatcttgtcaaataagctctaaactgtaggagtacacaacactcttattattcttaaccaagacttcatgaatcatgatcaatcacaaactaaaacataggaaagaagcatcgaacagaaaaccaaatcctcaaaatataacttaaagctcatccttcttgagcgcagatggacgaacaccttgagcgaggaaatctttgtagtacttggctgattctttctcataacgtgtgaggttatttttgaaatcgacgtaatagagtccgaatctgttattataaccatcttgccattcaaagttatctaataatgaccatacaaagtatcccgtaactctcactttgtcaatgctgcacatacacaaattttcttgattagatcattccatagaattgttctctaaataaataaatagtaaacgcttaccaaatagcttcgttcatagctagaagatgcctctgaagatagtatttcctgttataatcagcagtaccaacctcaaccgaatctttgtccttaagtttatctccatatcctagaaaaaacaacattaagatcaatatatattttaactccaaaactaaatcaacacacattaacaataaatctcgtgttaccattttccatgatcataatttccgggtttgcgtatttatctttgatgtactttaaaagacttctaaaacctttagcgtagacgggcaatgcagcggtaagaggctgaaataaaacaatggtgatagatgttatgtcgttgagagaaatattttaattgtttagttgttaaaacaatctcaaactaggactagtttagtttaacgcatacctggctaccaatggcgctgtgatctacattcttagctgaaatttaaaagtgaaaatgtatacatatcaattagtattataaagaaaacattttctcttagtttcttggtttggtttcatgtaaggaaaaaaaaacttacgttcccaagcaacaagagaatcttgcttccaacttggtgtagacggatctggcttttcattatggtttgaaaatgttgaagtatagtagttaagccctacgaaatcggtcgaatctttcaattttgctttttgtgaagaagtgaatttgggcaatctgtgaccaagaaggtctttcatgatttgtggataatctccaaaagtagttgggtctagatgcctacaaataatattcaaaaactccatcaattatatgaaattgtttacaagacccccttttatcaacgtatatacctacca

SEQ ID NO: 6079 - DNA, 3113 bp, Arabidopsis thaliana landsberg
caaatgaggcttcaaaatcaataaaaacacaaagatatcttttagaatatagaaaaatccaagtgcatatgttttggcacaaaatagtaatacagaaagcattaaaatattcaaacatcaactattcatattccgaagtcgaaacattgcttttgaagtttcgcttaaaaccctcctcaatcctttgctttactaattcagtgacctcttcgacggttggcatgtaaggcctaacagcttcatgggccctaaacctcacggcccattggatcaacccaggtgttgtctcttcccggacaaacttgtcggcggaaaacatctcgatcacagagatcggacccaaaagagccgcacatgcaatgtcaaggtagccgatggtttctcctccgaaaaaccctaaccctttgctgctcttctgaaacgtctcttctagtatcgccaaacactccgtcagctttcccgtcgccgctattctctcttcgtcgttgtttgctccggtcagcgcattcgccgcctcgaagcactgtttcagacacataactcttgatttgactaatctaaacagatttattaataacagagactaaagtatcaaactttgacaagaagcaaaacagagcatgtagaagtgagtctctaaactgttttaccttgtcgtcgatgtactgagcccagaaccgagcagacgcacgatcataggcattagaaggtaggatggatggatcagaaggccaagcctcgtcgaggtattgaacgatgttgagggactcacagattgcaaggtcaccatgaatgaggacaggggttttcttgtggatagggttagatttgagaaggagttggctcttttccccaagatcatcatcaggttcttctaagtactcgtacttgatagatttcaagtgtagagccactcgtggcctaatggaaaaagggtcatccgaacaacctatcagcttcactgtatcgttctgagccatgttttctcttggttttgttgatctgatctctcaagtttttttttaggtttcatttataacagagtgagtgagtgagagggagggaagtggaatttgtttatagatgacagagtgagtgagagggaagaaagtggaatttgtttatataaaagagagtgaatgagggaggcacgtggaattagacgtcgtgtttctcggtgataagagcatgaacatgtgaccagtaaaccattgcatattcaaacacataacttgttgtgcactcaagaggaaaaaaaactttctacacgaaacagagaatacatcattattctctaataaaaaggatttaaatcttctttgaatattcgtttaagcaaagctctttggcgttcggggaatgatgtactccccaacaaagatttttgtgaactaaaggttcaagcagcaccaacaatcctttttaagtgagaacgagcaaatggtttcgaaacatggtgggacatagatcttgctcgatttctctttctctgtagcctccaatctctcacctacaaagttgatttgagacacacaaaactttgatgattaaaaaaagacatttgacatatacgtgtgtgtatactatattagaaaagctctgtacgtacactcatgcatagcgaagagggaagctattactatgcaaatcagagctatttgcgataatttcatggctgcttaactgtttcaaattaaggaccttgttgttttactgagttgttgtaatcttattcaatatatattccatatttgacatgtttcacaattaagtttccatttttaaggtgaggcatgaatagtttggtacaatcaatactttagtcaaatcgattgaaaggtgaggtttcctccagcaattttagtatggcaatatttgtcatgaaaacattgcaaaataggtatggtaatgttaatcaggaacaacaaaatttaacaagtgttaccataattatgacatatgcattcaattttataaaagaatgtaaaatactgaatactccaaacttggttcagcccaagaacctaaagcctctatgtttcttctatgatcaatttaatcataatctatagcaaataataagaataaattgataatagtaacgcacaaagaccaaaaactaattaatcagaagttttggcacaaaacacagacaaatttaaagtttctcaaagacaacaaacatcattttatttcaacacattgcttttgcttttaaaagcaaaaaacgcatcactgaacattgaacttttgctttgcgaatgcaacgacctcttcgacgctaggcatgtaaggcttaacagcttcatgggccctaaaactctcggcccatttgatcaacccaggtgttgtctctagccggagaaacttgacgccggaaaacgcctcgatcacagagatcggacctaaaagagccgaacatgcaatgtcaaggtagccgatggtctctcctccgaagaaccctaatcctttgctggtcttctgaaacgtgtcttctagtatcgccaaacactccatcagctttcccgccgccgccattttcccttcgtcgtcttttgctccgaccaccgcatccaccgccgcaaaacactgtttcatagacataacacaaaacccttgagatgactaatctagagacttcagcgttgagtgtataaatcggatctcaagctacacagatctatcaagaacagagttttttttgtttagctccatttaaaaagtttcaaactttagcaagcaaaaccagattaaccagaatactcatatccgtaaatcggatcttaatcagccagatctatatttgagtgtcaagatccaagcttttagttgaacctcaaaaactaaagtatcaaactgtgacaaagcaaaacagagcatgaaacagagatccacggaagtgagcctctaaactagtttaccttgtcatcgatgtactgagcccagaaccgagcagatgcgcgatcataggcatcagaaggaaggattgaaggaacggatggccaagcctcgtcgacgtattgaacaacgttgagggactcacagatggagaggtccccgtgtaggagttcaaaaccttcattgtggatggggttagatttgagaaggatcga

SEQ ID NO: 6080 - DNA, 4688 bp, Arabidopsis thaliana landsberg
  unsure (1)..(4688): unsure at all n locations
tttctttcctttttcaggataagatggtaaggaaaccggtcgacccggaagaggaattacggtggatgtcccaagaagtacggggttatgttgaagctgttctcaacagtctagctgccaatgttccaaaggtggactagtcaattttcttgtgaattcttaatttcccatgcccatatcgcttttcattactcgatcacattactaaaactgtgacttcaacaggctgttgttctttgtcaagtggagaaatccaaggaagacatgctgaatcagctatacagctctatcaggtttcttaatatccttcctcaacgtattcttgtaacctcaatacagctttttgcgttgtacttatatatatctcgcttggattgatctgcagcgcaattggtaatgagaggattgaatcattgattcaagaggatcagaacgtcaaaagacgaagagaccgttaccagaaacagtcctctcttctctcaaagctcactaggcagcttagcattcacgataaccgagcagctgctgcttcaagctggtctgacaatagtggcactggtatatatactcacacactcatctaccctttcaaatgtgctaatatataaccataaaatgcatgggatttgattcgttttttcgtgtgtcatctttgtttgttcttatttgcagaaagcagcccgagaaccaatggagggtcatcaggagaggactggatgaatgcgtttaacgcagctgctagtggacctgactcattgaagagatatggatctggcggccatagccgtcgttacagtgatccagcacagaatggtgaggattcttctggatctggtggcagctcccgtcgcaccacaccaaaccggctcccaccacgtccgccacagtctggatcatcttacaggtattagaaacctgtttggtttccaggattgttattgaacgaaccataaaacacattcttttctttctttttctgccctttcggattggtccctgtttctgggactatttttcttatgtctcactagtttaaaaaaaaaaaaaaacagaatgataatatgatgatgatgtacttgcgtgtgtttgtagatagatatttgttagagagacacatatatatgagtttggtcttcatattggtcatatgctttatattaaagaaaatgttacttttcttttactagcatctaatagtattgttaatttttttttttagcaagcttaagtatgtctctcttcgtagagtggtttaagtgtttatcagactttcgttaagcttaacatggaatttatctagcaaaattgtagtccaatttaatcagggggaaactagaataaggataacacaaccacaaattgcggcgaaatgaaaaaaactattttcatattaagataaactgtatgcctaccattatcgagttcatcattccactatatagtacaaattgaaaggtccatgattcaacaaaacacataaggaatatgagaaaatttgatcactcctctgtaaagtctcttcgcccaaagtaaatgttaaaggtcaccgagaaaaggtgaaagaaacatgatttcactaacgtagtcagttatcaaattgaaaccctagatatcagatattgatgctccccaaatcatgtcgctgctcatcgttgggcatgtattggtcatgagaggatcgctaaatgtatgaagtggtggtagtcttgaggcaaactccagatcccaaacatgatcatcacaagatatccctacattgtaagtttggtaaagttctgccgccccctgaaagataatgacagcccgaaaaccctaaaatggcaagatctagtcccgtgtaatctgcatcttttgattcgtaattggaaacattctcgttcaaattcgttgattcgtaagtgtaaactgccgagaaggacaatgttatcagtgttgcatgcattttactttggtacatgtaatggatttggttagaataagaggtaaggctccaaatgagctgagagttaccaatgttgcatagtgcatctgttaaatcttgttggtacacatgtttgattagatttacaatgaccatttgaccattatggtagctggctggctagctgcattgtttcagcagcctgtgatcaagtgagttttgttggttctggtggtatcaatctctggctcttcttctatataatcatttttctgtgtaaaaatttctaaagaagaggaatacttttttaaatatcattagaagacaaaatccattgtaatgatttccaccaagctaaaggaatttagatgaaatgtaaaataacacgtggcaagtacgaagttgctgggtggccactggataagcggatagtgttgttgccttttgaagactttttggccaaagattgtcggaaggtgttgacctggagtcaactctaataataatggatctttagcagagttcttctgacgaaacactaaaaaaaaaaaacacatcacaaacttctctatacagatcatttggaggaacatcgatttccagggaaggtgagattattgtattgatcatttttatcttttgtttctttaattggtttctgtggaagtaggtgcttcgatcctttgtagttttcaattttggttatctcaatatattcgcagtctctgcacaaaatagttgccgtaaactttgcaaaaacaattatcatatttatgaactcacagacacttcttaagtgataattgactactagtttcatggttgagcaggagacttatggctgagacacttttgtcatttggagtcgaaaagctttgggacctccttgtccgagaatctgatcgatttcaaggagttaaaaagcaatttaatgaattgagaagtgatttaaataagttaaggtgctttttagaagatgcagatgccaagaaacatcaaagtgcaatggtgagtaacttcttggaagatgtcaaagaccttgtttatgacacagaagatatcattgaatcctatgttctgaacaaacttagaggagaaggaaaaggggtcaagaagcatgtgagacgacttgctcgcttcttaacggatcgccacaaagttgcttcagatatcgagggtatcactaagaggatctctgaagtgattggtgagatgcagagttttgggatacaacaaatcattgatggtggtcgttcgctgtctcttcaggaaagacaaagggtgcagagggagatccgacaaacgnnnnnnnnnnnnnnnnnnnnnnnncttgtcggggtggagcagagtgttgaagaattggttggtcatttggtggagaatgatatctatcaagtggtttctatatctgggatgggcggtattggtaaaaccactctggctagacaagtctttcatcatgatttagtccggcgtcactttgatggattcgcatgggtctgtgtttcgcaacaatttacacagaaacatgtttggcagaggatcttgcaagaacttcagccacatgatgggaatattttacagatggacgaatctgcacttcagcctaaactctttcaattgttagagaccggtagatatttacttgtcctcgatgatgtatggaaaaaagaagactgggatcgaataaaagcaatgtttccacggaaaagaggtacatacatgcagcactttttcttcttaattcataaaagtgattgttaaaaaagaaatatatagaataattgccttttttattccctagcatgagaaacacaaatatttttgcaggttggaagatgctgcttacttctcgaaatgaaggtgttgggatacatgctgatccaacatgtttaacttttagagcaagcatccttaaccctgaaaaaagatagaagctctgtgagaggatagtattccttagaagagatgaaactggtgcactatcacatttaaaattaaaaccaagaatctcataaatttatttttagcacacattttgaaatgtattaccttgtgatattgtgcagaattaaggcttaatgaagaaatggaggctatgggcaaggaaatggtcacatattgtggaggactaccattagctgttaaggtgttgggaggcttgttatctaataaacatacagatcgtgagtggaaaagagtttatgacaacactggagctcagatcgttggaaaatcgtgcttagatgacaacagtctcaattcggtttaccgagtattgtctctgagctatgaagatttgccaacgcgtttaaagcattgcttcctttacctagcccattttcctgaagattacaagatacatacacggacattgttcaattactgggctgcagaaggaatttacgatggatcaaccatccgagatagtggagaagactacctagaagagctagtgaggagaaatctggttattgctgataaaaactatttgaggtcgagatttgaattttttcaaatgcatgacatgatgagagaagtatgtttatctaaagccaaagaagagaacttcctccaaattatcaaagtccctacttccacctcgactaccatcaatgctcaatctcctagtagatctcgcagactcaccgtacatagtggtaatgccctttatatattgggacacaaaaaccaataagaagtcagatctcttttacttgtangactcgaaaaagattggaacagtcagctcaggctttcaaagtta

SEQ ID NO: 6081 - DNA, 1329 bp, Arabidopsis thaliana landsberg
agaagacacaactagagtttcaaaccagagtgaagaagcacaatcccatcagtcaggagtaacaaaaacagaactagaggtccatctaagatgtgtaaactggctaaacatctagatgataaattcgatgttgaatttacagaattgggtgaacactttgggaatggttcagtcaaactgtcgtcctttcttggtgcactagtcagggagcatgtacctatgatacttgatgattggaggcaccttgatgaacttacaagacacccactttgggaggaaattcaggtatgtataccaatttatttagtttaccaaaacgttgctttgtaactcttagttaacaatctaaacttatgtaggggaggtttactttgcaagaagaatggcaaaaacaagctatttttaggcagatgggttgtttgtggaggtcccataaatctaagcttctttcaaaggttaaagctgcaaagacaaagcttagagtacttgagctaagaccaagcaacatcccatctgtcgcagtttggagcaattgggtgaagagtaggactagcagcacttttaaggttgtattcattgtgacatttgattttctaaagtaaatttgcaagaaaatattaataatgttgcattgggtttgatttgtaggtacaaagtgacaaatttaggcaattaaggagggcacaaattccacatactaccagtcggaaaggaatgattcgcctggctcaagagatggtaagtttatatagtttttgattacgctgtaatccttgaaaacaatagtgagttctgctggtatttaaattaatatttggtcgtagaaaaaaaagagttcagacccaaggaaggtgacaagaagcaaggtgtgggtagcaggactcacacattctgatgggagacctgtgaagccagagtttgaagagaccattgcaagaagttgtcctttattctattatcattttcttgatcaatttgtttatcaagatttgtgttttgtttcaggaaaaaataaagtcaattgacagtgaaatggactccacatctaatactaatattagagaagatgctgttagtcaagtattaggaaaggacaaacccgggagagtcagagggatgggcagaggggttactttttctaagctagccttcatgcaagttagagattcacatgtgcagcagcttgaagctaaacaagctgaattgatcagcaaacttgaagacttcgagaatgacgttcatgacttagctggcaaaaatgtatgtttctcacctttgttatgatagagatgtagtctttattttactgatgccctttgttcttctcag

SEQ ID NO: 6082 - DNA, 605 bp, Arabidopsis thaliana landsberg
  unsure (1)..(605): unsure at all n locations
gtggttttgactttaaaattgagacagaccaaacaaagcttcaagaaaatgtacctttcaaatggatactttcagcgaaaatgaacagggccacccattcgtgcttcccttgctaaatgtatgggaaggtggaacataatatcgaaaagtgaaggannnnnnnnnnnnnnnnnnnnnnnnnnnnnntcaacaacttcagcttctaatgcaagaagcttctctggatcaaggacacgctgacacagtctactgaagtaattgcatagacggataacaacagttctggggcctttaggcagaaaccctcgcaacgccactagcaggagattttgcataagtacatgatgatcgtgtgacttcaggccaccaattattggaggatctactgaaacacaatttgagatattagcgcaataaccatcaggccctctgaatttagctagcctacggcaaaaacctttttctctgtcttagataaccaataagctgcaggaggcaagtaaggcttctttcctcttacctctgtgtgtaagtgtgatcaaattcctatgtcttccaaatcctttcttgcctttaggccatcttttgatttagaactttgcatt

SEQ ID NO: 6083 - DNA, 5319 bp, Arabidopsis thaliana landsberg
  unsure (1)..(5319): unsure at all n locations
tccttataaagaagaataactaattatctttgcatccacatcaccactgttgctattcatcttcaaatgcatcattcatgtgccaactttcacatttcaaccttaaggacactaagaaagctagaaacaaagctataaatcatttttacatccagaaacaaagtgcaataaaagaaacaaagctagggaaacctcaatgacaacacaagtcttgatcttctactccaagattaagaggacattgttctcaaaactaaaacgaaaaacaaacagaccagaacacaaccagttagatccaaactcttcagggactaaaatcgactcaagttatcctcatagtcaggatccaacataaacttttccttcaagtccttcaaatcttgctcaagttgttgcacccgagtatcaccaacctctttcagtttcttctccaaccaatccaacttaaaaccggcttttgtcagagaagatagtgtacaatatgcattgccgagatcaacactggagagtttctcaggggactggcttagaatctctgtcaagcatagtaggctattcaagtatgttgttctcagaagtgggttctccagacagaattttgatgctatgtctgggtgattttcaaagagattgttcacagattctacctgcaagttaaacatggacgaataagtagtaaaactatatcagatgtcagtttttggtgacctgaaaacagatcgacaaacaaaccatatatgtagcttcttgtatagtgagcgacaaacaaacagatagacaatactttttaaaaaaagtaacggtcttacctgtgaaggaagaacttgaaacccattgagatcaatggtttcatttaccaatggagtttccactaacacatcagatttgccaacaacttcaagaacaccaacctcaacaacaatctttacttctccattcaccagaaacccatcttttatgttaagaagttttgtaaggggaagcattgatgggaaaccccagttggaattattctgactaaatcagtattgtgttactgtaaaagtcatgaaacatagaacttaagtcaaaacaagaattgcacaactcatatgacttaagttataagtcctatgagtccatgaaaagtagaaccataaaatatggacttccctttgtacgccttagaaacatatataatctagcgaatgtataaagaatcacctttctgtgcggagagtttctccgagatttgattaacaacggttaggcgatattttatgtgtcttttccaaccattaggcaaagattcagaatcagcaacttccagaaacagagacaaacttacattaacattttcagcatttcccttgggataggccccaagacgcctgcaagcaaaggacaaaatcacgtaaaccaaaaatgaacgaaaacattagagaacaaatannnnnnnnnnnnnnnnnnnccaactacgaaattatcagaataaactttatccgattccaaagaggagaaattcttgatcgtccattggatcttcttttcatattgcttttccattgatcttgatgagaatctcctagcaaccaaaccgaaacagtaataccagaggatgaagagagactaaatcctagaaccgagtgtcacacgaccatacttgatagagagaattatcacacatcaacttttataagtaaacagaatcgagcaaacgcagagtcactctctttaaaagcatataatacgtgtttaaatgtgactcgtgttgattacgaaaacttgaggaatgtgaaaacgcttcggctcttcatagctcattgttgggcttatagtcccaagaaaaagaacatttaactttcccttgtgactcatactgagaaagtgttaagtgatgcgagttccgagttcctttatttcttcaccaattctgataaaattatgatatttacctcttagatgtacataatcaagttaatggccaataaattgaataatgttaggttatattaggcgatttgtgtagtttaatttcatttatacaaatgttttggcatctatagtgtttcaactaacgactaactagtaacatgagcaaaggcgatcagcctctggctcttcatgacatgatactttgttataaggagatagaaaaatcccttatgttaaccaacgtgaagttgctctatgtaatcatacaaatgattccatttccactttttgtcagtctctcaaatgttcttattcatctcggagtcaagctttgccctaaatcctcgaaccttaattgaaacaatgtcctttagtttctccacaaggccaggtctttggctttgcttccttacagtttcaatcagaagccgatattccgatagcgtagcctctggtaaaggttccaagaactcacacttagacaagatctccggaggaggaacacctgtgaccaggtttgtgtccagttgtgttctgtctttctttgttttttcgggttctgtaaccagaggaccatcaagagctgaaggagatgcaccaggaattacttcccgtgtgaatggtaacgatcttgcaggttgcaagcagaattctatccactggttgattaatggagatgggcctcggactcgtcctcctctttgttctgcttctttaccagagtcagaaacagccgggatcgccttgaaaaacaattatgcttcacggtttagtgtccagatatgttatatcgtctttagaacaagaagcattcaagatatcagatgaagggttaagtgattttacgacggtaacttacccatagatcagcccataaggtggcaccggatttgggaacaatcactgtaacattagacatacgttttgcgacagggataacatcgctgctccaaccaacagtgacccagacatctccgacattgaaagcttttaaatagttgttactatcaaatagtctaatctataagcaaaaggggaaacaagatcagccaccattgtcattttttctcaataactatagaggttgagtgaaacacgtcagcctaaactcatctgttctctttagggtatggagagatagtaaagaggtaataacctgtttcatgagtgatgccagatttttctccactgctaatctttcgccaggaacttgtgaatccaggtctgtcgtattgtatgatgctctcatgtatttgagaacagcaccaacaannnnnnnnnnnnnnnnnnnnnnnnnnnnnnnnnctgcaagctcgggtcgccacagatcagcccagtcctaaattcagcaaaatgttcagtgatattcacttcttttaaataggaaaacactaagacagcatttagcaacaacaaagtataccaacctctatcggtgccaatttataattctgaaatttgctctttttgtatgctataaccatggtgccccagcggtatggcacagcccacgtttcaccgtcaggagctttttctcccgcatagttcctgcggagataaatctgagactttctaagtcatgaaatgaaccctatgaacattcccaagctagcagagtacgaaaacaaaacacatgaaagattatgcctattaaaatctctcaagctagtgttctttcaaaaagactcatattcatattgttaaaccactgatttaaattctcaccttccatttatcactcaagcctttataccagtcttgatcttctatccctttcattggctcaattagcttttccttaatagcaaaactaagccaagaatcaccaatgctgatcatatcagctgctgcagttgaagcagcccccttttttccattcttacttggtttcgatagatcgaaaaagatctcttcaagatttcctcgaaactgagtctttaacctcactctcttcccttgtgagctcataaactcctaaattccattcacagaatccaacaacatacattttcaactataagcttaagattcaaaatagaaatggaaacacagacagtgaaactaaaaccttgatccatgatggtggcactgagccacgcaaggcaacgagttttagcgggacagtaagagaatacactttagacttgtacgcttcgaaatcagcttccagtttttcttcatcttcaacttcatttagattctcttcacctgcaaaaacattccattggaacacaaaattcaaatccatcgaaatcccaagagtgacgaaaatgttcaatttcacgcaccagctacagtttctgtgttgatttcattctctgtaacgacaatcggcggtggtagtattcgagcggaggccggagaacagacgcggaggctacttaaaccgatgaacaacacggtcgaggcagagagaccaacgatcctctcatgaaaccgttcgtctcgagaaactcgtgcaatggtgattccccttcctccgtcgcgtcggtttcctccgcagtagaagctcgccggcggtttcacggaaagaatcgccgccgtagccatcgataaaaacgcgatggtgaaacaacggacaacaatggcttctaatctcaaaccggttcaatcaaaccggtgggcttataccgtaaatgggccttaaaaatgggcccaatgatttctaccattgtagagattaggcttagctaaggtctagctggcaataataattgggttttatgaagaaagcgtcggttgacacgtgtgggaggtcaagatcggcacgtgcgagacccacttcgtttcttctcattggtcgtatgctttggagaagaaagcatcttcttcttcttcacacactctctctctctctctctcactctagttttctctctcttcactcttaccataaatcacacaaacaaaaataaaagtcgattcctttttttttttttttttttcccttcttcttatagttttttttttgctttacagctctaattagtcgtcttcttcctctgtctctcaattcttcttcctctccgatccatttttagaggttcatctaattcttactaattttgtttgcttgaaagtttgaacctttgatattgagggaaagagtggggttttgggtcttttgctgaatcaagttttggagttgttatattgttcgaatcttccgttgttattgtgttataggattgggttttatctgggaatttcgtaatctgtgttaagcttgagctgtttttgagctctttggttgatgatgattttgagatttttggcagaatttagctctcgttttctgattttagaaattgggaagtgggtattggctcttccgaggcaatttcactgttttgagtacaaaaaatgtagatgagagcatgcataggtcgcctccccgcagacgga

SEQ ID NO: 6084 - DNA, 7888 bp, Arabidopsis thaliana landsberg
  unsure (1)..(7888): unsure at all n locations
attttttttttgaacatcttataaaatacccaaccgtaacaatgtaaaaaattcataactcagatcacaacatttatttacgaacaaaaaaaatcttttctaaaaataagacttcttacgaaaataataatgtattggggtggagagcatgagatttacacattacgaagttggatgtacaaccataaagatcaagcgaccggtgaggtgacgagagagtattatgagggaatgcgcggtttcatgtatcaagcgacaaacgaaccatttgctcgtgagaacggtacaatattctgtccatgtcgtaagtgttattgagaaatatttggaatttaatgtagtgaacaaccatctttataatataggatttatgccaaactactatgtatggttacgtcatggagagggttgtagagatagcgcaggaactagtaatacgaattatggtgtcgcaacctagtaattttaataatgatgcgaattatggtcaacaagtacctaatcaatttgattataggcataaccaggaaaatagatttcatgatatggttacagatgcatttcatgaaactattgctgtatttcctgaaaatattagtgaagaacccaacgtagatgcacaacacttttacgatatattagttgttgcaaatcaaccaatctacgagggatgtagagaagggcattataagttatctttggcatctaggatgatgactattaaagctgataataacttaagtgaaaattgcatgaattcatgggcataattaattaaggaatatttgccatcggataatatatcggctgagagttattatgaaatacaaaagcttgtttcgagtcttggattaccatcagaaacgattgatgtatgcattgactattgcataattttctgggatgaaaatctgcatgaatgttaattttgcgaaaagacgagatatcagactactggcggaaggacgcgagtgccatataaacggatgtgatacttgccaacaattgatagattgaaacgcttatatcaatcggaaagaattgatgcgaaaatcagatggcatgctcaacataccactgcagacggagaaataacgcacccatcagatacaaaggcatggtaacactttcaaacggtatattctgactttgctaatgagtgcaggaatgtgtatcttggattatgaacagatggatttagtccctttggtttgtctgggcgacaatattttggcctattatcttgacgccatacaatcttcctccaaatatgtgtatgcaaagcgaatttctgttcttaagtattctagtgcctgggccaaaacatctgaaacgagtgcttgatgtcttcttgcaaccgctgattcatgaactcaaaaagttgcggtatgaaagtgttcacacgtttgattactcgagcaaacaaaatttcaatatgcgggcagtgctaatgtggacgattagtgacttcccagcatatggaatgttatcaggatagacaacgcatggaagattatcttgtccctactgtatgggtcgtaccgatacgtttcagctaaaaaaaggatgaaaattatgttggtttgattgtcatcattggtttcttcccctgcaacatccgtatcacaggatcaacatattgtttaggaagaataaaatagtttgtattccgccgccatcttatgtttctggaaatgatttgtttgaaaatatcgattattatggtgcttaggaaacatgtaaacgtgggggtaactggcacactccggcgaatatgcctgacagatatggaagtgcccacaattggcacaaacagagtatcttctggcaactcccatattgaaaaaatctcctcttgcgccatcaccttgatgtgatgcacatcgagaaaaatttctaagataatttcatgattacgcttcagaatgtgcagggaaaaactaaagatagtttgataacaaggttggacttggcggaaatatgtagcagacctgagttgcatgttacacgagatgggaaattaccggtttcaaaattccgcttgtctaatgaagcaaagaaggcgttgttcgagtgggttgttgctgaagtgaagttcccagatggatatgtgtcaaaattttcaagatgcgtagagcaaggccaaaagttttctggtatgaaaagtcatgattgccacatattcatgcaacgattactaccatttgtattagtagagttgctaccgacaaatattcatgaggcaattgcaggtaatatatttatatatttattatatatatacatactatatgttttttttactcaattattacttggtcattattaacttactttaattaaatacatgataggtatcggagtatttttcaaggacctatgtacaagaacactgacaatagataccatagaacaattagacaagaatatcccagtgttgctctgtaacttggagaaattattttcccctgccttttttgacgtgatggaacatttgccaattcatcttccacatgaagctgctcttggtggaccagtacaattcagatggatgtatccttttgagcgattcatgaaatctcttaaaggaaaggcaaaatatcttgctagagttgaggggtcgatagttgcaggaagtttaaccgaggaaacgtctcacttcacatcgtattactttagtccaagcgttagaaccaaaaagactcgtcctcgacgctatgatgatgtaggtgttgcacctacatataacgttcccgatgttccagatacctttgcccaaataggtatactcgcagggaagttgaaagaagtttggtgggacgaccatgcgctttctcgagcagctcacaattacatactccgaaatgttgattacattcaaaaatttgaaaggtataaagtatcctagttttattcctaatttttataattaataattagtgtgaaattaattaaggaagctaattaagcagctacgttgtaatttgtaggttatttgattcacaaatccgtgaagcatgtcctgaattagaagaaaaagaatatgaaacttacaaagatcgtgattttgctggatggttaaaatactatacacgtataagaatgtttggaaaattcgtttacttaataacttataaaaaatgataattaaacttaacattttctttgtgtacgttgcaaacggatgtggaaacgaaccattatcactttggttgcatgagctcgttcaagaacaaagatctaagatcacaacttctctgatgtacttcactcatggctatactttccatacgtatccatatggaagtcgaagggcaactgcgaattatggaatccatgttgaaggtgggactgaaggcgatcggttactacagcaaattctagaagtcgaatatccaggacttttgaatttaaaatgcgtccttttcaagtgtgattggtttgatccggtgatcggtcgtggggtacggaaaaatagcttaggcgtggtcgatgtcaatgcaaacaagacttatgccaagttcgaaccatttatcctagcatcacaagcagggcaggtaagctttctatcttacccgcgtgtaaggtcacggcgtgaagtgtggttatccgttattaaagtgaatcccaggggccgtatagtcggtttagttgatgatgttgtgatgcaacaagaaagcattagagaagtttccattcaagacataacaacagaagatgttatccacattgacctacagaacagagagttagaagacatcaccacagacggttccgaagaagaagaacaagaagacaaattcgacgaatctgatgaaaacgttgagcaagaaaatgattataatgattaagaaaatgaatcagaataaatgttgtattttatattgtctactttcattatttttaccaagtataataaataaattcagaatttttttttattaatatcgaaagttataaatatagaattataaagtttattattataattttgcattggattgttcttataattttataatttttttttaatttttttcccagtccctcgcaagaccctagcaatttgcgagggatttactacaaaatctcgcaactccctcgcaaagtaagcagaaaacactctataccccgcaaaattttattttcttttaaaacctttccctcgcaaaacactagcaatttgcgagggatttcctacaaaatctcggaacgccctcgctgttggggtcggattccacccaggtaagcgagccaaccatgttttaacgcctcgggagacgtcgaagagttatcccgaactgggccacaaaacacctcggagatcgtatcaagaatccataccgaggcgatatcgagaacgcttcggagcattctcgtgaaatgatcccccgacccgacctcggaacgcctcggacataaaacctggcaattcatcccgaggcgggctccaagacgcctcgggaacgcatcctcgaatatcacggtccgagctgcccgagcacgacccaaggtgggtgatantaagcttgtccaaacttccgcttagatgagaaaaccttcaaaaaggacttagccgatataagatcaaacatatcatttccgaaaaccccggaagagataatcttcaaagatatcaccgaatacagaaattcacagaatctttggaagataaggacaatctccttcaccaacttaaagataaagagaaatcttccgagaatatcgcgaggggcgatattccaaagctctataaaaagcacctcgaaggacaaacaaaggggacacgcacaaaaacgctctcaacttcaggttatcaaaaacgctctgactttgaaggcaaaaacacttattttcatattctagaacacttgtacgatcaaatcattactttctcattaatacaatcaagaacaccgtccgcggtaattgagaattctgttgttctttgagaatcttacaaagattcgttctttgaagaaacccttaaaactatttctattgtgcgagttttgactctcacaatttggcgctagaaggaggggacttgagatttctcttactcccggaacacaaaactaaccacccaattcacaatggtcaacaatcaaatccccggtaacacagttgatgcagaggggaacccaatccctccaatccagacagacgttcctgaagccgctgctcctgtgaccctagcggaactaagaagtatgatggctcaacttcagcagaaggtgaacgatcaagaacaggcaaatcgatccttggcacaacaactcgaagcagctacttcccaaggatagatcaggactactcgtttcggcgcgaggcatcttcaggatcgacgagcagcagcagatctcaaccccacacggctcgtgttccacacgcctggcaatactacaaggcccgtccgccgaaccgcaccggaaatcggaagagaccgaaccgagccagcgattttgggaaatcgggaaacaaagcgaacagaaagaaacgaaccgcagctccctcctccccgagcagaggttaccgaggccgatcgtatcggggtctcggacgatgaagattgagaagacaacattaggtgggctgaagaatacgctagagaacaggagataagcgccatcaagctctccctagccaaggcagagaacgagatgaagctcgtaagatcccaaatgcataacgcagtttcctcggcaccgaacatcgaccgcattctggaagaatcccacaacacgccgttcacacacaagatctccaatgcgataatctcggatccagggaaactaagaatcgagtatttcaatgggtcttccgatccgaaagggcatttaaagtcgtttatcatctctgtggcccgagccaaattcagaccagaagaaagagacgctggtctctgtcacctgttcgttgagtatttgaaagggccagccctggactggttctcgagactcgaaggaaattatgtggatagttttcaggagctatcgactcttttcctaaagcaatattcggtgctaatcgatcccggcacatcagacgccgatctatggtcactatctcagcagcctaatgagccacttcgagatttcctcgcaaaattctgatccaccctagccaaagtagaaggaatcaatgacgtcacgactctctctgctctgaagaaggcactgtggtacaagtccgaattccgaaaggagttgaatctgtccaaaccacaaacaatccaagacgccttgcaccaagcctcggattatgtttcccatgaggaagaaatggagctactatcaaaaaggcacgagccaccgaagcaaacacctcgtggcaaaaaatcccaacctggcgctccgaaccataaaaagggcacccaaggcgggacattcgtacatcatgaagggcgaaacttctccggagcccataattatcaagctgatacaccctggggtcgaggacgaggccgcgaccgaggtcgtggatgagaatcctatacttggacgaaggaccaacccgtaggaaacgagcatgaataatgagaattgcacaaaagctacggtcataatacttccaggtgtcgtagtctcagggcgaagttggcagctaaattcctagccggtgaaattggtggaggcctgaccatcgaagatttagaagcagagaaagccaaagccgagcaggtcaatgctgtagcaaaacccaagcaggcagcccccgcggcgaaccctgaagggcccaagagaggtagagagacgtagaggcaatcgcgaggcagatgaggatgaaccggaagatgctcggggaagaatcttcataattttaggagattcggctttttgtcaagacacaatggcatcaatcaaagcttatcagaggaaggtcgactcaaatagtaactggacacgaccattcaacggtccaaatgacgaagtcactttccatgagagcgacactaatggcttggatcgtcttcacaatgatcccttggtcattacactaactattggggatttcaatgtcgaactgacacagggagcacactagacatcatttttatgacgaccttgcgagaaatgaagatcgacacggcacaagtcgtaccggctccacgacctgtgctcagtttttctggagagacttccatgaccctcggtaccatcaaactaccagtcctagccaaagggataacaaaaatcattgatttctctgttacagatcagccgaccgtttataacacaattatcggcacgccatggttaaatcaatttcgagccgtctcctcaacgtatcatctctgcgtgaagtttctcacaagcaacaacgtgaagaccatctggggaaatcagaaaaacgcccgaatttgcttcatggcaacacacaagctcagaaaccccgtcaccgagtcaacaaccgacgcaaatcacaagaaggctaagctgggccaagcnnnnnnnnnnnnnnnnnnnnnnnnnnnnnnngagctaaagattgaggtggctcgagagtcaacataaccagtccctgacccagtaatctccatctgccttgatgacgaaaaacccgaacgatgcgtagaaattggcggagacctaggcgaagaattaacagccgagctaacttctttcctcagagaaaacgtcaatatattcgcgtggtccccggaagacttgcccgaagtaagcgtcaaaattgtagcacacgaactcaacgtccacccaacgtataaacctgttaagcagaagaggagaaaattatgttgggagcgagcagaagctgcgaaagccgaggtagaggaactgttaagcttcggctccatcaccgaggcaaattaccccgactgactcgcaaatctaatcgtagtaaaagagaaaaacggcaaatggag

SEQ ID NO: 6085 - DNA, 3884 bp, Arabidopsis thaliana landsberg
cccacggggtgatcctagttagtattatgcagaaattgatatcccgtttggtaatacatctcactcgataaccaaacatgacatttgataaatcactaatcaggctttttcaatttgggcttgtttgtttactttatgcctaaactcatatcttgtttagtaacaagtttaactctgcaaccaaacagcatctttaaggtcttatctcacacataaaccaaccccacacacgaagaactcaggattggctaacaatggcgaagaagaaggaactgttatcaaaagcaccgtggagaggcgacgacgaagatgattccgataagtttagcaacgcaaagcttaaagtcacaaaggattctgatggtatgtcgaagatgcacgtccctagccgcggaaccaaaaaaggaagtctcgctgatgatgatgatgattcacttgagattgatcctcagcttcgttacagcttcaatcgcaactatcaggtctacccttctctcattactgtaattctaggtttcatatagtgaatttgctcctctctgctctgttcttaggaaattgtgaaattactagtaaattgtggcaatctttcttctgtcatttgttcacacatctttagattattgggtattggagaaatgtgaaaaagattttatcttttatgtttctgcaccactttggtactgttctgtgtcttaagatattgaaagcttatgtgaagcttgagaagaagtaattttagctgcaaagaatggatttttagctctctctgttacataaagctttgatttttaacacattgtatccagttttagttttgaatgaattggaaaattctgcaatggttgatacacttgcttggtgtctatacatcattcaaattcgaaatcttgagccttttgcacattggatagaatctcagatagcagattcacatttgttaaagaactataccgtaactgtaaaactggtttaaagggatctttgtattttcacatgtattggtttcgttattgggtggtatactttcctggaaacactctgtgtagttcgatgtagacctacttccccttcgactatagtatatttattagttctggaaatcgtatgaatagttggttagtcagttatgtaaattcctctactattgttcatggtcacattggccatagactacttagtgatttagtatcttggttaaggaggtactttatagcctctgctttgttatatagtcatgttgttataatccttgggtatggaacaacttgaatcatgacacattgcatgcatctcgaaccgtctttacacagaaacatgttttatgcattcacaaagtgttcacatacaagcgatttttgaataccattgatttcctttcgatagattgtaacatgtgtttatatttttatattgttaaaacgcttttcctaagctgtaaagtctgcttctctattacagttcctgcaaagtgtattcactatagacactttggtgaagcctcttcctccttcaatggcattcaatgtctctcgcaacttgagcttcttcacccgcattttcactcaattctttggtgagcattatttttcgaataccttgttaatgcaacggattatatagtcaaatgttttcttgtcgtatggtaaaagttgtgatgacatcctcagtgttttaaaaccttatactcctcaatgacccttgatttattgtcctggtatgcggttttaacggttgatatggttaatgcagatcctgaaggcattgcaaatgcacagaagtctctagggttggggcaggaagagaaagctcgccgtgttcgttgaaatatgaccatatttcaatcttgtgaatggacccagcactgttagattgattaaaatatgtcctcaaagagatgttttgtatgaattttcccaagtacaatgaaatttccaagttccattttagcactaggcttccctgtttccatcaacataaactacttactttgattcaaacccaaacttggttccatatgtgatgcctcaccagtttaaagatacatctgttaactctggatgagagttcacgctcttacaccaaaccaacctttaaatcttagttgccattctctttaacctcttctaggtatgaaaaagttatgtggtatttagaacttataagttggagaacaatttttctgttcttgtaagtatgtaatattgtgattttacacgacaatttttaaagctaaaaactaagagccaagaaaaatactatgttttcttcagaaaataaaataaaaaatgctaggtctttgtctaggataatgatcttgggatggaactaaagaaattttgtgaaatgctagttcagtttttatagttgtacaaagaagtagagtaattggtgattagtcatatgtttcttaacttctactcttatctatgttttactactatacatatgagttcggagtatgctatatctactcgataactaggcttatgcgaggacttcacatcaccaaaaaattgggtccttcttagtggcaaacatctagtttacatttaattgcttcatatcaccaagaaagcagtaaaaaaaaatgctcgatcataatcttccacaattgcagatatgaataaaaatactatttttccagtgtgggaaagttttggaattctaaaacttgaaactttacaattaataacaattacatacgtatcttagtttttgcctagaatagtttttactgtcctcgagtactgttccaactgttacaaaaatagcctttgtgacttgtgacacaaacaactggaaagcaacacattagactctgagaccctcacgagattgcatgcatgagacacttgtgaacatagccgcagctaaaaagaagtttggtaagagagagaaagatagagaattaaaatagaaaccaactgtcacaaaattatcagcacatgaaaccaattataacaataccgaaccaaaccaaccaactacatttcctcattatataactatgaactccacccaaatcaatgttcaaactcattcttcttaaaaaccattaccgttatgtcactaaattataacttaatgggcattctccgttttgtattgttggttagtttgagtctggttttgtttggtcttaaaccgaccgtgtcacagccacaacaacaggcacaagtcccatgtttattcatcttcggtgactctttagtcgacaatggaaacaacaacaggtttaaccttgcgttattttctatgtattataatatgattttttttgtgttacacaaattcatagtaatttgtattaatatgtgtaggttgctttcgcttgcgagggctaattaccgaccttatggcattgactttccccaaggtacaacgggacggttcaccaacggtcgcacctacgttgatgcactaggtatttgtcgccgaattttatatgtaccgagcgctttgtaaaattcttgtagtacatatataccaacatgtttacaaaatattttagataacgtttattatttcaatacaagtcatacttagacattaactatattgtgacttagaacctttaaaacaaattataatattgcaaaatgtacactttactcatgcctagaactagaaacagttttggtgcttagagggagtttgacatttctaaaatttgtttactaatgagttaacacttcttctttttttttgtagctcaaattcttggatttaggaattatattccaccatattccaggattcgtggccaggctatacttagaggtgcgaatttcgcatctggtgcagctggcattagagatgagaccggtgacaacttggtagacgcactactgtttttttttttgatccatcgccaaaaattt

SEQ ID NO: 6086 - DNA, 1842 bp, Arabidopsis thaliana landsberg
cctgacacacacaaaaaggcatttcgtgtataaaggacacaagcgtggaagccaaaagcatgtcacaaactacaaactttgtaaactttgaagaaaaaaaaaaatcaggctttttctatataaaattgttcaaattctaatattgttataattaaacccatccaaattaattcatgggtgctgttcttataaaatatgtacacatcataattctcgagtcataattctttttctatatatataaggaggatgctattaatctggataagaaacataagattctgactccttaacaaattatgatgtgatgattacacatttgctggattgatgattactcggtcgtatggaattatatattttacagagtagaatggaataaaagaaaaaccccgccaaaatccatattgtacagattgaaggagcttatctacgtggaaattatggtttcttactttatgatcatgtatctgaaaatacaaagaaagaaaaagagagaattaagtggtaagaaaattaatggtgagagcggtaagagccgacaagaaggacagacggagccgtctattaccaacaactcccttctgataaaagcctgttcttcaactctccttgccttttttttttttttacaaaaaaatgaaattattccgataactattatcggtgtttgttttcaacagcaatcactatcttgatgtcatcggttttaattcatatgttttgttactttttttcttttttcatggagaagtaaatagaggtcatgttattatacacaaataataaagaaagaacaataatactaataattagaggaaaacagagttagactcagaggtgtagtaggcctctataaatactctgcatggctctcactctcttctcaccaacaaactttagccaatccctctttctctcttattcgtgtttaatctagtttctttccaaacaaaagtgtaacaagagaaagagaagagatatcaaagatgcaataccagacagaatcgtggggatcatacaagatgagcagcttaggattcggcggtttggggatggtggctgacactggtctgcttcgtatagagtccctggcttctgagagcgcggtggtgatcttcagcgtgagcacgtgctgcatgtgccacgccgtgaagggtctcttcagaggaatgggcgtcagccccgccgtccacgagctcgacctccacccctacggcggcgacatccagcgagccctcattcgtctcctcggctgctccggctcctcttctccagggtctctcccggtcgtcttcatcggcggtaaactggttggagctatggacagagtcatggcttctcacataaacggctctctcgttcctcttctcaaagacgccggcgctctctggctctgatcccttcctctgctttcttttttcttttctatttgaagttttcttgtaagagaatgtggtggaggaagattaggaaactagtcaatggctgtaatgacaggttttagattatagtttgtaattagagagagagttgttttaagctcacctttctctgtcttcctcttcttcatctcttattgatctttcgaatgctctcattaaatcataatagtaaacactttgcatctttattaatgtcccctggatccattaatcaacggtattaactgacgccgtatctattcaaaggcagttcctgttattttgttcacacaaatttacacacaagggacttgttgagaggggatcgctacgatcagcttaaatgatgccctactctgtctaacctatacaaagcccacccacactctatgactatgagcgagatagaagaagaatg

SEQ ID NO: 6087 - DNA, 579 bp, Arabidopsis thaliana landsberg
atgcttctcggctcctcccgtattgcctatatttaacaaaccattgactataatcgtatgagtatagtcatcaggtttcaaccccttcatctcaatctcctccaatagatcatctactgcatccaagttcccatctttaaaatacaaattcaacaatgtattgtacgaaacaatgtcttgactccttgtaccacttctcacaagctcgtgcatacactcatacgcctcctctgctcttccggttttaatcaacgcactaacaaccgcacaattcgcaaacccgtcaaacgtatacccttctttcttcatcttcaaaaacaactgaagacctttctcaatcctcttagtcttaaaatacattttaagcatcgttgtatacgtaaccgcattcggagtatagcccgatttcttaagctctctcatcatccaatccacagaaccaacccttctcgatttacaaagaccattgatgagaatattatacgtcatatgctcgggtttaacccgactcttcagatgcttaaacaactcaatcgcattatccgtatgaccgcttttacaaagcgcataaagcagaat

SEQ ID NO: 6088 - DNA, 1312 bp, Arabidopsis thaliana landsberg
gactgaaacccaactacccacttccttcactccagatggatccgtagatccctccagtgtactcatcaccaccctccggagcagcctgacggcgccggcgcctaccttggttaacaagaaaaacgaaactctattcgcctatattaacgcctgcataccaaaacgttgcgtttatctttttactatccaaaacccatcctgaaattaattatcttgtattcccatacctcgcttaatccccgatttatttgtctaggcgctaggctcgtacggaccgtctagatacgacctaccaattttatgaatattagcttcatttgatgtttttatattgctttgatatttgtattttcgtatgtatgttcattggtcaaataaccgactacaacaatattaagtaaaggaaaagaccttcccgagcatcagcatgacgcgactacaccattgaagattattaattagagtgaacaagtgtaattcgttaaaaggtgaagaataataattaaacaaacctttgacgtatgtataacttgttaatcaccaacacttgccatttcaaacttcaaatgcatcatatttcatcataatcttacgtatttatttttattccaatcttacgtttttcaattcaaatattaccatcataaacatagtgtgtggaattaggaaacacaatttacatataaaaaaaaattaacaattcaaacatcaagttcatcattcgtacggactagttctactcctaaacttgtctataaattgagagatatgtctcataaggttatcatctctccattaaaaccttttttatctcttcgaagaattgcttcaactaatatataaccatgaaaagtttctcatttcttgcagttttatctatcttggcaataactctttcattaagcaaggcttcggacccaagctctcttcaggacttttgcgttggtgtcaacaccccagcagatggtggtatgtatatgttcactccaatactccataatcatttaaatgtaatcggtagttaggaaaagtcattacgttcttacactctttttatttggttataacgttcagtttttgtgaacggaaagttctgcaaggacccgaagctcgtcacagtagaggacttctttcttacagggctccacgaggcaagaccacctaatccaaaaactgggtctaacgtaacagccgtcaatgttaacaacctaccagggttaaacactcttggaatctcacttgtccgtatcgactatggagtttacggacagaaccacctcacacccacccacgtgcctccgaggtcttgtat

SEQ ID NO: 6089 - DNA, 1265 bp, Arabidopsis thaliana landsberg
taaaaaacttaatggttattactactcataaaatttaaaacatacatgacataaaattttaaacaaatatgacaaacaattagatttaatacttaatttatctaagaattaaaattaattgaattaaaacattatatttaatacctaatttatctaagaattaacctaagaaacattagatttggctcttatataagaaccattcttaacaattaattgtattataacattaaatttaaaacctactttatttaagaactaacctaagaaactatcaataatgatggtctaaggttacctgcaacaaaaagtgtcatcatgaatacgagatactcaacgagtttggctcctaatatcgaaaataaaacacccaaagccccaacaataaaacgttagacaaggcaaacaagaaataacaagcaacaagcaatcaagcaataaacagcatgcgataacaaagagtaaaatcagagatgcaaaggttatgcaatattaatgatgcatgcatgggtaaatgataacaacaacaaacctgatggccatgtgaatgatccttcccatcgaaacaagtgaacaattcgcctacagccacaaagtgtataagcgatgtaccacatttgccttctacgacggagatcccagttacatcgtcatgcaacactcagcctcttgggagcgacccagtctctctgagaccaatgaaaacaggaaagcgcactcgaacacaacaaactatatatgcaaagcaactaagctcgacgaagcgtacttaaagcatcaagaattttgtagactccctccaccgtcggctttaagaacgagcagcacttctccgaagattttagagagctctttcacaagtggcggggaacttaaacctagggaaccactcttcctctgattggctcggagcttgtgttgtctttacttcatttacactagatgggcggtgaattatactcttggcaacatttttcctctcattgggtcagagttaataccatcattgcctcgtttttgccaaaagaggtaacttatacccttagcaacactcttcctctaatttggtcgtagcttcagtcatcattcccttgttttcgccaaaagaggtaacttatatccttggcaacacgctttctccgattgagccccaaagcattggttgcgccatgtggtggaagacttcttccgggaatgaatatatatatgaaattccttctgaattcttggaatattcccaccacacattatctttagctgcatca

SEQ ID NO: 6090 - DNA, 1340 bp, Arabidopsis thaliana landsberg
  unsure (1)..(1340): unsure at all n locations
ataagtaacttatataactctatcaatgccgacacttaacattttaaatttcaagtgcctcctttttcagttgaagatcttttgtgtgtttaattaagatactactaacgtaaacatggtaacaagataatgttttaaataactccttacataatacgacttgatgcaacacggtttagttaaaggtttaccatttcaaacttcgagataatgaaagctacacttaacaatggtaacaatacaataatttaaataattcacnatataatatagcctgagggaacacggtttcaacagcattttaccgtttcaaacttatagacaatgaaaattacattggaatatacatacatatggacttgttcaaaccgaaaatcatctataaattgaactctttgtctcataaatttatcacatcttcattgacaccacaaataagaaactaacaaaaacctttttgtcttctacaaatcgtctccatacatacatatgacgataaaaagtctctcttttcttgcggctctatctctctttgctttgacacttccattagtaattgcttccgatccaagcccccttcaagacttttgtgttggtgtcaacacaccagcagatggcggtaagcacatgatcattttttaatttattaaatatatttgtatgttgatttatgcattactaatactctatttttatcaaaaccttgtctagtgtttgtgaatggaaagttttgcaaggatccaaggatagtttccgcggatgatttctttttctcgagcctcaacagacctggaaatacaaataacgcggttgggtccaacgtgacaaccgttaatgttaacaaccttggaggactaaacactcttggtatctcatttgttcgtatagactatgcacccaacggtcagaacccacctcacacccacccacgtgccaccgagatcttggttgttcaacaaggaactctacttgtagggtttatctcatcaaaccaagacggaaaccgtcttttcgccaaaacactcaacgtgggtgacgtatttgtgtttccagaaggactcatccatttccagttcaacctaggaggaactccagcagttgcaatcgctgctttgagcagcctaaacgcaggtgttatcacaattgctaacacaatatttgggtctaaaccagatgtagacccgaatgttcttgcaagagcattccaaatggatgttaatgcggccaggaattcacaagccaggttctgataatgtaataagaaatatagtctttggaagtactttattaatacaagcacggttcagccgtactgtgacatgtatatgatgttggttgtt

SEQ ID NO: 6091 - DNA, 728 bp, Arabidopsis thaliana landsberg
tgtacatgatgattgcaaacatttttactcatattattaataatttttctcatatcttaataacactatctccttcttggttacaattttcagtttttgttaatggaaagttctgcaaggatccaaagctggtcacagcagacgacttctttttcccagggcttcaaactgcaagacccataacaagtcctgttgggtcgaccgtgacagccgtcaatgttaacaaccttcttgggttaaacactcttggaatctcccttgtccgtattgattatgcggttgacggacagaacccacctcacacccacccacgtgccacggagatcttggttgtcgaactaggaacacttctcgtagggtttgttacatcaaaccccgataatcgcctattcactaaagttctcaacgagggtgatgtatttgtgtttccagagggactcatccattttcaagcaaacattggcaaggcaccagcggttgcattcgccgctttaagcagccaaaaccctggtgtcatcactattgcaccaaccgtgtttggggctaacccagccatcaacccaaatattcttgcaaaggcgttccaggttgacccaagggttgtcatggatctacagaccaagttcaagaaataataatatcgaacttttgaattgctatccctttatatatttgtgcctgaataaggatcgtgtttctccgtccatcctttcgtgacatgatgtgtt

SEQ ID NO: 6092 - DNA, 412 bp, Arabidopsis thaliana landsberg
ttcttagaaatgtttatcttttgtatttggttgttttcaactgctaaattttttgttatgcaggtgatgtttccctctacccagcttggaactgaggaaaattggacactcatgaagacaatcagtgtgactgaatatttaaactatgaagatggtcagttgatgtttcaccatagctgagtgattttattttaaattatttttgtttgatttactttttctgccatttatagaaaatgaggacatgtgttttgtatgggttttcaggaaagttctccaagagtaaaggtgttggagtgtttggtaatgatgtaaaagatacaaatatacctgtcgaagtgtggagatactacttgctgaccaacaggcctgaggtaactgattgctgctgcaaaatagaaacattgtttct

SEQ ID NO: 6093 - DNA, 855 bp, Arabidopsis thaliana landsberg
  unsure (1)..(855): unsure at all n locations
cgaaatgaaaatatttttatcttttaacagttcacatactcctgtcctgtgaactctaccttgctttcctcactactggaagctgcaagaaccattgcttgtaacacaatatccctcatttgtagccggcttcaagttacaaagaacagaaaccatacggttctgttcagaaacaacagtacatcaattggaatgtataagggattacatactgataatgatattgggaagaaaacacatgactagactgattggacaaacctgcatttcctcaagcggtaattaatttcaccacccccaatatcaatttcttctacatacaatgcatttgccttaggatgtttctcagccttcacaattttacctaatagaatatcaagtcttgccatagttatctaccatggtttacttgctgcttaaatacctacaaaatgcaatagacagctttagtgacacttggcattctagaaataaatagaaacaaaattttcgaaataaacaatcaaaccgacctcacaagaggtgtactaaaccagcagcagttcttctaaaagcaatttcagtaggaaaatctcttaccatagttctttggttttaaaggatccggaagaatcgtcgtctttgctttgcttgaagtagagacccagatgaatcatacatgtgacacaacgatgaaaagagaatcgataaacccctttaagaccccaacatataacattactatgaacctaaaaaagcaggcacagaaactcagatagccataccacgccaagattcatataacattactcaactgtttctaagagaatttgatcatttatgctatcccaaatgcanacatttgaccatccacta

SEQ ID NO: 6094 - DNA, 502 bp, Arabidopsis thaliana landsberg
atatattagtaagactcttgcatgccagatgcacctttctatcattttcaagttttttaatttcctatttgttcaaaaaaaagattgacaaccaaaaatcgcaagcaaacatttgacaatagtctgatgtcctgcgattcaaatatctctcacttgcacacaccaactggctggtttgaataaaagaatacaacagatcccatattttcttttggatatgccaaactaaaaagccatctacaggtaacaccaaatacttaaaaatattgaatttgaaagtaagtataaccaacctgcattatcatgtgctttgctataaaactcagagctcgattaacagagttgcctaggttgttcagaaactcgccattcagttttgctcgcaaatcattccatggaaacaatgtgtgagacacctagaaggcacagtccccagagcaaaccagtgttggtgacatttacacgtagatgcatgcctatgatgaacggagaaacacctagg

SEQ ID NO: 6095 - DNA, 2815 bp, Arabidopsis thaliana landsberg
tggtatatatagtcaatagaagtacaaaaaccatactaaacttgaaaaacctattgatgctcaaacagcgcagttattagaggccatacttacagtttctgtagctgggtcagattttgtatatctggcactattttcccagttaatttatgtgaggacaggtctctggtcacataacacattttagcagtaagaaatctagaaacgtaactaatttataacaacaatatcacacttttaagtgcttacaaggaaatgattcttggtgacgtagacatgttcatgtagctgcagtttaggccagtccacaaaaactgctggggaagacacggatctccttgccagtcgactctgctcagttcataggtagcttggataaccttgatagatataactgtcatagagttaaagatataccatacttaaaacatattaaaaacaagaattaggtaatatgttcaaaacaaattatttcttgtggttgatactatgatgattcctcttgattaattctcgcatgaactaatttacataacctcatcatcatcactcatgtctcgtatgtggactactgttagataaagtgcaataatttggttcacattaacttgctttaccatctgtagaaaattaatatgatactacagaaaactggtcgagctaatggaatagcattccatataatagtttgaggcatatatcccaaaattttagtaaaagtagttgagatatatacgtacgtaccatcatcaggatttgtttcagaatgtggaaacttgattgcagtgaatgcctccatagcattaaccagaggtacacgtactcccggagacgcttcgctgcgtaccagctgcaaactgcagttaccgccatcgcatttgttcaccacagtctctacagtacttacagccaagtctaaaggagtaatactctcatcataactaatctttccattcaccacaaagtaaaaggtccttgtaaataaagttctcaaggcctcgtcagtgttttccccaacaggttcaagctcggcaaagtgaacatacaggtgaatttgctcatcagggttatccaaagtccaaataatggtcaatcgcgttccattgtctccaggtgtggcagctgatgttaatgctgcttttggtggctcgtagttgttagagttattcacatctaaactggtagttatctgcgtccattccggtaagaagaatggggaccaaacacgatcatagacatcgtcaggatacctgcggacatcagaaaacacatctacatggattgataaaccatgcatcactaattcaccagttcacaaacaactggtctatgaaagacattacgatcattaaaaacaatttcaatacgtctattatataagtcaaagttcattggtaagagcattaataggaaacttcctgatgttggtcagacatttgaaggtttcttgtattgtcttcatgcatctatatattgctaagtttagggaaattttgtatatcaacatcaaattacagattatgatatagtgcaacacttaccggattaaccgatctgactgtctatagtacctccgaaataaatgcttcaaggaaacgtcttggacaacataagtatcgtttctcaaaagcctcagttccagggcgcatatgaacggcaaagaattacctgtcttgacaagactaatctgcagagagtttgaacttggtatgtaaataatctcttcaactctgccattgacctttccttccaagtcaactctgatccacttattaggacctagatacagatcaaaactcggataatcattatatccatcgtaatttccatgcacaaacacagctttgatcatgaatcttcggttctgaaggtcatctacagtatagcaatttcgtagcccatctggatagtatctcaaaaacaaatacggctttatgtgtactgcttccagattcttctggattctaccgcttattccactatggatgtgatccgcatccgatgagaatactaatccggttaccggttcaatatatggaggctcgttactcggcaacccgcaatccaaactgatgaatcctggtgagaggaaatatagttatgaatgattgactttcatccacgaaatattgctttaggttaatcagtaaacagacaaaagacgtgtgcaacaatgcaataaaatgtggttaccttgttgagcctgaacataatgtataatggcaaatatgaaaaaaagataacgatgacgatcctccatttctgctacctcaaagaaccgccagtgttctggtatatgaagaagtgcctatgatcaactcctctgatggagactaataaaaaacagttttgtgaggtcaacaattaaaagtgccaccaaagatatctgaatcaaaatacataaataaaagtagctcaaaatattttctaactcaacttgaaaaactttaatgtttgtagataatttctacaggctggtggtgaaaaattcacccatgtctatatcatctgctaatacttaaaacgtcgcaagggaataaaataacaagcagacaatgagagacctttaaatgacgtgaagaggacatacacaattgtataaaatgttagtttcataatatttccacgtagctaaaagtagccaagttgcgaagatgaacaggaattacattatataaaatagcaaacaatgttaaaattgaataggatacacattccacagtatatatctagggtattcaagactggaatgtgaagtcagagtgatcggtcttaagacaagagagaactcaaagaattggaggctgtagagttg

SEQ ID NO: 6096 - DNA, 1965 bp, Arabidopsis thaliana landsberg
acgatgctttaacctctgttgagaaactcatgatgatcccaatcgtaccgttggtttcttcctccgagggtaaaacgggtcttttcaaatcttccgacgaggattacacgaaatggttagactcgaagctcgagagatcagtgatttacatttccttaggcacacacgccgatgagttaccagagaaacacatggaagcgcttactcacggcgtgttagctacaaacagaccgtttttatggttcgtgaggagaaaaatccagaagagaagaagaagaatcggtttcttgaattgatcagaggaagtgatcgaggattggtggtgggatggtgttctcagacagctgttttggcgcattgtgctgtgggatgttttgtgactcattgtggttggaattcgacgttggagagtttagagagtggtgttccggtggttgcgtttccgcagtttgctgatcagtgtacaacggcaaagcttgtggaggatacgtggaggattggagtgaaggtgaaggttggggaggaaggagatgtggatggggaggagattagaaggtgtttggagaaggtgatgagtggtggagaagaggcggaggagatgagagagaatgcagagaagtggaaggcgatggctgttgatgcggcagcggaaggtggacagtcggatttgaatcttaaaggttttgtggacgaggatgagtagtgggttttaagtttttgaagttaaagaatgtgcatcttaccttgttcaaataaagagaacaaacagagaagaaggtctcgtttattcactcttgtactcctcctgattggtcatctagaagaaaagaaggtctcgttaattaacattacaaagcagccttttctttgtatcctttaaattcactcaaagctccctttgtagacaaactcttcttctctttgttgaaacaataaaccggtgcttgccatttctcatcctctaggaccgcacctacctcgtatgtcattatatgagcctccctccctgcaagagttatatgtcagatgaattttgctagaaaaaaccattagacagatcgaagacaatgggcatgttgatggtatcaatcacctgtatagaatatccattgcacgggtctcttggtttcaacatcttcatagtaccatataaagtctaccttctcccatacattgcagagaaacccactcacgttctgttgaccaaggtacttggctccatctagccagtttggtcgcagtattccaaccttatgtgacataaaattacaagaatattcagcaagttactatttacaaaagcattccaggttcatacaggaccaatctaagtgaacttgctactaaaaaaaacgaaaaaccaagccttagtacacatgtaaagtcactcactgaacctccttgaataatcatctgttgatcctacaagtttctactttgcaaaggtacccaagagaccagaccaggtcatgtaccctactactaccgaatcccaatctcctgatcctggttaaggattttgtaaagtattgttacttaacgagcatatcaaagtcaccagagtgattaggtagcttcagtcttccgataagatgcaaagcacaaagagtattggtaacaatcaaaatgtacacgctgcctgctacagttaacaaggaaatactacaaattactggaattctttaaaaagaaagaccaagtgagagtgaagtagtaagaaacaagagagaacttcagactaaatctgcagagagctccattttcatcaaatgaagatttgtgaaatcacctgactttaacaaaaccgagaaatctcctactctcctaagatatttcaattttctactcaaaatgactatcctataaaccagacactataactaaggtcattgttgcttcaaattggagcaatctctggttttctaagtctcattcccagtgaattcacacaaagcaattaacaaa

SEQ ID NO: 6097 - DNA, 4481 bp, Arabidopsis thaliana landsberg
  unsure (1)..(4481): unsure at all n locations
tcagttgtctctgagcatcgtgattagctcttcgactctgatacatttcgaaccaatatagttgtacagaattatggaacaggtatagttttggagaacacatacacactctacatgttgctgatcatatggcaagagagagtcagagaggagctataaaaactgaaacttcaaattgatttgtatgcaagttttgtttgaagagtcttagcttccttgtttgtcaagtcatctgatctgtatctgtaacttcagtttcctatgtttttagtcgtagttcaaaatttagaagaaaaaataataataatttgccgacaaaattaataaaataatgccaaaccgacgacaaaatcaagattcttgtctgttgtcccaaattgctcatcaaattcaagatcctgtaaaatcagtagcaaccatggagaagccaaagttcaagactgtccaagaggtggttgcagccggtcaaggactaccggagagatatcttcatgcaccaaccggcgacgacaatggtcaaccacttaacgctgccgtgccggagatggatattccggccatcgatctcagtcttctcttctctccttctgatgacggtcaagaagagatgaataaacttcactcagcactctctacatggggcgttgttcaggtttgactatcttggttagtgatgatcagattcatgatttaaactctgtacaagttcttattgaagtaagcaggtgatgaatcatggaattactgaagcttttcttgacaagatttacaagctaaccaagcagttctttgcgcttccgaccgaagagaaacacaagtgtgctagagagacaggtaatatccaaggatatggtaacgatatgattctgtctgataatcaagttcttgattggatcgaccgtttgtttctcactacttaccctgaagataagcgtcaacttaaattctggcctcaagtccctgtcggattcaggtaagaaagtgacaccacattggttcattattgactgtggtggtgattttgactatagtttttttattcagcgagacgttagatgaatacacaatgaagcaacgggtattgattgagaaattctttaaggctatggctagatcattggaattggaagagaattgttttctagaaatgtatggagaaaatgctgtaatgaattcaagattcaacttctttcctccatgtccaaggccagacaaggttattgggattaaaccgcatgctgatggttcagctatcactcttctcttacccgacaaagatgtcgaagggcttcagtttcttaaagatgggaagtggtataaagctccaatagttcctgatacaattcttatcactttaggtgatcaaatggaggtacatcaatcctgtagagatatatgcatatgattttcaaagattgattggtgtaggtttgacataatctcttgtgtgtttagataatgagtaatgggatatataagagcccggttcatcgagtggtgaccaacagagagaaggaaaggatatctgtggcaacgttttgtgtaccgggtctagacaaagagattcaccctgcagatgggcttgtgactgaggcaagaccaagattgtataaaacagttaccaagtatgtggatctccactacaagtactatcaacagggtcgaagaactattgaagctgcattaatctgattatacttctttaagtctccttcttcaagtctcatttttttttccaaagaaaactggccaatcttttcaagtaacatttcaacaataaagagtctctaaacccttaagtaacctttcaacaataaagagagtctaaactctaaacccttaagtaacatttccagtatcaattgctatttgagaccccttaaacccaaaacttaaatatatttcatattcaattccgcttgactcctaaactaactcgtgggacgatttgcttttttgaaagtagagattttcaaattttaatgattatgtattatatataatattttgcaaattgtatcaatttataagacatttatattttaaagtttataattgttattaagttattgttataccaatagacaatttttgttttgtacccttatctaaattagtatgattcgatatgtctaatattggtggtgtgaaaaataataaaatgagtagtatttaatccgtattgaagcggtgacttaatgatatttaattttttattaatattgattcaaaagttccgccatataaccccgctcggcaatataatatatctcgtgttatttgtttatatattcgaatgttcataatattataaactgtttattgattttaaatatatcaatgataatatttttacaaaataaaagttaaaaattttaaatttaatatttccagtaaaattaaacagtttaactagaaaccaaaattataatatctatgaatcattgcctaaacattttagccgatatggtacgttaatcacaaactttttattaattaggtaatatatgtccctttttaatgcacaaaaattttaagatttttcttaactttatgaattatatgatgattcaaaatagtaaaaagaaaatcaaacaaagctgataaaaaaatcttaattttaaatcttaaccaaatcttctaaatatggattttgtacaaaaaacgcttaaagttataattttttgcaaatttactttccacctcaaaaaatgcagaataatcatgtgaaatcaaaaatattacgcaatatagcctttctaatatattgtaagcgttttcacgatcacatacatttgatttttaaaattttaaagctatagaaaaattcctcttctcgaggctttcgatttgatatattatttatcaaaatttaaaagattaacaatagtgaaaaaggcatttcactattacttattaggactacatggagtaataatgattaattgtttaaaaataaaagcaaaaccgttgttgtcggtgaaatggattttgggatgaaaggttataaaggttactgcaattgtcatgtggagctatgtgacttctactctatcaaaggcatgttaatgatagcttgtaaaacagagaaaatgaagaaaatagcggttaccgcaattgtcatgtggagctatgtgacttctactcgattaatatggactattgttgagtaatgtatgttttgttactaaagctacggtaaagagattcaagaaactaagcagaagaatcggaagttaattacaatctaaaggagtagtgaattaagtgctttttgcttttgcttaaatcctggagaatctagagtgaacaggtctataaaagtgttgtcctatagcatgtaagaaaaatgacttgtaggtgtcatagagttatgttatgcttatgtgtggtgtttttgtaataaacgtggataagagaaatgagtgatgtatgtttttatgctctactaatgaagaatgttaagaaaagaactctctctttcaattctcagttatagaaataacaaatctcaaaatcacaacaactataaatacaaagaagatacaaaacaaaaaagattcgtattgtttttaatgttatttagtttagttttactgtaaaattgtttttaccgcccgtttaatgtttttttgcacactgcttttattttaattgatagtttacggggttgaatataagtttgtgaaagtcttataagcgagggctaaaaaaataaaaaaaaataaaaaaaataagcgagcgcgttaagtaacaattagttaagttgggctgtgagattcttaaaaagcccatctttacaaaacaggaaaccctagaacgaaacatttcactcttcttctcttccaccatctcagattcnnnnnnnnnnnnnnnnnnnnnnnnntccggtgatcttctcctgtccgcccaaatttcagtatttctttgaagtaaaactttgttaatcagcaaaaaaaatatgaagccagtgataggcacagtggtatcgaacaagatgcaaaaatctgtagtggtcgccgtcgatagactcttccacaacaaaatctacaatcgctacgtcaaacgaacttccaaattcatggctcacgacgacaaagacgcctgcaacatcggcgatcgagtaaattctctcgcatttccttcttccctttcactctaatttcgtttgattccgtcttttaaatctgagccacttgaattaggctttgtgattgaacctctgaggctaagaaatttgaaaatctggttgatgtgtaggtgaagttagatccatcaaggcctttgagcaagaataagcattggattgttgcagaaatcatcaaaaaagctcgaatttattctcctcaagctgctgctgctgctgtttctgcttgtgcttctgcttcctcagcctccaaaactaaatcttctgctcagtctcagattcctccatcatctacttcttaaggtgattgattactttagtcctttacggacat

SEQ ID NO: 6098 - DNA, 586 bp, Arabidopsis thaliana landsberg
agtaaaccttgtccggatcaatcatctccaacacgagccgagcatagtcataaccaccctttgtgtaaacgtacatagagaacatctcattacattctttcagaaactggtgaacaaaaggtctcaactttatcaaagattcttcaggaaagccagtgttgaatctctttatatctttcctcgattcaacttcctctattatatacttttcagattcataaagcagtgaagttttaatggtgtgaataagcgtctggtccaagtcaagtactaagtgaagcttcttgtcttcaagccaagaggtttgagagatgagcccttttgtaaaacctaaagcttcgttactcatctgcatccctttgtagagataatcaaaagatctgccttcgaaattgtccactgttgtatagcaggagatacagatcttattgcggacgaaccaatgattgcaattaggagacggagactctatggtctctggagtgatcttacgtcttttggattgtggctcaagaaaaaggtttcaactagagacatggtttcgaatctgaatctacgaggactaattgaaaccggcacaacgaag

SEQ ID NO: 6099 - DNA, 992 bp, Arabidopsis thaliana landsberg
ggttacttttggcattcgggtattaccaagagaagagagtcctggttttaaaaccctggatcttgggttggctgatgaacgtgggatggggattgttgatgatcccagtagggttgggcctcatgacaagaaaaacttgctgcagattgctaggtacaagtattttggagacaagtcttgtttgttttcagaagataagaagaagatagatgagagtgatgagaaaggaccattgaatactgctttgagattcctcaaggatgttcacgaagaattcttctatgactggtcgaagaaagacttggattcagtggatgtgaggccgttgctaaaggagatttctttgagatggaagcgtaaagcagacggtgtggtttgaagttaaagtgttgattcattttttatgtttctgcgtgtgttttttttctttcttacggcctgtgttttgtttattatattagatcttgatggtagttattggtaatggaggtactttatgcgtttcataatgtgatgagatgtgacttttgagttttgattcagtttcaatctataatataatgtttcattgaagatgtattgaggttcttatgggtggtacttatagaaaactagtcacattaaggatgtttctggttctaacaacatttagtgagacaagaaacagataacgagatgaaaacttgaaattgaaaggtgattacgcagctcctagctcactcgacttccaaaaagacaaagatcgagtttgtgttgttgtatccttgataccatgattaatgatgtttgtgtttccctcgatgaatgtgacctgaaacatctctgatttggaaacactcctttgttctgtaacaataacagttagagtaacagttaccgacgagttaaaaacaaagatggatagtcttctttataggccttaaaacatgccttgccaacaactttcttcttgccaggttatttctttttccataaggaatcttcaatttatc

SEQ ID NO: 6100 - DNA, 2806 bp, Arabidopsis thaliana landsberg
catatagcttaagctgctcagacaccattcaacgagacacttagtgagagagtagcaaatgacttactcttcctgggacggcaaatctagcttcaacttaagaaatcattggtctttgcaatcttcacaatctcctcagcttcttctctcttagaccctttcaccaattcatcaactaactgctgcaacgttgtttgaccgacaagataccgcttactgaatgtctccttgaagagctcaatcgcagactcaaagtcacctgctttacacatagcaggaagcaataaagcaaaggtagctttatcaggacgataaccatgcttcacaatttctttgtaccacgcttcagcttcgtccatttttccttcgttgatagatcctctaatcatagcattgaaactgaaaacatcaggtttgagcccactagccttaagttctccaaagagatttactagctctttcgatttcgcctcgttggctaatccaagcagcctagcattgtaagtcctgatgtctattgctacattcttctccaccattttagcccatatctcttcccctagctcaaactgtccctttagatacgaagacagtaaaagtgtgttgaatgtaactatatcaggttttagtcccttgttctcaatctcatcaagcaatgcaacagcttcacgtaaagaatccttctcacacaatgccttaatcaaagtattgtaagatacaatatctggtttgattgataactttccaggtaactcattgaaaagttcttcaaccacatcgaatttcttggaaagtccatatgcactaagcaaggcattgaaggacaacactgacctcttgcagtctctgtttggcatttcgtcgaacaccttctgtgcattttcaaacatgccggcttttccatacagagaaatgatcctcgccgcgaatccctcttttgacatgtcgcggtacttcttctgctcctccaaaatctcttcgacatagtgtaatctctttgcggctacgagacggcgcacggttctatcgtacacggctatgttggtccggaaccgctccgactcacatgccttcttgaatttctccacgatccgtttggggtttcgttcgccattcacgagactggttagtgacttttgaggaggcgagattgcggcagtgactgcggtgggttcggagactacggtggcggcggaggaaaaacggcggatcgggcaagtgttgaaggtgccacggagaacgcgagatagagacgacatcgttttgggagtgagaaaagggtttcagccttcaggagacgggtttaagaacaaatcaaatgaaggacgcatctgataatttaaaaaatgttagtgccttatttttaactaaaggaaatattgggggctagaataacaaataatagaaatagtgttgttttgccgacgacctaattttacttcaccggtttgattacgggagaaggcgagcttgagcttcaatggcgcctgttaatatgactggcgctgttgttgcagcagcggcgttgttgatgcttacttcttacagcttctttttccgtctctccgagaagaagaagaggaaggagaagttgactatgagaaacgggcttgttgatgccattggcaatactcctctgattcgtatcaatagtctctctgaggctactggatgtgaggtttttctcgatgttcttttgctattttctgtttggtctgacgaactgatagtgtgatttatgagttaaagatgtaatttttattctacttgtttcgtctggtgatcagattcttgggaaatgcgagtttttgaatccaggaggtagtgttaaagatagagttgctgtcaagatcattcaagaggtacactatgattagcattgtaaaggtttcaacttttaaaagttttttgatcatcataaacctctcttaacaatgtcagtgattgaatcatcagcttggctatttatattagtggtttttgaaatcgagaagcaagtccattatgttttttttgtttctctgtttaggctttggaatctggtaagctattccctggaggaattgtaactgagggtagtgcaggaagtactgccattagccttgctacagttgctccggcttatgggtgtaaatgtcatgttgttatacctgatgatgctgctattgaaaaggttatatcttttaaataccttgatgatgattcaaattcccttgtatgcattattgtacatacactcaaatttgtatcgtgttggacttattttagtctcaaataattgaagcccttggagcttctgttgagagagtgaggccagtgtcaataactcacaaggatcactatgtcaacattgcgaggcgacgggctgacgaagcaaacgagttagcatcaaagagaagactagggagcgaaacaaatggcatacaccaggagaaaactaatggttgcacggttgaggaagtgaaagagccttccttattctcagattcagttaccggtggcttctttgcagatcaatttgaaaacttggcaaattatagggctcattatgaaggtactggccctgaaatctggcaccagactcagggtaatattgacgcctttgttgctgctgcgggtacaggcgggactttagctggtgtttcaaggtttcttcaggtataattactcagggcttatactaatcaaagatgtaagaatgagtaattcgtggatgttataagcaaaagaaaaactcataaattctttgtgcatttatacaggataagaatgaaagagttaaatgttttctgattgatcctcctgg

SEQ ID NO: 6101 - DNA, 695 bp, Arabidopsis thaliana landsberg
agagaattaaaacgactcaagtcaatggttttattgtttacactagaactaggaagactaaattcaccaagcttcatgaacaagaagatgaaaatgctggattgtcgaatcatctcgaggagtcgaaaccaacgagtggtgttacaaatggcttcggtggtgatatgtgtcgcagcagctcggtaggtgaaactaacgttagtgggagctcttgtgttaagaatacacttgttgagagctcctccgggaaagtcgttgtgatagagcggttagttactggcggcttagctgaaagtccggcagttgagactgacagtagctcattagtggatgttgtaattgacgacatcaattttgtggaattgttacatgaagcgattcctgttgaaattctgtctgaaggaagcctggattttgaggtgaaaagactaggaactaaagttagaaccatgggaaaatcctatagcgtctcggagaagaaaaagcatggatcttttaagcgtacagcacagatctataaatctattgtgagaatgaagaaggtaaataatttggtccctgagaatgaagaggtttttgcggaaccagactttgcccgtgagggattagaagaacagagtcattctgccagtcttgctgaccagtccattttattccgagcaggccataaacaggaggggtcttttgagaccggt

SEQ ID NO: 6102 - DNA, 1168 bp, Arabidopsis thaliana landsberg
  unsure (1)..(1168): unsure at all n locations
tcgatgggtggtatagttacttaataacatttataaagtgtattttattatatcttttataaaaataaaatttgcaaagtgggatatatattacttttaaaaaataaatcgtcccgcggtatacgcgtgggtttaaaattctacgacttatatattgaacgtaccaacatttatataatgattctcggtcgatgtcaatataaacgtaacaatgctttttacttggactttggatactgacattacttggannnnnnnnnnnnnnnnnnnnnnatggaataatgctattttagggaattagtagtatacattaaatggttttgtagtttgtgcaattaagaattatttgatttttacatgtgagttgatgtcttcttgtacagtaatcataatgctttttaacactcaacttttgtttttggtataatctaattaaaattttaaataaaagcacacattagtttttaaggattttgcttttccaataaactttgtttgagaactctcataaaaacctacattattttcaaactatacaaacgctagaagaaaacatagaattatagattataaatatcaccacctaagccatttgtaataccacttgttggtttcgactcctctagatgatttgacattccattttccaacaatccagcattttcatcttcttctttgtaaaacttggtcaatttagtctttctagttctagtgtaaacaataaaccattgacatgagttgttttaattctcttgcagctagtcctactcctatcaccagcctctccacactcactgtctaaggccaaccgcttaaccggagattgccaaaccgaactgatacagccgcctatcgactcgagcacaaaaccttcctcattgcaacgaatctacttaacaacaaaaccctcccaaggaaatctacacaaaacagaaaaaaaaagtgaagcaaactgatattaacaagttacgaaaagatttagcaaaaaccatggaagctacagaaggaaagtgtttgtcatatgattccattaaaaatgcagagagagagatataagcttctgcattccaaaaccttccttggcctattgtatattatggacagcattttcctagttaccctgccccataatttttcgaccaagattaaatggaaagagaatcatcag

SEQ ID NO: 6103 - DNA, 869 bp, Arabidopsis thaliana landsberg
  unsure (1)..(869): unsure at all n locations
gttaaaaagaaactatgaagaaatgggcgaaacctaattagacagaaaagattctgttaagttagattgagtcaccaattaaacggttcatctgtgtttacctggtgcatcgaaatgaaaccgatagaaattccgagaaggaagttcatggttataacatgtccaaagagcgcagcagatgctatgccagtaaatattgtggcaactgtcgatgaatatttcttcaagattgtatctgaaagcatcaaagatgaagacaagtaaatatccatgatatcaatcttgctataagaataataccattgattatatataacaaacaatctccagatatgttaagaaagtaagtatctagactcaagccaactagtttcacagattaaatgaatctaacaaagcttagtcggtattacctgcatatttgaagaaaaaggacgataaaatcccttgtgctgcgttgttcagtatcaaaaacatggtagccctagaatgtccttgtaggatgtcaaagctgccaggacctgtcaatatcatgacaaaatttctcagcaatgcatactgaagaccttgaaggtttttcaaaagctattatggtgcttaactgcttaaaacatattattttcttccatgccattttttaaataaaatgcatgcacatacctttatatataacagttcctagtattccaagaaagttgaatattgcaccataaccatagaggaataaattctgcaacgaanaaaaaatgttcaatgagatgccatatacaaaaccaaggtcaaaagaagaagaccatgattctagaattgacgtgacattagtgataactgagcntagtaaccagagaacagaacaagagatcacattc

SEQ ID NO: 6104 - DNA, 1720 bp, Arabidopsis thaliana landsberg
aggatcccactccatgtgcggaactacggagtatatggcacctgaaattgttcgaggaaaaggacatgataaagcagctgactggtggagcgtagggattcttctgtatgagatgctcacaggaaaggtaaaagccgctatctattgttaatttgcttgaagcctcatgtcttggtatattgttgtgtgatgtcttgttttccttctgcagccaccgtttctcgggagcaaaggaaagatacagcagaaaattgtgaaggacaagatcaagcttccgcagtttctgtctaatgaagctcatgcaatactgaaaggggtaagtaaatgttggtgcagtttgattacagaatcaacagtaaacatgaaaatctttgtgcagttaagaactatgaagcattgtatttagaacaattctgactcttgactttgtaatgaatgtatagctgctgcaaaaagagccagaaaggcgacttggaagtggactgagcggagcagaggagataaaacagcacaaatggttcaagggaataaactggaagaagctggaggctagagaagtgatgccaagtttcaagccggaagtatcgggaaggcaatgcatagcaaattttgacaagtgttggactgacatgtctgttttggattctccggcgagcagtcccagttcggatcctaaggccaacccttttaccaatttcacttacgtcaggcctcctccttcattccttcaccagtccacaactactttgtagatttactatatttttatgtagttcctacttctttggttgttgattccttctgacacatgaacattaaagaaaactttggttaccaagacgcttaatttataattgattttatgagattgttattgattgagattaagtagagcagctaacactttgaccttttgacccacgatgtaatataaaagaacgttgaaaacgtgtaaatataaaagatgataacggtgatgcctttggaccgaactagtgtccgtctgaacgtcttgtaatgtaatgggcttaaagaattccggcccactaaaacaaagaagaagttcggtttcccaatagaacacgaacacgtgtcctcaccccatgatccacgatgcttcggaagacataaaaaatgtagccacgcgccttcttaaaaccttttccttttttggtttggcacattaccctctttcctgttaaagttgtctcgtctccttctcgtctccttcctcaagcatattctctggtaattcctctctctctgtctctctttgacttttctctcgcagagtttagattctttttttttctggatataaattatttacacgacacgaaaccttctaggtccaggtcatagttttactctatatctggatttgtttgaaaattgcttgtgttatgcgccagctttttccctaatatatagactaggtcttaattacagatattagagttcgtttcctcgagggtttctttcgacctcgtgtcctggtgaaattttggaattctaaggctttggggttttatttgggaggggatgatcatctaaaggatattcggtcggtgtcgtgttttcttaatctcaattctgttgactttagctttggtaattgaaaaagaatcttttcgcttgcttattttaattccatatccgtctcttattatatttggtcaattatgtgatctgatctttgtgaaattttatgaactgcagc

SEQ ID NO: 6105 - DNA, 1088 bp, Arabidopsis thaliana landsberg
tggaagaaaagatgacctccgtttataaagtcgagcacaagatacagcctgtacttggtctgcaagggaatgtataacgctctaagttaagaaatagtaaagtaaaataaataggatgctaacagagagaagtgttatatatacctgaaaagagtatttaagttgaacaatgaatgggtgatcaatttttgtaagaatatcgcgctcagctttcatgtattcagcatggttcttctccataatgtgatctttcctcatgactttcatagcgtatatctcagaggtctcctttttcctcacctggtagactttcccaaacgcacctttcccaacaaccttcataacctcaaaatcatctatgcctactacacctgagactttcaccagatctccctctaaagctttctcattgtcactgtcgtcattaccagagaaatcatcattttcttttaaagattcaccttcgagacactccaccaagtcaattgagtcctcagtctctagtaaggtgagcttggtcagcttcaaagaatgactatcgagcgaacacgggccaaccaaggagtgggatcgactgtagacaacagcaggctcgtcgtaagcaatatcattggcctcttcggggagtggaccaaacacatcagagaactcaagttcaacatcatctttcaagacagaatttgaagggctgatggatagatattgctgtttctggattttgttggggacaggacgctgagaggaaaccataatttacacgggaaaaatcgatacagaatcactgagaaagctgcaagagttcaccagcctggagagagattctgtaccgacagaagttaatgaggagaaaactgactaaaacaaaggctggcaaaaggcaatccaataacaaggagaagaagctcttgttgtttcccgattttaaggaaacagtggatgctgcagaagtgcgcaaatgccatgaaggttttataagctctgcaagtacatgaaaagaaaacacatttaaaggctatcacatgaacaaataagatctgagattcaggattgaccaaatctatgaagagacggtgtagaattgagataag

SEQ ID NO: 6106 - DNA, 524 bp, Arabidopsis thaliana landsberg
gtgccacatccttctgtgcctcaaagtcctctttgcctatctcacccgagacctcctctggaggggtctcggggtcagtgtcatcattaccagagaattcatcgctctcttttatcgattcacctgcaacacactccaccaagtcaactgagtcctcagtttctcgtaaagtgagcttgttcatcttcaaagaatggctaacaaccaaagacgggccaaccaatgagtgggatcgactgtagacaacagcaggctcgtcgtaagcaacatcacaggcctcttcagagttagcttcaggcattggtccaaagacatcagagaattcaagctcaaggttatcacccaagacagattttggagggctgatggataaagatagatgtttctgaaacggcttcccagtctggtttttgtttgcaacagaacactgagaagaaaccatatttctaaccaatcgccaaaagaatcacagaggaagcttcacaagttcaccagatggatgatgctctgctacccattaagtt

SEQ ID NO: 6107 - DNA, 4880 bp, Arabidopsis thaliana landsberg
tggactttcagacatatttatcgaggtttcacctgtgtttttggtagattaccttctttaatcaatttggctattgtaaaactgttcttaggttttggatatgttgacatttatcaggtcaaccaaaaaggcacttgctaactacaggctggagtgtgtttgtcagcacgaaaaggctctttgctggagactctgttctttttataaggtatatcaatctcaatgtgccaatgctctctttcggtatttttttgtcaagatgctaactctttttttctttcaattaagagatggaaaggcgcaacttctgttggggataagacgtgcaaatagacaacagcctgcactttcttcatctgtaatatcaagtgatagcatgcacatcggagttcttgcagctgcagctcatgctaatgctaataacagtcctttcaccattttctacaacccgaggtggcgatctatgtttccttttgtctccgttaaccttactatatatgcttgtttcatggcaattgctgagagatttacaacggagttttttcagggctgctcctgctgagtttgtggttcctttagccaagtataccaaagcgatgtacgctcaagtttccctcggtatgcggtttagaatgatatttgagactgaagaatgtggagttcgtcggtatatgggtacagttaccggtatcagtgatcttgatccagtgagatggaaaaactctcagtggcggaatcttcaggtagtttgaagtaaaactcatgatgaatgtcagatttgtctatcttgatacattgcaccattcattttagttatcccttgtttctgtttctgctaaagattggatgggatgagtcagctgctggtgataggcccagtcgagtttcagtttgggacattgaaccggttttaactcctttctacatatgtcctcctccatttttccgacctcgcttttctggacaacctggaatgccaggtaaatttttgtacaatttcatttcgacacaacatctttgagtctcctcaaggacggaatttccggtgctcttgcagatgatgagactgacatggagtctgcactgaagagagcaatgccatggcttgataatagcttagagatgaaagacccttcgagtacgatatttcctggtctgagtttagttcagtggatgaatatgcagcagcagaacggccaactaccatctgctgctgcacagccaggtttcttcccatcaatgctttcgccaaccgcggcgctgcacaacaatcttggcggcactgaagatccctccaagttgctgagctttcagacgccgcaaggggggatttcttcctcaaatctccaatttaacaaaccgaatcagcaagccccaatgtctcagttgcctcagccaccaactacgttgtcccaacaacagcagctgcagcaattgttgcactcctctttgaaccatcaacaacaacaatcgcagtctcaacaacagcaacaacaacaacagttgctgcagcagcaacaacaattgcagtctcaacaacacagcaacaacaatcaatcgcagtctcagcaacaacaacaattgctccagcagcaacaacaacaacaacaacaacaacaacaacaacaactgcagcaacaacatcaacaaccgttacagcaacagactcagcagcagcagctaagaacacagccattgcaatctcactcgcatccacagccacaacagttacaacaacataagttgcagcaacttcaggttccacagaatcagctttacaatggtcaacaagcagcgcagcagcatcaggcgcaacaagcatctacacatcatttgcaaccacatttagtttcgggatcaatggcaagcagtgtcatcacgcctccgtccagctcccttaatcaaagctttcaacagcaacaacagtctaagcaacttcaacaagcacatcaccatttaggtgctagcactagccagagtagtgtaattgaaaccagcaagtcttcatccaatctgatgtccgcaccgacgcaagagacacagttttcacgacaagtagaacagcagcagcctcctggtctcaacgggcagaatcagcaaacacttttgcagcagaaagctcaccaggcacaggcccaacagatattccagcagagtctcttggaacagccgcatatacagtttcagctgttacagagattacaacagcaacagcagcagcaatttctttcgccgcagtctcagttaccacaccatcaattgcaaagccagcagttgcaacagctgcctactctctctcaaggtcatcagtttccgtcatcttgcactaacaatggcttatcgacgttgcaaccacctcaaatgctggtgagccggcctcaggaaaaacaaaacccaccggttgggggaggggtcaaagcttattcaggcatcacagatggaggagatgctccttcctcttcaacctcgccttccaccaacaattgtcagatctcttcttcaggctttctcaacagaagccaaagcgggccagcgatcttaatacctgatgcagcgattgatatgtctggtaatcttgttcaggatctttacagcaaatccgatatgcggctaaaacaagaactcgtgggtcagcaaaagtccaaagctagtttaacagatcatcaactagaagcatctgcctctggaacttcttacggtttagatggaggcgaaaacaacagacaacaaaatttcttggctccaacttttggccttgacggtgattccaggaacagcttgctcggtggagctaatgttgataatggctttgtgcctgacacgctactctcgaggggatatgactcccagaaagatcttcagaacatgctttcaaactatggaggagtgacaaatgacattggtacagagatgtctacttcagctgtaagaactcaatcttttggtgtccccaatgtgcccgccatttcgaacgatctagctgtcaacgatgctggagttcttggtggtggattgtggccagctcagactcagcgaatgcgaacttatacaaaggttcgattgtgctctgatccatgcttgttgatatttgggttttgttttcggtttgacaaatgttaaattatcctacaggtgcaaaaacgaggctcagtggggagatcaatagacgtcaaccgttacagaggttacgatgagctgaggcatgatctagcgcgcatgtttgggattgaaggacagctcgaagatcctcaaacatctgactggaaacttgtttatgtcgatcatgaaaacgacatcctcctcgtcggcgatgatccatgggagtaagtagagagcaattactttcacacatcagactgttagaagttccattatttttttgctaacctttaaaatcgtgatttttgcagggaattcgtaaactgtgttcagagcattaagatcctttcatcagctgaggttcagcagatgagcttagatgggaactttgccggtgtaccagttactaatccagcttgtagtggcggtgacagtggcaatgcttggagaggtcattatgatgataactcagccacttcgtttaaccggtgatggcagaagagttctctcacagacaaagattcttttttcttcgttttgtaatataacttctcgttgataacatgtctcaagtttccgcggggcactgtagagcatttacctgtaaaatatcttccactaagtttacaagaagattttatttgctgtgattcactgtttctaccaagtttaactgatcaacttaaaccgcttgtaaccaaaaagagaaggaaaaacatgagatcaccaataaaatcacattttcaaactcaaagtctttattccagattatgctcaggccgtttacggaaaaaatttccacaattgggatacaagttgcagattacaaagatataacataactaagaaagtatagccatcacatctgaagctctgagggcaatgtagttggaaccatctttgcccttgaagtcgttaccagcatacttggagtaaagtactgtgcttccggttgatactggtagaggcgtaattttaccttcctcgtctagggaacccggtccaactgctatcacctgccataaaatgaagaggagaatatatatagttggaacttgtgtatgaactgactaacacatcaagctactaagaaagtatcagattcccggaatggacatgatatcaagtgagtacttaccgtgccaatagaaggcttctctttggtagtctcggttaacaacaaccctccagctgttttctcctccgcctcagcaacctaaactcagacatttcaaaacagaagttaacatttgcatgcagagtcaataataaaatgactaaggtaaaacagaagggacgaaccttaataaagactcggtcattcaaaggtttgagatctttgatgtcctctgtctcaagaatgccaacaatatcatcttccttgaggataagatgcttcacatcattgaactccacctcagttcctgcgtatttggagtagataatttgtgctccagtctgcatcaggaaaaagatgaaggcatatcagatatatttattagcaaacaacaaagcaaacgaagaaagagggcttgcagggtagtgaggttgttacagggacagtgatatcaattttgttcttcccaatagttcttccttcacccacagcaacgacttcacctccttgaggttttgattgagcagtggatggaagtaagataccacctaaagtcttctcctctgcctccttgatcttcaccaaaacaagatctcccaatggcttaattgaagtatactgtaaatacccatgcacaataaacagagcagattatttcaagtag

SEQ ID NO: 6108 - DNA, 3198 bp, Arabidopsis thaliana landsberg
tcacgaaagatggagacttgaggctcaagagtatctttaaacacgttggatggagaagtggaacctcaggacaaggcgttgaggtataagatttgattggttgatcatttttaatgacagaaacatgttacatgctaaactgtgtttggaaacaaaattttgtagaggttggagatacaaagcacagggaatctagtgttggttgatgctaagaatctgatcaaatggcaaagtttcaatttcccaacagatgtgatgttgagtggtcagagactagacgtggctacgcaactaacttcattcccaaatgactcgactctgttctattcctttgaagtcttacgcgacaagattgctctgttcctaaatttgaacaagctcaagtactcttactgggaatacaagcctagagagaagaacacaacggtcaacttcgtgagactagggttaaagggtcttgacctattcgacgataacagtcgcataatcggaagaatagagcaaccgttgatcagattcttggcgcttggaaacagaaccggtaatttaggactctattcgtataaaccggaaaagggaaagttcgaggcaacgtttcaagctgtgagcgacacttgtgatcttcctgtagcgtgtaaaccatatggaatctgtacattctcaaagtcttgttcttgcattaaggttgtaagcaatggatattgcagcagcatcaacggggaagaagctgtttcagtgaagaggctatgtgatcatgagatggttgagctaaatggagtcactacagtgctaagaaacgggacacaagtgagaaacataagcaaagaaagatgtgaagagttgtgtaagaaagattgtgagtgtggagctgcgagttactctgtttctgaagagagttgtgtcatgtatgggatagtgatgggtgttaaacagattgagagagttagtggattgagttatatggtgaagattcctaaaggagtgagattgagtgatgagaaatctaatgtgagaaaatgggtggtgggattagttggaggtattgatggttttgtgattttgttgcttatttctggatttgctttttatttcattcggaagcgacggaaaagcttgttactgccgctgccgccaccgccacctccaccgctatcgcagcagccggctaatacagattcttgatagttctgtttttggatatttcagattaacttgtgtcttacaagaatacatgtaaacattgataccgtttatagcgaaaaccgttgctttacatcgaacattgtaaaagcctaaagaaaatttattgattaatgtttctgaggattttgaaggtaatgcatggtatatcactcttacaaaaattttttcttataattattccatttataaccaagtttttttatgatatcaatatagttgattcgttggggataagaaaccaatttcttagagttttatgatttttctactaacctttgtttagctaaaatatttttgctattcaatcatatttcactattcatctaacatatatgtcaaaactcaattatttcatgtaaaacagaagaagaaaaaaacactgtttttccacatttctactgttaggttaggtatgggatatatagaatttagggctcatggatttatgaataccagtgtagaattgtacgcactagtcgcaattcgcaaagcagaccaaggcacgtccaacggttagttgaattagtgtcattttaaaaactgagactttcactatgtggcccttctttatgaccgttagtgatccccaccacaaactccatcattgacgcagctaactccggcacaactccctctataatccaacggtccaaatactctttcacttttctccaaataaagttatatttctaatcacatttctatttctagattagaagacaattgagaaaacgactacaagttcacacttttttattgaatccaacggtccaaagattctttcacaaatactttgaatttacttgaatcaattaatctcacttgctataatgataagatattcacctccctcttataagataacaaaattagattttataaaaagtgcttaaactataaataaagacaaaactagtaactgagaaggcaacggacacttgtagcttttattcaactttaattattccctacatgagaaaaagaccgttgcgataatataaagtcttcgttcacacacagtctcgaagaaaacaacaacagttttgatcactctgtctctcttactctatcttcttcccaagttcttgtcttttgatggccgaaaccctagaaccctccctcgtcggggaaatcgacacttctgcgcctttcgagtccgtgagagaagccgccactcgctttggtggatttggtttctggaaaccttcttcccttaacatctccgaagcttctcaggtcttatttctctccttctccctcaaagtctctgtctttctcactgatttttgtccatttctttgcttttggggttttagttgaaatgggtttttagattcatcaatttctagatagatcttgtctttagttgtttcttgtgattatgatgcgaaatttcgaatctttggttgcagaacgaagttggtatggttttgaaagcgagtgagttagagaaggaactgattgagaaagaaggagaaactttgaaggtgttgaagtcacttgagtcgaccaaagccattgttgaagagctcaaatcaaagatacagaacaaggaggataaagaaaattgtgacatgaatgttttcaaggaattgaaccaagcaaagatgaatctgtgcaagacgacaaaagatttggctgctattcgcgtgtctgttgggttactaaacaagagattggaagaggaaagagctgcacttgagaagacacgagagagactaaactctgagaatgcagctgaaatgtccatggagattcagagactaagttatgaagctaaggaatttagtagaacaggagagaatgttcggtatgcggttaataaagctgtggctgagattgaacaaacgagaaacaagattgaagctgctgagatgcgtttgatcgctgctagaaagatgaaggaagctgctagagcggctgaagcagttccaatcgctgaaatcaagccggttacaagcagaggaagaaggagaagaagagaaggaaatggtg

SEQ ID NO: 6109 - DNA, 537 bp, Arabidopsis thaliana landsberg
tcttttaacaacttaagttcaaagctatcttcttcttcttattcttcttcttactttctttatccaacatcacagacaagtttgcgaatccgaaccgcttcctcttcccattgaaccttttttccttctctctatctccaaagttagtctttccaagaatctgacccaacgaaactcttccattcatcatcatcgctgactcatcagcaagaagtagtttcctactaagtatctgcccaatagacattgttgggttcaagacagcaactgaggatgatgtcccatcaccattcatcatcatattcagaccttttacatccatcatataaggagggtacttgaacttagccgaacatgatgatctcctcctctgttctgtccaccaccaatatccttcttctgcttccattttggccaaaccttctttaagtgtgctcctactgcttctgatttctcttgctgactcatcaatcgagtcaagaatctcctcctgcatagtctcctcaccatttgctgctcttcttctccttcttcctc

SEQ ID NO: 6110 - DNA, 586 bp, Arabidopsis thaliana landsberg
ggtggtgaataaacactccaaacataaacagagcaaatactagaaacagagctagaaacgtgagaatcaaaacagggcaaatcctataccaaatcaatcaaaagaagcatacaaagataacatttttaaatcagcatcataataataaaatcaatcgaattacaaagggagagaaagaaaaacagaccccataagattaaccttgagatggatgctaagctcaatgaagagctcatacatctgtcccagatcggcggcgttgccatgggagtagaggagcgtggaggtagccatcggatgcctcacgtacatgcccacgatctctgtgcctctcctggtccgaagctttacgatttctacgttttcgcggtgggggaaagggctgagaagcaacagtccggtgagctcgtcggtcaccaccttgtaagacggtggactcggcggtaagaaggcaaacttcgccgccacagatgacgtcacccctcccatatccttccttcctcactccgtttctctctacacagcgggcgggtgggtccggtttattgagaaaaaccctcccttttgagattgtagcttttcatct

SEQ ID NO: 6111 - DNA, 4483 bp, Arabidopsis thaliana landsberg
ctattaatgtgtaggtaccgatggtggttataaccgaaataaccgacgatcgttatgtcaggacggtgagtggctcctgggcaatcggagctgatggaacatggttattcatatccaatcacaataatgcagtgaggaggttgagcattggggaaggggagaagttagcatctgtgcgccagcttgttagagaagcgtacggacaggaatacgttgaaggcccactacacctgacttaccaatggcctgattggatggacatggaaactacctttggtgggcgcacgaagccagtaagcataacttcagatgagacaatgggagtgtttctagctatgcgttttgagttggaggacttgagtttgtttgtctccaagcaaacggtggatgatggttccgaagatggtggaacaagtcagacttcaagttacggatttgcagataaaggcaaatcacctttatacgtcaacgctgaacgatcacctaactacgagtccgttgtgtggaaaaggcttatggatgacgaggcggtcctccgctggatgcgttcaacggaaacagaaggtcaaaacgttggagactcttctaccaacgtacaacaacaccctgtgagaccagctgttgaggcagcttctccgatgttaacgactgaaagtatggacacagcgactgaagatggagatcaggtaaaatattctgcgtttattaaattcagccactcgaatataccattacagtactaagacatctatttacgcaggaagaagactcaactgttgttgaggcagatttacttaaaaatctggggttaccgtcaattaatttagccactgaatcttacgactctctcagtgaagaggaagcgtacaacgacgaaaacgactatcccgggagcgagacaattaaggagtgcaatttttttgggccttccgcaactaacttggtggaacctctaggtgtacacttggatctcgcggtacctctgcatgaggctcttgaagacatgtgccttaacttcgcatctttcaacagggatgcagcgccaaccctagacgaacaaggggaagaaggtaccaattacatagcatgttgtttttaagaacaacacatattgcaagagtgttctaataataaccgtcatatagagaaacatgttattcgtataaataccatgcaataaaaaatttaatttcgctgaattcctgattagtcatacgaatacaatcttaatatccacatcatatttgtttagtttaaataacaaatctaatttaatataatctaatataatgatatgtttacaaaccaacacatggtttcaatttacgttgatatccctgagatatccctaatcaaaatatagagtaacatgctttaatattagacatcatgggatatagatattatgttggtcaaagtgttactatttagtcatacaaatacatgctttctacattcacaacatgtgtacagtgtaaataacacacgaactttattgttgtgtaggccgcgtcggaatggaattagcaattcgggatgtggtctacgaaggtgatgaactgtttgttggccgggtattcaaaaacaaacaggattgcaatgtcaaattagcagttcacgcacttaatagacggttccatttccgtcgtgatcgttcctgcaagaaactaatgactttaacctgcatttctgaaacatgcccttggcgtgtatacatcgtcaagctggaggattctgacaattaccaaattcgaagtgctaatctcgagcacacttgcactgtagaagaaaggagtaattaccacagagcagcaacaacgcgggtcataggcagcataattcagtctaagtatgcgggcaacagtcgggggccaagggctattgaccttcaacgcatcctattgaccgattactcagttagaatttcctattggaaggcatggaaatcaagagaaattgcaatggatagtgcacaaggatcagctgtgaatagtttcactctgttgccagcctacctacatgtgctgcgcgaggctaatccaagttcaattgttgatctaaagacagaggttgatggaaagggtaatcaccggtttaagtacatgttcttagcattcgccgcatcaattcaaggtttctcttgcatgaaacgggtcattgttattgacggtgcccacctgaaaggcaaatacggtggatgcctcctaaccgccagcggccaagacgctaatttccaggtttttcccatagcgtttggcgtggtcgatagcgaaaacgatgacgcatgggaatggtttttccgtgttttgagcaccgctataccggatagagataacctgaccttcgtctcagacagacattcctccatttacaccggtcttcgaagggtaatccttaaaattgataattttaaatgttacatgttatatacacatatggctcttatttattttagaacacatgctatctaccaatatgccctgctatatacgtataacacatgttaacatgcaggtctacccaaaggctaagcacggggcatgtattgttcatctgcaacaaaacatagcgacctcatataagaagaaacacttgctgttccacgtgtcaagagctgcgagggctttccgaatctgtgaatttcatacatatttcaatgaggtgataagactagatccggcttgcgcacgatacttggaatctgttggtttttgccattggacacgcgcttatttccttggggaaagatacaacgtcatgactagcaatgtggcgcagtctttgaacgcagtcttgaaagaagcccgtgaactaccaatcatttccttgttagagttcattcggaccacattaatttcctggtttgctatgaggcgtgaggcagctagaaccgaagcatcgcctctaccaccaaagatgagagaagttgttcatcgaaactttgaaaaatcagtccgatttgctgttcatcgccttgacaggtacgattacgagataagggaggaaggcgcaagtgtctaccacgtgaagcttatggaacgcacatgctcctgtagagcatttgatttgcttcacttgccttgcccccacgcaatagcggctgcagtggctgaaggcgttccaatacaaggactgatggcgccggaatattctgttgaaagctggagaatgtcttacctaggtaccataaaacctgtacccgaggttggtgacgttttcgctttacctgaaccaatagcctctctccgcctcttcccgccagccacgcgccgtccatcgggacggccgaaaaagaaaagaattacttcaaggggggaattcacggtaaacgttatacatttggaatttactgtaacacccttagtgttttaaattcctaacacttgctcaatcttcatctcagggtccccagcgacaagtaacacgttgttctcgttgcacaggcgccggccataatcgcgccacgcgcaaaatgcccatataaaggtacaatgttattttataccgtatcatgctatagatagaaacaacgttcatacaatttttataatatcatctgcagggggtgttgtgtctcgcgtcttcttcatgagttatatgttgtgttatataagcaaggggaagtccatcacatatggatattatgtaaaaggaagggtcacttggtataatgtacatattagcaattagatgtggcaattagggtggcaactaaaagctacgttgagaatgcaatcaagggaccccaattccagtaagtgccgtatagaagaccaccttctacggacaaaggataatgttctttttttggcttttgtgtagaaaaaaactttatgttcccccttttgtaaacagactcatgatattaagtaaagacgcgagtgtttaattattaatacttggtgtaatgtaaaattcaaattcacagacaaggggttaaatgaggaaatatatgaaacaaatataacgaatagatatagcaccactactggcaaattaaagtccataaacatgttcagccatcatgaactgacattttatgtcaaggattccaacaagatgaaattcatttcaaccataaatcaaataagatgctattcgagaaaaccacatgtgatgtttagaaattgcgtgaggtataaccgggcaccgagagttgaacagttccacataggattccttatgccacttcgactattttctcagaacccaataagtgcttctgcaccacacatttcaccccccaactacgccacataaatgagtgaatatatacactaacaatattggactatatatacatattggctatcaacatctccgtcaataataaaacgtccttcggcctacttacacatgcttgcaagggtagaaatgagacagtatcgtcagaatccagtactcatgcgggtgggtgggctgttcagaaaacaatttgacgacgcattggaggcaaataagcaggaagcacattatcttgaaa

SEQ ID NO: 6112 - DNA, 586 bp, Arabidopsis thaliana landsberg
ttacacaacaatcttgagatatcttactaaatgatagtgtcataacctagttcagtttcccataatccaatattagtttacaattttacaaaaatttgtgaacatttcctgtcaactatttgcgagtcatgtgtgagtgtgaccatgtggactgttgagttcattaaaatctctcaacttacaacgtaaatttgacacatcaattacaaaactgatccacattttcttgttctcctttcacatatatagagaagagaagatactactactagtcctgaatcacgatttatatgaaaaaagtgcagagatcatcaaatcatctgcagatggagatcgcctgtttgctgggcaagctctaccatcatcgcttcatcaaagaatttatttccgctgacgtcttcgctcattccctgcataaccaacaaattatacatatcgtgagagtctgaaactgatgatccaaacacccaacgagtcatacaatataactagcctaggatgtatccagcaaattatagctgggttacttggttaaagagtaattagcaagggccgggtttgtaacagtagttcggggatctttggt

SEQ ID NO: 6113 - DNA, 2114 bp, Arabidopsis thaliana landsberg
aaagatataacctccaatcaagttagattttataaatttacatttttagtatattataaacaaagagtcaaaatgggaactacatttatatgtataaaatctgtaattgcagaatagacataagagtcttgaaactggtgatatagtgtttgctaataccaaacctaaccaaatcaacatatattctaatctccagattagtgtttggagccgattgcttactaaaattagactattaatcgtatactccctttgttccatgaaatttgatgttttagattttatttttgtttcataaagattgatgttgtaggttaataatattattatttttgttaataaccaatagagagaggagagaaataagacttatattattaaattaacagaaaataatataaataatataaaaattacttttctttgtgtgaaaaacccaaaacatcactcttttaggaacagagggagtataaaataaaaatccaaaaacaaaataaacaataattcgatattaggaaaaatgaaaaaaaaagaaaaactaagaaaacaacaattaccaaccgcaagtcaagaatcaagatcaatagcgtgagacggacctaaacacattaaaccaatacatatccggtgtcttaaccggacaatctattataatctccttatcttccctaatagaaccgtaattacgaaaaatgacagtcacaaaactccaatctctctctctcctgtccgtctctgcgcgcatgatcccccccatagtgttccactacgcaccgcccgtgactctataatgggctgagacttgtaatccatctctccttattactattgcaattttatttctttccaaaattataattaatttccacacacacacacacctatacatatatgtacacacacatttgactctaatggcttcttcgaaactccatcatcatactcaccgaacaaaatccccaatacgtcgcttttgtatcttaatcataaccatgtcctccattctcatccttctcttctctctcttcctcttctcctctccctcctcctcctcccgtcaccaccaccaccacaattccggcgacacttctccggtcaatccttcgtcgtctctcgccgctcagatccgtctcgcttgtaacgcaactcgttacccagaccaatgcgtctcttccctatccgaacagggtcgggttcctccggatcctaaaccaatccagatcattcactcagcgatctcattctcattccaaaacctcaaaaccgcccaatcaaaaatcaagtctattgtagactcgtccgtagggaatctaaaccgtacaaacgccgcgaacacgtgtctccagcttctcacttactccgagcaccgcactcaatcgacggatcaagctttaacacgtggcaaaatcaaagacgctcgagcttggatgagcgctgctctagtgtaccagtacgattcatggtcagcgctcaagtacgtcaacgacacgagccaagtaggtgaaacgatgtcgtttctcgacggacttatccacgtcaccagcaacgcgcttagcatgatggtatcgtacgataacttcggagacaacgtcgcgtcgtggacttacccagcaacggaacgtgacgggttttgggaaaagactgggcctggtttgggcttagatccgagtacagggcttaatttgggttttccttccggtttaaaagaagacgtgacggtgtgtaaagacggaaaatgcggttacaagacggtgcaagacgccgttaacgctgcgccggaggataacggaatgcgtaagttcgttataaagattagcgaaggagtctacgaggagaacgttattgttccgtttgagaagaagaacgttgtgtttatcggtgacggtatgggcaaaacggtcattacaggttcgttaaacgccggtatgcctgggatcactacgtacaatactgcaactgtcggtgagtgtctctcgtaactttttaatgttaaagcaacatagtttttttgtataaattaagagttgaaagttcataattttaatattgttattagagtttagatgtagataaatattatgtggtttaagtctggtcacgtgaaagaatacttt

SEQ ID NO: 6114 - DNA, 991 bp, Arabidopsis thaliana landsberg
tttttaaatggtgttattatagtaatgagtggtgttgaaactctactttaatgtgttcacgtacctgtcaatggactatatataaatggagccactacaccagaaaaagactttaccccggatatgcatccttggaccttcccctgcaatgaaatgacaaaaaatatctgtcattgtcgtgatttaattaaaaaatttgttcggtagactatgattgtttctgcatacgaaatccagttgaaaaaattaaaaaaatctacaataacttaattaaccttgtgtgcctttgatattcattttattttaaatctgatattttatacatatttacaaatctataattgatatgggaattggtcggccaaattatgaatattggttgaccaaactatatccatatcggatcaatcctactatttttttaggtctgatcgatttcgatgcatattagattagcatattgatagattgtaggctttcaacttaaaaccaattggttttaggtggagtggccataactctttatatattattccctctgtttcatgaaatttgatgttttagattttatttttgtttataaatattgatgttgtaggttaatattattatcatttttattagtaatcaatgaagagatgagagaagtaacacttatatttaacagaaaaataataaaaataatataaaagttatttttcttagtatgtgtgaaaaatccaaaacatcattcttttaggaacagaggaggtacttgataatttatccaactttcgatgtctaactttcttcattaacacatatgttaaattcaagttaaattctgaaagcttttatatcaaaacttaatgacagtgaataaattttttataacatattatactataatcttctttgttctttaagtaacattaacactttttttctttttttcattgttttaaatcctaactgatattaacaatggtttggttcattgttggcagcaggc

SEQ ID NO: 6115 - DNA, 3271 bp, Arabidopsis thaliana landsberg
  unsure (1)..(3271): unsure at all n locations
agaatcatggaaggaactaaccatttgagctgcacggtctttcattacttccaagaatttatttagacaaacgcaaatgcgactggatatctttagtgagtgaggcccattaaagaaatagtnnnnnnnnnnnnnnnnnaacaatcccaaaacccttggcctttttatgtcgcgctaaaccctacgatctagaaccttccgtcttatgtgtatgtgccccaaattaaaaactcataaaccctagaaaatttcgattcatcgactgagagagaagaagaattgagaaatgatgaagcgtgtgatcccaacgttcaaccgcatcttggtgcagagagtcatccagcccgctaaaaccgaaagcggcattctcctacctgagaaatccttcaaggtaaaagagctttgatttcacgatttgattcttctgattttcgcctcttagatctgaaaaatgaacatatttttgggtgattgcagctgaactcaggcaaggtgatagctgttggacctggatcaagggataaggacgggaaattgattccggtctctgtgaaggaaggcgacactgttcttcttccagagtacggtggtacacaggtcaagctcggcgagaacgagtaagttaaacccgcttctttcttattattgccctaatattctgataaagttctgatttgatctaattgaacctttatgtttagctaatcatgttcaggaatcattatccattaattagattaatggatggaactaagggaattacttgtaagactgtgaagatattgaaaattttgtaacagaggatttaaaaacattttgatcaatgtttaataatgccaatttgaacaccagatttacatattaattggtgggttgattttagaaacgaataagaatttacaaatgaagaagaatttgactcaaagtgagtaacttttgtgtttgtgtgatggacgcaggtaccatctcttccgggacgaggatgttttgggaactttgcacgaggattgaaaaggctaagcttgccaacttaaccacgagggttcatgttggtgtttgtgttatgaggagaagtcatttataaattagtttatcttgaagatgtggttggactttgttgtcgtttatcattgaatctacctttatgaacctgtctttgaatttttacaaatgggcatcaatcacatggataacccaagtgttgcatcttctcgttttgtgcttttccgtaatctgtggatgcttttcgtttacgtttaggcagcaacttcaatagccaatgtagacgatagcgtagttgactttgcttattcatgatcatgctataacaagagaaataagctcatttggccgcatggctttttttatatagcatctccttcttcacatattgacaactgaatcaggtcgagaagtaggtccatgtctatgcattctgaaagttgtgtcttttgatttccttttcacaatggttggaaaaatactaattttggattttaagttgtttaacccactcgtttggatgataagacaactgtagtatattgtcttgtcgcaccttcaaatttagtataggttggttgattgaaaatatttcatctttctaaccaaaaactgaaaaatgtgtatgaaactcattgctatttttggacaagtctctctgccaatacaaattagaccatacgtagaaaccgatgcattgaattctcacgtttaacaatagttttccatagaaactgaaatcaaagaattgaagaaagaaaaagactaaagaactataacacataagaaaagccaaataaatactcaagtacatgtgattaatcgatcatgcttccaccgcacgagcgcatacatacataacataaataaaatttctctctcttttgcttacttcactcacagtttcgccgccgggataaatccgttcaatcggcgtttgccacctgccattgttacaagcaatgcattatatcgttaatggcgtagcgcattgagaagagagagagagagcagggaaacaatgatttcccaggtggagagagatctgtcgattcaaaatcggcttccgggaagcgatcacactactccttctccgccaacatctcctcatctctgccggagccggtcgaaatcctcctctgtctccgggcaacagcaaagtcggaacgtcgctcaccgtctctcatggatcattttatctgttcttctccggcgtcagggaattctccttttcgctcctatcatctacatctcctgtatgctttttcacctacacgcggcgtcgtttgatgcctctcccattatccaccgccgtcctgctccgggatccgtctaccggagccctcaggtttacgctaggcttcgcggcgagattgaagccgataataccacggctgatgcggtgaggtttgcctccgttttatcccgcttgtgatatcgttttgagaatgtggccattgtcgaacatagattgatccaattagagtataatatctaggagaacgtataacaatgttgaacatagattgatctctgttcttttcttgttcccatttgtcatgtatcgtcaatgcaattgtattcatttaagatatcaacaatttggaagcgttcttataaaggtgtagaatggaagccatgtgtgaacatgtctactggaggtattttacattgttctcctagtttcttcgttagtgttctttgtcctaagtaataagttgaatcaattaggctttcttgttgttgtttgtgttaacaattgtagttttacctgagtcaaatggtttcatatttattgaggcaaatggaggcttgaatcagcagcggacttcggtaggttaatcatcttacatcaaattgatttttttcacacaagcctttcttgctattgtctggcaaacttgtcaaaggtgaagctgttgacttgtctattccatgttttacttagatatgcaatgcggttgctgtggcaggctaccttaatgcgacccttgtaattcccaactttcactatcacagcatatggaaagatccgaggtttcggatatttgttttcttatcttctcctggtgttataaatttaagcaaagccatccctgtttcaactactttctgaaaaaaggttttccttgcagtaaatttggggacatctatgatgaagagtactttatcgataccttagcaaatgatgtgcgggtggtcgatacagttcctgaatacttgatggagcgttttgaccataactccacaaatgtctacaacttcagag

SEQ ID NO: 6116 - DNA, 469 bp, Arabidopsis thaliana landsberg
aagcatctaaaccttggatctctccatatgctgtgatagtgaaagttgggaattactagagttgcattaagatatcctgccacagcaaccgcattgcatatctaagcataacatggtagagataagtcaacagctttgacataaacaagattgctaaaatgattgagcgatgtgcataaatttcaagtatcatgaaaagatcaacaaacccaccgatgtccgctgctgattcaagcctccatttgcctcaacatatatgtaaccgtttgactcaggcaagtctacaattataaacaaaaaaaagcagatacccaattaatcaattatgctccaaacaacagactaaatctgagctccaggcaaaactttgcagaacgtacagaacactttactattgcatattaaattccatactccactttttgacaagatatgcttcatacacgctgaagcttagaattattacaaa

SEQ ID NO: 6117 - DNA, 3309 bp, Arabidopsis thaliana landsberg
tcgtagaaatatctgtctcccagcagcttctagagtagaaagccggcgaatgttgcggccggaagcgctgatgacggtcgttgacgatgagggggacaagtaagagcgaggatgctggcggaaagagcggaagaatagagaggtcgaagtaatggtcgatgaacaagttaatgaccggagcatggctaccggaatatttactccggcaaagactgtgcttaaggatgcaaatagtttaacccgacggcgagggaggagttttaaagcggttcggttcgaaaatttaaaccggagatgcaaatttcgaaatctataagtgtatggacctaaccggttattgatatggccgaacaagcttatacgaatgatttttcgaatatacagaagtttgatacacagattcacagcaattattgaatttgttttttagatgatctgacttttcttcacatgatatttgtatgttcaactctccgaaatttgacgattaaaaacataaattaagttaacaatatgattatttaaaaggattatgtcatctaataccatacttgagcatcaagattcaacttaagatgataaactccacaaatttcttcatcaatttcgaagcattttgagaactagggttatggagatggaagcagtgtcctgcctgttcttcctcaatcacctctacagttcctttccactcactcttctccaacttcgccgtgtaagccaatccttgccgccaaaacacatcttttccggcaaccgcaaccaaaaccttctcacatcccatctcggaaacatccgactcggatccaacaacattaaaccacggatcattcactccatcaacactattcgggctaacgatattttcccaaatatatgcgatcttgtttctgacttctccgtcttgtacatcgtgttcgtcgatcggttctttcccccaaaaacctggatgcaccataacaatccctttgattgtagggctaagcttctccttaccagctcttattcccatgtgatgcgatatgttggctccggcactatctccggcgataaaaactctgctgaaatcagcgtattcattaatccaatcatcagaatgagtaaagatccactgaatggcagaccatgaatcgtcgtaagcagccggaaccggatgctctggcgcaagacggtactgaaccgacacggctaggcagttagcggttataacaacctccgtgaggtagttatggtaaaccggagagaaaggagattgtatgatgtaagctccgccgtgaaagtagatgagcagaggtattttgttaccggcggtgtcgagttttctagatttgttggggagaaacatacggacggagaggttgtggtccgatgagtacatgacgtctttcgaaacgacatcgttttgtgggtttaaagacgttggtttgatgtcgttgccgctaagccgctcgactcggccgttcttatgaattcggatgaatggtagatgatgctctgtggttagatcagattccatcttctttggaaaagagagtgaataaacagaaacagagttaatctgtatgtgagtttactatatgtatgagtatacactgtttcatccaatcaaaccttgacaagtacacagcttgatatgaactggtttggttaaatttgatatgatcataagttacttatgctaacaaatcattagttatttctagcaaaatgataaaatcacaagttgcttaaccaatatcgctttctatatttggatattaatcagactagcggtggacccgatggtgtataacaaaaaactctcattacaaatgtatccagacaataacccgacctcaatccatcttgtgagtacttgtatacatatgcatgcaccagtcgttaccttcttgattctgagcctgtaattactaatagccacaaacaagattaataacattatacatctatcccattgaacccaattcaatgacaaattgaggtttgttatgatacatttatatgcataaaacgtatttgaaactaaattgtgttactgttgtcattgagcaacaaaaaaagaaagaaaaaatattagaccacaaatctcatatagtcagaacagagttattcctgtatttaattccttaaccataattatataaccaaatcaaattcaaaggttacatcaaaatttattcgtgtcacacaaagaacaatgttaaccagtgataaactccacaaatctcttcatgaagctgggagcattttcagaacttggatttaagagatggaagcaatgttcttcatcttcttcctcaatcacctccacctctcctttccacccactcttctttagcttctccgcgtaagctaatccttgccgccaaaacacatctttcccagccacctcaaccaaaaccttctcacatcccatcccggaaaaatccgacccggatccaaccacattaaaccacggatcatccgctccatcaacactattcggactcacaattttctcccaaacttctgcaactccgtctctgatctctctatcttgcacatcgtgctcatcgaccggatctttcccccaaatcgctggatgcacaatcacagtccctttgattctaggcttaagcttctctttaccagctctcatagccatgtgatgagatatattaccaccggcactatctccggcgagaaaaactttttcgaaatcagcgtatttgttaatccaatcttcttcaccagatccatcggaatgtgagaaaatccattgaatagcagaccatgtatcttcatacgcagccggaaccggatcttccggtgcacggcggtattgaaccgagacggcgaggcagttagcggatttaactacctccgtgaggaaattgtggtagattggggagaaaggggattcgtttatccaagctccgccgtggaagtagataagtagagggagtttgttaccggcggcgagttgtgttgatttgtgagggagaaagagacgaacggagaggttatgccccggtgagtagacaacgtcttttgaaacgacgtcgtttcgtgggtttagagaagccgggactgtttcggtgccggaaagacgttcgatacgaccgtctttgtaaaccctgacgaacggaggatgctcggagatgatttcagatgaagagtgtgaacaaatgcaacgaagagtggttggagttgatagtcggcgaatgttgcggcctgagacggcgatggtggtcggtgaggagtaagagcgagggagttggcgaaagaagcggagaagagagagggtgaacaagtgaagaagacaagtga

SEQ ID NO: 6118 - DNA, 1110 bp, Arabidopsis thaliana landsberg
tctgcccatattagctgttgtaacttgcaagtaatcaaaaccttacctaaagcagatatcttctttactttatgtcattattccttcaattttacataccacacaacaaaataaattaaaacggtgaaaaacaaagagaaacagaaaaaagctacgtggccactcttgttgctacgcgtcgacaaagaacaattattttcatttaaatagcaattcactactaataattaaaaaggctcactccaactccaactccaactaacaacactcttcttcattcttcttcaatcaatggaatctgaaatcgcctccgagtttcttcctttctgccggatttacaaagacggtcgtgtagaacgactcatcggcaccgataccatcccggcctctctagatccaacacacgacgtcgtttcaaaagacgttatatactcaccggagaataacctctccgttcgtctcttcctccctcacaaatcaacaaaactcaccgccggtaacaagctccctctacttatctacatccacggcggagcttggatcatcgagtcacctttctccccactctaccacaattacctcactgaagtagtcaaatccgctaactgcctggccgtctctgttcagtatcgccgtgcaccggaagatccggttccggcggcgtatgaagatgtatggtccgctattcagtggatttttgctcattctaatggatctggtcctgtagattggattaacaaacacgccgacttcggaaaagttttcctcggcggagatagcgccggcggtaacatatcgcatcacatggcgatgaaagctggtaaagagaagaagctagatctcaaaatcaaaggtattgctgttgttcatccagctttctggggaacagatccggttgatgaatacgatgtgccagataaagaaaccagaaacggaatcgcagaaatttgggagaaaatcgcgagtccgaatagtgttaatggaacggatgatccggtgtttaaacgaaacggatccgggttggatttttttgggttgggatgtgataagggtttggttggggtacctgggaaagatgtgtttgtgaggcaagggttggcttatgcggcg

SEQ ID NO: 6119 - DNA, 1986 bp, Arabidopsis thaliana landsberg
gagtttttgtctatgttttcttgctaactttgaacaaaagtctataaatctttcttgctatattctaacaggaataccgaggagtctgagaaaatggatgaagatagtagattgattgacgagctccgccagacgaatgaatatcaaaggtctcagatactaggtttagaaaaagctcttaggcagacaatggctaatcaggaggaaataaagtcgagcagtgaccttgaaatccggaagtccaagggtataattgaagacttaaatcaaaagctggcgaattgtttgagaacgatagattccaaaaatgtggagcttttgaatcttcaaactgctcttggtcagtactacgctgaaattgaagctaaggtttgtattagtcgtgaaagttgtttttcccttttagttgttagtggaaccttgatttatgtattcctgttcttataatgtttgaggaacattttgaacgagagcttgcagtggctaaagaagatgcaatgaaactctcagctcgtttgaaagtaaaaaatctctaatcttttgctttgtcaactatctgatacgtcatatggattacggactatgctatttttctgtttcttaaggatgttgatgaacagttagagtcttcaaagaaagaaaaggaggaaatcacatcgaagggattgcgcgcagaaaatattgcagcagaatggaaaaacagagtaagcaaggttgaagatgacaatgcaaaagtaaggcgtgttcttgagcagagcatgactaggctcaatagaatgtcaatggactctgattttctcgttgataggtgggccaatgacttttatttacatgttgttccatgtttcttcagattctgatcatcttgacatatcctttattcaggcgtattgttatcaagttgctggttacgtacttccaaaggaatcacagcagagaggtaagatttgtggaattaaaattccagaatctagttttttattagaacactaatattgtagaggaagtcattttgtattaaattttagcacataaagcttatgcaaaatggccttaagcttatcgttctctcatctgaatgtctctgagtaggtgttggacctaatggttcgaatgcttggattctcggaggaagaaaaacagcgaataggattggcacaacaaggagcggcaggtaaaggtgttgttagaggtgtattgggttttccgggtcgcttagtcggtggcatcttaggcggtggcggtggctcacccgattctcatccaaatatggcttcagataatcaggtatcaatagctcaaaaaaaaactcttgaggattgaaaaagtacatttgattgattgtcttgcctcttttgtttggctcagtcttttgcagacatgtgggtcgaatttctacttaaagacgcggaagagcgagagagaagagaagcagaagatgcagcaaacaaagagcaagagaaggctactgtttcttctacgcagagaccaaagtatgaacaatctgattcggagttttcaactgtgcctcttacatcatcgaatagtaatcacaggctctctagattactcacttgactcggtttggtatatacatttatacacgttttgtagaaatctaaaatccgaatctcttgcttcttgtgttgtaattatctctctcacacctatattctattaattctttttcttatatcattcaaagaaaaaaaaatctgaagctttttttttccgtgatgttttccgttatatcattaatacgtatattagttacttagaacaattgatgagtgcaattgattcatttcgtcagtggaatgattcattcttgtcttacaacaatgttacaaatttttgttaagaatccttatatgtgatttatatcttctatatttgtggaatattcaaaacgaaacaatgtctcacgtttcatgagctcaagaattctccataaaaagctgggaaaaatggtttttgaaaagaaaa

SEQ ID NO: 6120 - DNA, 3287 bp, Arabidopsis thaliana landsberg
  unsure (1)..(3287): unsure at all n locations
gatgtggatcacgctggaagcaatccgtgttttgctagaaaatatctcgaacgatctgaacgcaaacgagatgctaaatccagtggatgatccggatgtaatcgacgaccacgacgaaatgcaagggtttaacagcgacgaggattgataagttacacttagtaataacttgacgattaataaagaattaatgttacatgctttcttaattagtatattggaataaagtcgtatttgtaatagacttgggcttaaaatctcatatgcttatcatcctatcgtacttgtaataaactttgataatatacaatatataatatactatattaaaaaataatgtacttttatctctctttaacaaaaaataatatatacttttatttcctctatatacactcacacacacgtctattgtttattgtttaattaatagacttgttctttatatatatgttctattttcttatacaaatgccatgataataattattttttaattaaggatttatattaactttttgataatttgttataaaataaatatatttacaatcacaaaaaagtgtaaattatttataatctattgacccactgatttaatttcacatagaatttaacattttacatcgattcacttccatggttgaaaaagacatatatatgtgtgcagaaataatcatccgaccacaagcatataacttgcggttattgcagaaagagaatttgaaaaaaaatgagtgtttgctcatcaactccagtaccgattctctcattcacagagagagctaaatctctgacggagattcaacaagctcacgcctttatgctcaaaaccggtctttttcatgacacgttttccgcgagcaagcttgttgcttttgctgcaacaaacccagaacccaaaacagtctcttacgctcactctattctcaatcgcattgggagccctaatgggttcactcacaattccgtcatcagggcttatgctaatagctctactcctgaggttgccttaaccgtgtttcgtgaaatgcttcttggtcctgtttttcctgataagtacagcttcacgtttgtgttgaaagcttgtgctgcgttttgtgggtttgaagaaggaaggcaaattcacggtctttttatcaagagtggtttggtgactgatgtgtttgttgagaatactttggttaatgtttatggacgaagcggttactttgagattgcacgtaaagtgctcgatagaatgcctgtgagagatgctgtttcttggaattcgttgttgagtgcttatcttgagaaaggtttagtggatgaagctcgtgcgttgtttgatgagatggaggaacggaatgtggagtcttggaattttatgatttcgggttatgcggctgcggggttggttaaggaagccaaggaggttttcgattctatgccggttagagatgtggtttcttggaacgctatggtgactgcttatgcacatgtgggttgttacaacgaggttttagaggtttttaataagatgctggatgattccacagagaaaccagatggttttactcttgttagtgttttatctgcttgtgctagtcttggatctttgagtcaaggtgagtgggtacatgtttacatagacaagcatgggattgagattgaagggtttttgactacagctcttgtggatatgtattcgaagtgtgggaaaattgacaaggctcttgaagtgtttagagctacttcaaagagagatgtcagtacatggaactcgataatctcgggtttgagtgttcacggtcttggaaaagatgctttagagatcttctcggagatggtgtatgaaggttttaaaccaaatggtatcacatttattggtgttctgtcggcctgtaatcatgtgggtatgttagaccaagctcgcaaactttttgaaatgatgagtagtgtttacagggttgaacctactattgaacactatggttgtatggtggatttgcttggtcggatgggaaaaattgaggaagcagaagaacttgtgaacgagattccagcagatgaggcttccattttattagaatctcttcttggtgcctgtaagaggtttggacaattggaacaagcagagcgtatagcgaatcggttactggaattgaatctacgtgatagttcaggttatgctcagatgtcaaacttgtatgcctcagatggaaggtgggagaaggttatagacggtagaagaaacatgagagcagaaagagtaaacagaagcctggatgtagcatgactgaagttgacggagttgtccatgagttcttagctggtgaaggactaagaatcgactaaaaattggtaatttccagaaactatattaatcttattctgtcaattttatagaattgttatcagttttagtattaccaagaagcatgaagttacatcgtagaaagcttaaactatccacaaatcataatgatgaatctatatgttactattctacaccaaaattaatgaaaattaaaatcattatgcacctgctggaacacactgatgatcatgtcatgatattcatctgtattgagtctgagataacaaaccagaagctctttgagttcttctggatggttgataccattctccataatcatctcaatcattgaatctctaaaatccttctgaggatcacttgagcatttcactactgcaaagctttcgttctccattcctccatctgctgtttctatcagaagctcgtgctcccgtgctctctgtttggcctttttcaagtcttcaatagctttaactctgcatttttcagatgctcttggtgaaaaaactctaactttgttgtttccttttgttcctattctgtttagctccctttttaggtacagagatttcctctgttggtcagccttcagcttcacttctcttagtttgacttccttgagcttttcccactgatgagccggttttgttatggtatgaccaagaatcacggaatcttctctactgtaacctcctgtacctgtccttctagctggttttttcaccttgacccccgcgtcttgttctgatctctttggcttttgttcaagaagcctttggtcacgtctctcacatctctgtttatctctgttcacctgaattcttggcgtcaggatcacagttcccgttgtctctatccattgcctccacttccagaaaaccacatgtctctntttggaaatctcttactttcttcctcacactgctcattatctcttcaaacttctcattcgactctntatctgctg

SEQ ID NO: 6121 - DNA, 636 bp, Arabidopsis thaliana landsberg
acacataatgtcttttcaaccatataattaaatcgatgtaaagtgttaactcctaaataaaatcaaatcaacgggtaccaatagattttaaataatatagtaatttacacttctttttgtgattgtaaatataactattctataataaattataattttcttaaaaatataaatccttaataataataaagaattgtcatggcatttgtataagaaaatagaacatatatataaagaaaacgtctattaattaaacaataaacaatagacgtgtgtgtgagtgtatatagaggtacataatgcaacacgaaaacacttaaccaaattatcatcaaccaagttcatctcataaaccaaacgaacacgtctaataactgggaatgtttaagctaatctcctatataaacagagccagcgatgattacgtttacttatacactatcacaaacgaaaacctaagaaaaaaaaggatcgaggaaagagagcttagagcgctatggagagcaagaaaaagcaattgtttgggaacttgcgcgatctgacgaatgacgtccgtccaagtgcgtatggacaacaagacgactgcggcggagttagccgcaattgccgagaagcttctcaagtgctgcattgatg

SEQ ID NO: 6122 - DNA, 3604 bp, Arabidopsis thaliana landsberg
ttttaacaatctacgaccaaggagtagaccttgttcgggagctgacattgtaggaatcggttgagagggaaaaagaaggcaaaggcgaagtggacggggatgacccaaagggcaatggtccctgtaagctcggcaatgtcgtcactctgaccaataaacttaagaattggcgtcgcgaataagtacataggaagaagcaagatgcaacataagaatagaatgatccaatatcgttgcatatacactcccaacatgtaatattcccttgccccgaacgcttgaccgcataacgtttctaacgcactcgccatcccaagctgcacaagcatttttctcatagattaaacttcagaatatgtaacatgcataaacattataatacaatctcgaaaatatttttaattaagtgtgcacatacgagtaaaccgtagttgaagccgagtgtgaagttgttgataatggagatggcagcgagttcaagatcaccaaggtggccagcgaaggcttgagtaatgatgaggatcgagtaagtagcgagtccagtaaatatcgacggtccaacaatataccatatcttcttagtctctatccatatttctctcttcattcctccgccttcctctgccgcattatgacattccaacagtggaacggttgcttcttctattgctttagttccaccacttttcttatccatcgccaatcttatttttaaagaagtgactatatgaaaagatatgggacttgatcgatatgttaatcactttgaagaattcgagctgaattatatgtttcttgatagctagcgggtaagtagcaataaatattgttttaatttcctttagtcctctttcattaaagtcctctatattcaatttctctaaccaactattcaagggttttcttcttcttttggacagcatgataatgtcatggcttacaataacttgcttttcttcaaacttgcatcatactaggtaatggatcatatataaatgtaaaaattcaaaattttgttttgttaatctacttaggattgttggagaaaagcattgtgttttttgaaacaagaagctattgttttgatcaacagcaatacagcatgatcatgtcttagtgaaacacaaaataaagaagataaaataaaacaaaacagagtacaattaaatgaaaaggaaagatggtgccattgactagtttggtttggaaatcaatgcgatcaactttttaggtaatgattggtaatttttcaaatagacaattcggaatcgaaaaatctaggagattattaattagattgataatcatgtacaagctgttaagacgtaatgttgttaatcaataatcaacaaaagaaaataaccagtttagtatttgcatagtcaaatagatgaatttcttctaatgtagttaaggaattatattagtgttccttctaaacgataacaggacactagctagcgaggagagatatctaaaaatgcgcattaaccaaaaaaaaaaaaaaaacgccccaacattattgggctgaaatagttggtcatatcgaactaatgggcttttgtaatgctgtccagaggcttgtgttacaaactttgtttttattgaaaatgatacatacgtcgaatcaagtttagtaaaaatgtatacccactggccactggttccattttttacagaacttatttttaatggccttgttgtagtgtgtgttgttaaagcaaaaccatgtgggattatgtttaagtgaaagagtaatgaaattgatttattatcattggatttacataaacagattaattccacctcctctacacaaccatatgaagcccttccaatggtaaattacacgtgtcaacattccattagctgcaaccaagataatgattactttccccattccgacacacgaaatcatgataaaaaaaattaacgatcaaatagcgaaataccaaaataaatcaaattctcacattaacaccaaagatttgaaataattcgagggataaaaaaaaaattatataaaaaaagttctcaagccaaaacggcggcgtacataatagcggcgaaggcggttccggcgaagaaagccttgttggagaatgcggcgcttggggcaggggatgcatctgaaggtccgggagcactgcttgggctcacggtgggaccttccggtgctggtggagaggcggtgggaacatcagcaggagaaggagcaactgacggtggagtagtggcaggagctggggttgcagcaggtggtggcgtggctggggcaggggttgcagcaggtggtggggtagccactggaggaggagttgcgactggagggggagttgcgggaggaggagtggcggtgggagtaggagcaggggcttgagcgagtgctgaagtggcgaatagagccaacatcaagaaaacttggacaatcttggaacccatttctctctctttctctttggaaaatgcttcttcttcttttggtgttagagtgagggagagagattatgagagagttgtgaaggtgaggaaaaatggaagagatgtataaaaaggaggaaaaatgtgaagaattatttcgattaaattaaaacaagattcctataaatctcttttaatatattaaagataaattttgcagactaacatgcaaacgcataattgtaacatggggttgccctagcattaatatattttaagtattttttataacataaatgaatatgattagactatgcttaattacatattgaatatgattaatgaacatacatattactaggtaaattagttttacatatggaaagaaaaaatatcaaacttattaggcggatgaagtcttaacatgttattattatattgactttccttagtatacaatccataatcatgaattaacgttaacataagagctgtaaattatgattaggtgaataaacttctgacttatcgagctgtgattggatggtgaatataattggagagagaatcaaatatttgtaatgatacacgtatagttgaaaatatcaaggtaaacaaagtccatgacatggcaaatgtggggagacagctaacatgttcagttcaagaactaagagttgcaacttagcatgtctttttgtctacttgatccaccagtcttttttattcttttttcatgtacacttttattttctttagtttatggtatatattttggcaaaatattggtagtataataaagaaatgtgaaaaacttgtaataatcattaaaccatgtgcctgacctgataagatcattgaattagtttttgtgaaaattattggcgttgttaccgttgtacattgctaatagacccgttggaaagagctgtcagtggatttaaatattttgtataaatataataaggtaacagaagaaaaatgtataaaataagactttttgatagcctgtaaaggctacttcgacagtgattcagaaggtaaggtgtcattttgaaagttcttatcgatcgaatgtttatcagtgaatctgaaatcatatatagttggcatttaattgccacttgatgtgatattataacatctattctttccccaaaaagggtataaccatataaatcga

SEQ ID NO: 6123 - DNA, 2586 bp, Arabidopsis thaliana landsberg
  unsure (1)..(2586): unsure at all n locations
caacctcaagattcggggtggggccaatcttcttagtcggaatcactacattctgttgcgtataagcaatcatcatgaaattgaaacagctctcttcatcaaacacatcaacaaccgtcaagctagtcccatcaacagccacaaatcctttaggcacaatgtatttcaacaaacccttgtcagctttcaccttcacccacaaagaatcaccctctacctccattgattcaatcactcccgtcccatccacgtgtccctgaaccacgtgtccacccatcctgctcactggctgcaacgcacgctccagattcaccggagatcctttctttaactcctccaacgatgtttttctcagcgtctccggtgctaaccccactgtgaactcctctgcgttaaaccccgtcaccgttaaacaagtcccgttcacggcgatactgtcaccgagcttcacgtcctttaacaccactttcgctccgattttgaggtcgaatcttccgtgatcggccattcccaagtcctttacttcacccatttcttccacgattccagtaaacacggaccggatgctgagattttgcctccggtgatgcgttcttgaccttccacatgatgtcttgagagaaagcttcgatgacttagagacgcaatcaaatctgagattagtcactgattctccagttctgaaggattttggaagacatactttggggatgaggttgatacaatgagtacgagccgccatcatttctcaagaaccaaactggcctcacagtttctcaagaaccaaactttcgagattttaggttgtgaacaagtgaacggggcaaaactggaataaataagaagttagaggatcaaaatacaaaaatttgaaaatcggttactttgacaagcttcaaactttttgagaaagaagcaaaatgggaaggttaaatttactcttttatataaatgtttgagtttggttatatggccacatgagaggcaagaacaaaaaaagaaactgtattctcatggtctatgggaacacatttctatggactttttgtcaagaagatggcgtccagtgattcgactcaatctgcaagactgttcaatcattaatctctgaatggagtcttgttcccatgggactattccaaagtcatcgttgaaaccttccatgccttctatcagaaactgccacactagtgttcctgcaccagaccgcttccgcttggctgatttgtaaataacatcaaagatggttctgtagaaccgatcccgctgcgatggatcatagtccttgttcagattcgagaggccaaactcagtgaacagaacaggcttcttcagttccttgtccccatcttcaatgtgagatagcatccattttacaacgaacttgagtttttcttcaaacccttgatcgtgaaacctgccaaagtttccaaactttgtgtttacaaacaagatttnnnnnnnnnnnnnnnnnnnnnnnnnnnnnnnnncttaccagtgatcagggtagatatgaaccgaggcaaaatcgatgtttggcgaatcagagtttcgaacaaaatctgacccaagctcagaggcccaccgttcggggttaactgtcagctttttagggctattgggaccgtagaacccttccaagccaacggttagaagatgcttgttgtcaattgatttaatgaatgctgtcatttcgttaatccagtcctttaaatccacataccagaataacaaaccacaagagtaacattactaactttttcaacaattactaatgatccaaagctggacaagaaaaccaccaaaatgaaggagaactcacttgtagagtatccccagagacatcagacatgcagcgaggctcgtttatcaactcccatgcaaaaattgttgggtcgtttctgtactcaatcccggttaaagagtttttgcgggtcagcagcacctggcatatggaaatgagagtaattacaagctcaacatcaattacacaaccatgaaaaatcaaagcctataagtgaagaaaaactattgagcggaaacttatccaagtctaccggtcaagcgtgaacaatgtttctgaattcagtatctaattcaactatgatgattaagactaacactgtaacacatccatgttcacatagaaaagagataagattaaaaaaaacataccgtgagataattcttgaagtatctgcggatagatgggtcaaagaagaaggaatcattggaggagatgaggcatacaccttcttgccatgcccaattgacgtactgagtcttccctccataagcttgtaagttattcactaagctcagaagcaacctaacgccatgtgttttggcctctgcgattacatgatccaaagcctgaccacattatataaacttcgttaagatagagagagataagagatcagtttaaaaggaagcaggacacgcaaagaggctgaagattatcattgtctaagcttcggatcttagccttgaagtatgcattgcaaacgacgacaaatgcaggaagaagtaagtaactgaacacactcccaattccaagctataagaaacattgaattgaaaatg

SEQ ID NO: 6124 - DNA, 953 bp, Arabidopsis thaliana landsberg
catcgaggctcgtttatcaactcccaagcgaaaatcgaaggatcgtttttgtactctattcccgttacggagttcttcctggtgagcagaacctgcgaattaggaaataatcattcaatctttactcatttaacttgctctcactatcactcactatcactcaatgattaaaatgttcaatcataatcagcaagagaccattaccttgagataattcttgaagtaattgcggatagatggatcaaagaagaaggaatcattggaagaactaagaccaacaccttcttgccatgcccatttcacatactgagtcttccctccataagcttgcaagttgttcactaagctaagcaacaatctaacatcatgctttctcgcttctgcaattacatgatccaaagcctaaccaacattatacaaatcccattaaacaaggacagagagagatcaccacataactgaaattataaaaaagaggaagaatcatcaaaacctgaaagactcgctcatcgaatcggccaggagagatctgaagagcattgtagccaccgtcattgaaagcccaagttctacaaacagtgagacccattttagctccagcttcaagcatttcaccgacaaggtttctgctatgttcatcaaccgcatggtccatgaaccaatacgagttccacccatttacataaagaggcttatcatccaccacaaactgagttccgttccttttcacaaaccctaactttgctttccctttgtgattcaaccacaaatctcgaaatgatagatagatgaaagctgcacatataaaaaaacctagaattcgtagcattggcctgttccttgtgggaacatgcttctgccactcctgcttcactgcttcaacacacacacacagaaatttcaacccagaattggagaaagagctccttttttagtcggtgccaccccagaag

SEQ ID NO: 6125 - DNA, 382 bp, Arabidopsis thaliana landsberg
cggtctcaaaactgagggcgagttagcattcgtgaaacggaatgggacacagtttgtggtcgatggtaaggctctgtatgtgaatggttggaactcttattggttcatggaccatgctgtgaatgatcatagtagacaccgtgtcggagctatgcttgaagctggagctaaaatgggtctcactgtttgtagaacatgggcttttaatgatggaggctttatgctcttgagatctctcctgggagattcgatgaacgagtctttaaggtatcttttttttctttttgccgacatttttagtcttcgttcaacttattttaatcagaatgtcaacgaagatgataagatatagacttagaggggaatgccacatccaattata

SEQ ID NO: 6126 - DNA, 987 bp, Arabidopsis thaliana landsberg
accaagctgttactactactatcatcaatgtttcgagaaggctccacggtgccatttctggtttttaatttttaggaatgggcatcaggaggagcagcagcatcacctgaattcttggagaatgcaaagctcatctcacttgatacaactggttccttcttgctcggatcgaccgccgtcgcaccatttttccacttgataacagacccattggtgctagtcccacagactacctctttcacaatcagctccttggagacttcactatctctagaacctgacctccgaagttcattaccagcagccttttcatttgaatctttatcctccagcttaagtttctgaagaaagccattaatgtcagaccggttattaagctcattacgcaaagcttcctcagcttgagagaagcgattattcctaagaaactctaaaatcccatcaacagagctctggtccgtcatttacaatatacaggagaagcactggcaataaaactccaccaatcctgtacccaacaaagatgaaaacttttctctgttcagatgttgtctgatacccagaaccctctaacgaaaacaatttgaagaatctttctaccaaaagacattagaagaatcaaaatctgcccaaaaccaatactttcagtcacatttcagaaacaagttttttccggcaaaccagactcacgtttgctcatacggaacgatgcagcagatgcgaacttcaataagagcataaaaaccctaaaaatccttagaaatcatgctccaaacgcgccatcgaagagtctggagatccggagaaccagaaaaaaaaaaaaaaaaatttaagaagacaaggaggaacaagagtggatccaacgagagatgaaacttcttcaggcgcggcgaaggaggaaatgcgtttacagatcaaacgaggaagaagaagcaaggagaaaacaagaacgttgaggtttcaatggatgtaatcatttcggacatt

SEQ ID NO: 6127 - DNA, 1199 bp, Arabidopsis thaliana landsberg
tcataaataacctcgtaaatatatatacatgtttgtatataagaatttcttgataactagcataagaaaagaaaaaaaaagaaaaacttttgattcatacgaactaataattttaagaaaaagagaaaataataggaagttttttaacggcggcgacttttttttaccacgttacaaccggagaaagaattcggaattgccggaggatttgggtggacgattctctttaattttttcataattttggtggacgattcaatagttgagatttaatccgcttcactctaaaagatagctaaagctaaagcatatttattgatcatcattcatcataatagtgcaagaaaattggtcaattaagtaaagaaagacttaacaacgaaattaaagagaccaatcaatcccacacacacttgagaaaacagaaacaaatcatacatgtaaaaggaaaaaagaaaaaagaaacgaagcaaaaagctagggttttggaacttgttgttttccatcttgctcaaaagtccaagcgttttcattgcgaattgcttcttcttcttcaggtgtgaaatcattctcgatgttaaagagttctcgaacttcctctggcgtcatatcttttatgtaatctgcaatggtcttgctacagagatcaaaaagaccttggacgttgagatagttagcagccagaataatgtcgaagatcgtcttaatatcgaaatccttcatgaactttgcatcccactcattaagcttctccttcttatcctcagcttcatcatctcctttagtttgttcaggcaccgccgcatcatcggtcttcttcttcgcctcctcaactgttttatctcctttcgttgatgattcatgcgtctccaccacgtcatcatcgtcttcaacgtgtttcttgcagtactcgataaccttggcgagaatctctccggtaacgtttggaatagggattttgtttgtagcacagtcgtcttcgataatgtgtcctacgatctgcagttttcttgccaccacttcttcaaccttgaaagattcaccatcggagcttgtcaacacaatctttttcaaagacatattgtttgctttttgtgttaaacgaaaaacaagagtcgatttatagaaccctaagattcagtcaattgtgttttccttttcacaattagatattgggtttcatgttggttccttttctc

SEQ ID NO: 6128 - DNA, 2441 bp, Arabidopsis thaliana landsberg
  unsure (1)..(2441): unsure at all n locations
gttgcatcccgataccggtccaaggaaggaactacgtattgtgatccctcaatgtttagcatgtcttgttgctagtatgcaaattctttctttatatgcttaggatttaactttcagcttttattgtccatcaaaacaattctctcaatattatgactattgctctttagtaaatactttaatgaatctaaagttagaatctactcaaaagcctctcatgtaacatctttgtcttggaattactatctatcagtttccttcgaattgagctgaagatatgtaacaagcccagttttttcctttttcgctttacactaatcaaaatttggattctatgtgaaatattttgtttgtaccaattatgagttgttttggttggagtgtcacacttttctcctgtggacttgagtttcttcttcacttttaatacgtgcaaattcaatcatggctcccttatttagatttaaggcattgactaattctacttttatactatgaggatatgatagtatctaaccaatggaaacccaaaattatgagctcatttggctctgcagataagctcctcacaagattagacaattctgctggagaacaattggaaatgcaaactctatagtaaatcattggtcaaccaaattggaagctcatctatagtaattttctctatttacttcagtgaaaaatcttttacaaaaagcatgaaaggttaagttatatacattcgaaaactgattcctttcgtgaacaatcaaacacacattcactctacaggtttcatcacataatctcttaccgccctaggatcatagaatgggtcatctcattgacagtgatcaacctcttagacggtgattcatcaactaccgtgtgaaatgcaaatgtgggttgttttggtgatggaagatctgatgttgtggtgagcatggacagcaactcaagtgtgttgggtctgtctgcaggttggtgttgtacacagagcaagccgatttgaatacatctcccaacttctaatgggtgacatgaatcagcaagatcttggtccaaaagatcaattcctctgtattcagaccaagattcccacgcctgttgtgatttcagaccaagcgaatataagagcaatacatgttttcaaacagtcagcgagatctgcgcacttaatgagaatcaaatacaagatcttactgtgtcaatgcctataaatcttacttacatatgcaataagggtttttccttctacgccatagctgaatcttgagatcttctctccactgatgatttctaacattagaactccgaagctgtagatgtcagatttctcagagaacatcccagtccatgcatactctggagacatatatcctctgcacatatatcaaatagtttctcccaagttaatatctgatattaacttttaatcttagttaatcatgtctttgaaattagattcttacagagttcctacaaccctgcgagtgttgtcctgatattcggtcccctgatacatccgagccaatccaaaatctgatatttttgggttcattttctcatccagaaggnnnnnnnnnnnnnnnnnnnnnnnnnnnnnnactctgaggcgtgagtcatggtggagatagagaagtccacgtgcaataccttgaatgatatcaaatctttttggccaatcaatctccagcctttttcttgaatctaagaaataaaactgtcagacaaacagtttccacatatatataaaaagttactgaatagtaaaggaaggatgcaagaagggaccaaccaaagagaaaagtatcaaggcttttgttcaccataaactcatagatcagtagcttctcttctccttcgatgcaacatcccaaaatccgaactaagtttttatgttggagttttgagatgagtactatttcattcatgaactcctctttgccctggcccgagctgctagaaagcctttttacagcaatttctttcccatcttgcagctttccctggaagaatagttgcacatagtcatctccagaagaagaaaatacagaataggaaaacaagaaaaggtaaatagaacagaatgatacattaccttatacactggaccaaatccaccttgcccaagtttatttgaggaactgaagttattggtggcagtacgtatagtatgcatatcaaataaatttacgcctgagacatcttgtggttccatatccttcgcccatgcatcttgtgaactgtggatgaacataggatttggttctacgagtaacaagtgtgcatgtattagtgcttaatttgtagcagtttattagcataagcattgactttcaatagaagcgaacatattaaccgttaggacatctagctttaaactgaccatatagacttcccccaagaactgtcaacctgagactgtaccttgggacacaatttaagaattctagaaa

SEQ ID NO: 6129 - DNA, 535 bp, Arabidopsis thaliana landsberg
  unsure (1)..(535): unsure at all n locations
tggtctgagttgggggactgttgcagattacatcaaagataagacgccagaggaagttcgagaactctttaatatcgagaatgatttcacacatgaagaagaagaagaagcgattcgcaaggagaacgcttgggcttttgaggctgacacaaaacacgaagatccaaagccctagttttttttaaaaccctagctttgtgtttcgctgtgttgtttcttttttctttttcctttttcatatgatttgatgaatgatttgtttccgttttctcaagtgtgatattgacttttggtctctttaatttcgttgttaattttctataattgaccaatgtttttccgttgttaatgttcctcctttattcttctttgccactccaaatctctagaagagcttttgcttgatagtcaagttttgccagatggatcccgccagaactcgaaatttctgtctttttaagtttttaaaatccatcagatcatctcaagaactaagcacatanatacctcacactctattacatgaagagcaaac

SEQ ID NO: 6130 - DNA, 3354 bp, Arabidopsis thaliana landsberg
  unsure (1)..(3354): unsure at all n locations
gatccatgagatcaggtaaaggtacagtatatgagatataaattttttggttcatcgatgtagttgcagtcattgggacagatgtgtaaagccgatcacttcaaccgtgggaaaagttataactcaaagagtcaaagacaactagaaacggcaagcctttccaatattaaaaaacctcagaagtactacataatgtaataagcaaaagatgtacctcatccttagctccagagaatgatttggcaagtgcattcacttcaacgaccttttgtgcagcaaatgcaagccaagattttagttctttatcaagtttcatttcattcactaagtccacagcagtatggagtagagagcaagaagtagaaaccacaactttttctgcaaagagaagagaaaggtttacatcaatctgaagctagataggaaaaagaagtgaaagcaatcaactgaaactttgtttactgacaccttttccaacaatgtcttcaagagtctgtagtgtcttgagtgacgcagaaagatcattcgcccaaatgttccttccatcaacaactccagcaaatagtagcttcccacgaggaaaattcatcttgattaaatcaagagtctccaatccacgaacgaggtcaaatccaaacccagtaacacatttcaaagacatcaatgtcttgtacgcttcagcaggaacatctgcaaagtatgtggcaataagaacattcaagcctgccaaagatgactccatgtgagagtacgcatcggaaaatgcctgcaattggctggtgtcaagatccatcacaagtataggctcatcgaactgaatccatcgtgcaccagcagacttgagatcagccaaaacttctctgccaaaataaatgccacataaaccagttatggtttcgagcactatccaaatgaaattgtatcttttgaatttattttggtctagctaatttctaaaagcgtcacagttggcgtaatattattcttacttgtagacaggaagaatcttgtcaatcagagaaagaaggcagaatgatttttcaacaccctttgctggttttgacaggagcaagtaggtcatgggaccaatgagcacaggaactgtgtctatgccaagctgtgccatgaacagccaaaaacacagctgtgaataagaaccttgggataaaaagaggaaagctgaagagaatagcaataccatcaattatctatatgccagtatcagctcaactaaaagttattccgagaaactaagtgaaaagggttccagtcgtcaacttactgctttcgcctccttaaattcaaccacagccttgtgagatgcataggagaaattgacgtcaggacccaactcangaacaantgtatggctgttagagcatttattagcaataataactgagaaagaaacttaacaaagagggaagaaagaagattcagttacttactagttggtatcaaaccacttggtcatttccatagcatgagcagaagcatttccccgtgccatggagaagtaaacatcaaacccaatctcaccactttcccaaccatatctagagggaacagcaccaagcatcgctgtggtatccaacatctgatcatagtatgaaaaagtattgctgggaatatatttgattccagcatgagccatatgtttccaaatcgattttctcagattagcagcaacattttgcaaatcatcaacattgcttttcccatcccagaaggactccaatgcaaacttaagctctctcttcggtccaatacgaggatacccaacgatgtgggatgacattgctctattttgttttcacaaacaacaacaggattagtggaaaattcatgaatctaacaaataatacaacacagcatcaatacatttttcgaatgcttatgcaaattgcaaatggaggatgaaaaacaacctatggtacaaaatcgatactgcaaacaaacaagagaaaccataacaggattaggttgaatagtgaaaccataacgaaagtaaatagagttgcaaatacaccaacaagagagatagaatcatccgagggaaatagaagaaaacctggcgacgtaaaatcgggggcggcgagaggcggttgcgcaagggagggacggagtagctgaagacggtggcgggagagaaggagggcgtcttggaagcgaagctaacggctggagtctctgaagagcgagctgacccatttttatagctttggtttcaaactgagctcctatttctgttcactatccgggaaaagaggagactctctactatttcatttcgtttcccaggttttaattaaggtaaaccaaaccgaaaattcgtaaaccaaaccgaaaatgaatgtttaatcaaattgttgatattttctgttatttggcttatacaaagtatttttctcatcaagggatatgcatattattacaaaaaagtagaaccttattacaaaaactacatttcgcaccatatatagtatttgggtttcgtgtaactaactcagcaaacacaaaacttgtcaaaagttttacagtcacaacagtgcagaggaaaatcacttggggctttgtggagaagctggagagttttagtgagtacaagaacatccagcctcttctttcttctctcccgtctcataggctgacttatagctttggtcccatgtatcagtcggtagggtggcttctgcgtgaggtatgtgcttcggatgtttctctctcttgtctcctttgatctgcttcagtgcgtgtttcaatgcaggtaacagagcctccatacactcggccactgcgtttgggtttccaggcatgttgattatctggggaaaccaaaaacatggaaacgtgagtgatgatggcaacttagatattatactaatgtgaagttagagatttgtaccaatgttgagcctctaattcctgccgcagagcgcgagagcatcgcaaatggagtgatctgtcacagagaaaaaaggacacggaatcagatgactgctcaccaccattcttttccattatgaagaaaagcaacaatgttcaatccaggtctggttattcagttttagaaaatagtgacctaatttggtttcaggattttgcatattagagaaagaagaactattccccctgtattgaagctcaattttttcaattggatgggtttggtttataagattaaatatcagtagagttaagaggtaagtaataaacctttaagctctcttgcatcataacaaagaggagaccgggtgttctctctcgatcacatttttcgatgcccagcgcgttacatatcttggagtgaagccagtaccacctaattccaagatgttaactatatcaaaaata

SEQ ID NO: 6131 - DNA, 3264 bp, Arabidopsis thaliana landsberg
agcccagtaactaagaacaataaagtttttgagactgaggcccaatgggcttttaattgacgaccattgggtttgtttatagtgaaccgcggagcacaggatcatttatctactttatttgtttcatctgtcactcactgttaaggaaggtcttgctgcgctaagaaagaaaagaagaagaaagatgccaggagcaattgtggaggaagagaaatctcagattgaatccatcaaagagcaattgaaactcgaggttcgtctttttttttcttttcctccgagcgattttgtttccgatttgttgttgtcgtctaatttgataatggtttctggtggaaacagaaggaagatgatgttgttgtggaggatgtgaaagacggagaggaagaagacgatgatgaagacgatgaggacgtcgaaggtaatgtactctctctttcatttcattttccttactctctctttcatttcattttccttccggtttgatttatttcggttaaccggaatttactcgtttgattctgattcatgctttgatttcgagtggtctatgtatgtttctagaaacgttagtgtatagataagatttgtcttttaggtttgtagaaaatcagaaaattgttgaacttgaggttcataagccctagattaagcttgagctatagctcttaaatgtgaatttgtttctctatggaacactaaaaagagaaacctttgttaatttcgggttttgtttcaatgttttggctgtgtagttgaaggggaaggtggaaatgagaatgcaaagcaaagtagaagcgagaagaaaagtcgcaaagctgttctaaagcttggcatgaaacctgtctcagatgtccgcagagtgacaatcaaaagagccaagaatgtaaacaaatcttctaacaatcaataaactctcatgtctctggttataagtaacataggtttgatgattgtggaaaatattgcatctatgtcaggtgttatttgtcatctcgaagccagatgtttacaagagtcccaatgcagagacttacgtcatttttggagaggccaaggtcgacgatttgagctctcagctacagactcaagctgctcagaggtttaagatgcctgatgtgacatccatgctacctaacgccggttctgaagctaccatggctccactagcagaggaagaagacgaagacgatgttgatgacactggtgttgaagccagagacattgatcttgtcatgacccaagcaggtgtctccaaggccaaagccgtcagtgctctaaaggctaatgatggggatatcgtttcagccattatggaactcactacatagagttgagtagtagagccacctaaattgtgcttttgtttcattgtttcttgtctcagctaccattttctttgaacattattaattatgtctccccttgatttgaagtcattatctgtctactctgatcaaagtatttaatttgcggtcattataggcactatataacaaaagtgtgatgacgtagtagttaacaaaagagtaacagtggtttgtttatacatctcttaatcaaagagtcaggaccataacaagaaaacattacaatcttcagcaatcaataggctccacgtccaaacatttcccaggttctgataagaaaaaagaccaatttattcagtagtgattctgagaaatagtatcagtgttcattctcttgaatcgacatgaccataagtaaaataaagggtaacttgtagaaaggagtaccaacttcatctttctgcacaattagtcatgtgtcagccacttcttaggaaaatgatttgtatgccttatctagtctccatccagaaattggagatcttgaggctgttctttgatattttacatgccaacctgcaaaatcaaaaaaaatcttgggcaagccttaccaatctgacatgtcattgcccttcaaagtatttttagaggggatggatgatttgatgtcacctttctaatatcttcaaggatatgggttcgaaagagaagtctcgtagaccatcaaacacctgtctgcttcagccttcagccataagcttttatagaacagtgcattttggttaatctgctccacaccttgatgctgttggtaaccatttgtaggcacaacctgcccacatgatcaaactgacggtctacctcctactaaacgccaattatcacagcataggtatggagaaaaaaaacatacctgaccaaagccgttatcttcggttgcaccatattgatacgaacgagaacctgggacagtctcccttgaaaccacagagtacttatccttccttttcacatcaaggtcgacagtcatattgtttgccgttggaaactgatggtctctaatcgatagctaatagacaggatttggaatcatggtgacccattaacaaaaggaagaggtgacccattaaaacaatatcattttggtaaattctacaagacatgatagtatatttttcttattgaccttgaataaaatatgttctaggcgaatgtaatgggcttccaagtataatgaaatctcatgtggcttaagctagcaatttataggcatagaaacagttagaacaacataccttactcttgttaggtaacagctttagatcatatgaattgtattgtgcaacgctttgattcccagcatgttcctgactgttgttttggatgtacaaattgagattctgtacagtactgttaatgagatcaagctcttccgcattcggtgaatctgaagattctgaaccatgtgcaagtgttagtaactctgacagcccatgcatcgttgtaagtagtttcttcacatccatttttggagatgggccaggtaaagctttcatatcgcttgtagatgaactcgctgcagtttctacaacatgaaatggaagatgatgcttaaaatctctattaccctttactgaaaatgtagggtttggctccaccgcaatccacttagtagacccaaagttactgtctgcctttggagttataagtgaagaaccgccatgtgacatgttgggaagaaaacgctccacatttactgaggattgtgctaagtctgcatctactacattatggtcctccctataacgagctggaatgtataaaccgctagtattcaccactagcgataaatcatctgcagcttggtttttaccatagccatatggcttttgtttagcatctgcaagagagaactgacgggccaatggattcaatctccgctgacccgaag

SEQ ID NO: 6132 - DNA, 3455 bp, Arabidopsis thaliana landsberg
cgctgatcggaatgtgttcttatagtctctctactataatgtaatgggacataggttgggtgtagttgcccatccttatttgttgtctgaataaactctcacctatatttatttatatatataagtgcaacggttctactatttccagaaagaaattttgatggttcatgtttccttctactcttttattttgctcttaagaggctttatcgacatataatataaattcaaacgctgctgcaattctaacggatataaatcatccaataaaatctcagaaataaaaacgagtaacgaattttgagatttgcaagaatctcaaaagatgtcatactaaaaaattcttcgatatccaattaaagactcgattatacggacttgctttggagaatccacaccaacactcaattcgattacctcgaaaacaaaagtagtttaacttttgataccatctcaaataatactaaacaagttcttgatatacatttattcccaatgggtgaaaaaggccacttttctccatgtgtctctatcattactatcaagtatcaaccctttttcactttatagaattaggcatttctcacgatcagttcctccttccaattattattctgtaacttttgaagtcatttctactccctaatgttacgcgttaaacatttattttaaaaaaaagatctaagattttttccaattattccttcaaatttggtatttaattcgtgtaatgaagacaccagatttttccaagtacggttacatatataaactggggagttttctttgtgtaggctgattaaagagacccaagtgcctcctacgctattcttcattttctccggtgaccaatccttttctttttcttctcctctccgtccttaaatagttatacaggagcagggcttgttccttgatcaccaagaaatcgctttgacccctatctcctcttctgcaactcttttttatcagttttccacaacacaatatctatgcctccgacctactttcctctccgttgggagagcaccggcgatcagtggtggtacgctactcccattgattatgctgccgccaacagccagtacgacctagtccgtgagcttctccgaatcgactccaataacctcattaagctcacttccctccgcagaattcgccgcctcgaaaccgtctgggacgacgattcccagttccacgacgtcgccgcttgcagatcacgcgtcgccagaaaacttctcgccgcctgcgacgaaggcggctcgccgggatccaagaggaacactcttatccgctctgggtatggtggctggctgatttacacggcagcctctgccggagatctagcgtttgttcacgatctcctggagagaaatcccctgttagtgttcggcgaaggagagtacggcgtcactgatatactctacgcagctgccagaagtaaaaacgacgacgttttccgtctcatttatgattttgcggttactccgaggtttggaacaggtggcatcgagcagcaaaccggagagattccggcggcttacaaatgggagatgaagaacagagcggttcactctgcttcgagaggaggcaatctgatccttctcaaagaacttctctccgattgttctgttgaacatgtcttggccttccgagacaaacagggctccactatcctccacgcagccgccggaaaaggacaaactcaggtaagtgtctccggccactgctataactaaaatatcaatcgatagatgaacaaaattacggatcttggtgattatgatgcaggtggttaaagagcttgtggcttcatcataccatttagttgacgctgtggacaaccaagggaacacggctttgcacgttgcagcttaccgtggccacgctgatcttgtggatgttctcatctcggcatctccatctttgatctccgccagaaacaacgccggagatactttccttcacgccggaatctccggtttccagactcctgcgttcgaaaggcttgacaagcatacggagctcatgaaccgtctgatcacttccgcagcctcgaaatcccaaggggattttgtaaattataggaacaatgagggacgcacggctcttcacttggccatctctgggaatgttcctctggagttcgttgagatgcttatgtctgtgaaatccattgatataaacatacgtgacaacgctggtatgactccgcttgatctgatcaggcagaagccgctgtctccaacgtctgatctcctgttccgacgactcgtatcagccggagggatgttcagttgtcgtgatcaaagcatcacaagtgtcgtcgcgtctcacttgaaggacagaggaaacttttacagccctggagctcgtttcaagacatcggacgctgagatgttcctaagcaccagacttgaagttgcgcctgaaaagattggtgttgttgtccctagacacgtgagatccagttcctgttgcattgagattggtcagctaaacgtgatggatgagaatcatcatctcaagaaatgcagaaacgcgtctgttaactctacaacagagagattgaagagcgttttccactggccgcgagtcaagaaacaacctggccattccaagaacaattctgatattagcatcatttcgacaacacttgagacgcaagaaactcctgtccctctccgtcagagattctcaaaaagcagcacttcttcccttgatccgcctaataacaataaaagaacgttggcggtaagaagtaaccagtctagtcccagagccaagaagaaacggtttgggtcggtgcggtcacggtcgagctcattctcgaaaatatccatccactcttcttccacttcttcgacttcgagcatggttgatcttaaacagaagggagtgctgattgatacgagcatagccggaccatctggattgaaacggtcagagccggtgaaaaataaggtaagcgagaagcagggttcggtgaggagtagattgaagagccattacttctgctttggtacttcagctttgtcagtgaaaacgccggctactgtcttggtataaaccaggttattgggtatagaacaaaaccggtttgtatttagtttggtcttctaaggtctcttatgaaataatgaaatttgttgggttatttcaagccacgcgccaacgatgggcgtatgtatttgtaccagggtggcacccactagctgacttggtcatggatcttactttgatcaatcttcctatcattgacttgaagaaatgttttacattgaaaccgtttgttttgttacacggcaaacgtaacaagacaaatcagactaataaaaactttcatttaaaaaataactttcatatgcaattagaataaacaataatcagaattacagaaattgtccaatagtgacataaaatcaatatacaatagcttaaccaatggagtcatt

SEQ ID NO: 6133 - DNA, 3311 bp, Arabidopsis thaliana landsberg
cgcctgctcgcaaacatctccgctcgccacccggggctcgctcggctcggaacggagaagatcgacctcggttcgaggagcccccacgtcgccctgcctagggcacaggcccgccacgtcaacaggaagcgccatcatcatcctaccccgagccgactcgggtcacggagaacaagaccgacgtcccatccggccagctccaccggatgggcaatgatggcgccccacgagctctgtgacgacggcggcccccagctctcttacggaagcagggcgacgtcagcaaggactcgaccgctccaacagctgtccctccgccaggctccgtcgcacctccgacagccacgacatcacgccagcaaggtgccaagacctctccggctgccacattggcatgtacctagggcgctagctctctctccgctagacacgtagcactctgctacaccccccattgtacacctggatcctctccttacgactataaaagggaggaccagggccttcttaaagaaggttggccgcgcgggaccgaggacgggacaggcgctctcttggggccgctcgcttccctcacccgcgtggacgcttgtaacccccctactgcaagcgcacccgacctgggcgcgggacgaacacgaaggccgcgggacttccacctctctcacgcccgtctccggccacctcgcctctccccccttcgcgctcgcccacgcgctcgacccatctgggctggggcacgcagcacactcactcgtcggcttagggaccccccggtctcgaaacgccgacagttggcgcgccaggtaggggcacgctgcgtgttgacgagcagtttcccgtcaagttccagatgggcagtctccaacaacctctccaacccgggacggtgctccgtttcggggctctcgagttcatgtccttcgacggcagctacgacatgatacttcttccgccaccgtgcgaccacgacaatggcggccgacaacccgcccgccggcgcgaactcgacgacgtcttccccgcgtggtggaagagcaacattcgggctcgctccgttctctcccccgccaacggaggaggaggcggggccgtcaaggcaggcgggaggccgcgcttcgtcggccgtcgagtgaatcgacgcccccgacgccccgacggaaggcacgccggacgtcgacctcgcgttcaagacggaggcaagcgccgtccccccgcggcacgctgaccccgagcaagaagacgacgccggcgcgctcgcggaaagcctgcaggacgtcgccctcgaaccagagatgacggtgcaaccagtccccgatgtgactacgtcgctcctcgtcgaccaaaaggtaccgactaactcccatcttgcgtcatttcgactcggcctcaacccgccaaacgacctcgttttggcggacgctctcattgaggcgagtgcaaccccactggggtttcgtatgcggtccccttgggaccggctgacggacgtctcgacctacgggccctctgggtccgaggaagatgacgatcccagcatctgttgggatttctccggacttggcaaccccagtgtcatgcgggacttcatgaccgcatgtgactactgcctatccgactgttccgacggaagccacagccttggcgacgagagctcaggcccaagccgcgaatgtttccacatcgagctagggatccctccaaaggcaaccatctcggcatgccggaggacggtgatcttcctaggccggtgcctcgcgccgacatcccacgggagctagctgtggtaccgctccggcgggggttacgacccacaactcgagcaagtccgcgaggcgcaggccaggctcaacgagggaacaggagcgcttgagccggaccgtcgggacgtcgggcaggtatgggcatgccaacccctggccggagaaatacgtcacctgccccaaggtctccagcaccacgtcgccaatgatgccagggtcaggccgccgcccgcatccagcggggttggtcagaacctggcagccgcagcgatgctcctccgcgcgatgccggagccatcaaccaccgagggtcggcgaatccagggagagctcaagaatctcctggaaggcgctgcgatccgacgggccgagagctctgcctcccaaaggcagggatacccctcggaacctcatgccgcgacttcccgattcatacgggaagcctcggtctacaccgggcgcacgcgcaacaccgcgctgcgccccgggccacctcggcaacgagcaccatcaccgcgaccgtcgggcccacctcgacgaaagggtgcgccgaggctaccaccccaggcgtgggggacgctacgacagcggggaggatcggagtccctcgcccgaaccacccggtccgcaggccttcagccgggccatacgacgggcgccgttctcgacccggttccgacccccgactactatcacaaagtactcgggggagatgagaccggaactgtggctcgcgaactaccgtctggcctgccaactgggtggaatggacgatgacaaccccgaccgcgtgccgagcccggggaaatacccgctcgtggtcgaccccgtcatcggcaacgtcaggctcaccaaggtcctcatggacggaggcagcaacctcaacatcatctacgctgagaccctcgggctcctgcgtgtcgatctatccttggtccgggcaggactgcgcctttccacggcatcatccccgggaaacgcgtccagcccctcggacaactcgatctacctgtctgcttcgggactccctccaacttccgaaggaaaccctcacgttcgaggtggtcgggttccgaggtacctaccacacggtgttggggaggccatgctacaccaagttcatggccgtccccaactacacctatctcaagctcaagatgccgggccccgacggggtcatcaccgtcggccccacgtaccgacacgcgtacgaatgcgacgtggagtgcgtggagtacgccgaggccctcgccgaatccgaggccctcatcgccgacccggagagcttctctaaggaggcgccagacgtgaagcaccatgccggcaacttcgagccagcggagacggttaaatccgtccctctcgaccccagcaacgacgcctccaagcagatccggatcggctccgagctcgatcccaaataggaagcagtgctcgtcgactttctccgcgcaaacgccgacgttttcacgtggagtcctcggacatgcccggcataccgagggatgtcgcgagcatcgctggatatcgagctggggccgaccgtga

SEQ ID NO: 6134 - DNA, 1991 bp, Arabidopsis thaliana landsberg
aatccaaactgattattgaaatatgaggaacaacgaaattttgaacatatatagcatgttattgttatggtcctaataatgactgatttgcttgaagaacttatttgttactattccaacttattacatacatgtgtgttgatagatacatacatggataagaaaagtgtacatccatatgtttatctcaaatcttatttgcaagagcctcatgaagaagatatattgttgacttctttttgtaaacacaaggagacagagaaatagaaatgcctgccttttcttctgatttgttcgcattttttaaatagattttgggaataacaataatcttacaattattcgcatttgattttaaaaatatatagttcgtgcagccatcaacattacatcaaaccctttagttgcatttatcttatacacttcatggtctccatgttattctctctttttctgtttccagttttctctttcttctcattatttcccatttcttcaaactttacaatattaatcacttttataatctgttttaaatctataatacatatatgtgggggaaggttagagaaatgtgaggcacacaaacatgagaactatgagatatgtactccattttgcatatttaattattaacttaaagagtagtttaattgtctatattaagagaagaaattcagaaacctaaaacctgaaagaaaaaaaatccagttatctccttccatttttttaggagactcttccgcgcttcggatcccaacggttttggtgtagatttttcttgatctgggttttgttacatctttgacgaaaataaaacatatcaacgtgatgagataaagggaaaccctatgggtttcttgtgaaaggggcaaccattgtttatgaaggattctaaggtttgttcttcgttctgcattttttttaccaatccacatatgttttcctgatatttatctgaaaatgtgtttcttttgttcttgtcaacgcaggcattaattaattgaacaaaacgattcgaacaagacccattttttggtcttaatttgtggtcctcagactctgttttgtacaagtttcttcggactttgaatccaattcgccgtggtttgaaataagtttatgtctatataatcacaagaagaaggggaaaaaaaaaaggagagattcagacaacagctaccggagaaatgaattgcttttcatgtttttatttccatgaaaagaaaaaggttccaagagattcagacaacagctaccggagaaatggggaggtgaccggtagagacaacaacaaaacacaccctggtaagctcaaaacatctatattaatttttacagataagtcttatatatattagggtttataagactagattcagtaatctttgtgatgtttacagagaatccaaagactgtaaatgagcagaacaagaacaatgatgaagacaaagaagtgacaaacaacattgctgctcaaacattcagcttcagggagctagctactgcaactaagaatttcagacaagaatgtctgatcggtgaaggcggctttggaagggtttacaaaggcaaactcgagaaaaccggcatggttagtatatacttttgtacatcactttgaaacatgaatatggtatatgatttatagcattctatatctctctacaacaaatctctgaagatttttcgaatggttattttgggttcagattgtggcagtgaagcaattagatagaaatggattgcaagggaacaaagagttcatagtagaggtcttgatgttaagtcttttgcatcacaagcatctcgtgaatctcattgggtattgtgctgatggagatcagagacttctcgtctatgagtacatgtctcgcggttcactcgaagatcatcttctcggtaaattacaaaactaaagatccgcattgactaactttgaatcagtccttatgtttaacctgttttttgaatgcttaccgatctacacc

SEQ ID NO: 6135 - DNA, 1986 bp, Arabidopsis thaliana landsberg
  unsure (1)..(1986): unsure at all n locations
tattcgtctttaactctctaccaatgattcttcacccaaatttaaccatccatttatcaagatgagcaggatacataacataggcagtcaaacataagggaaagattctaagtggcaaactcatttttgtttgttccttctttcttttgaggccaaaagagaccagattcatttttggtttcttcaaaggccaaaccttattttctcagacaaaccttttgccatattacaaaataaaatctgttcgtctgagaattatcttgatcccttttggattcgaggttcaagaacattcatgaacttcgagtaaaacaatcatcttcttgtagtaataatccaggaagatacattatcaacacacataaaacagaatgaaaatcaattgcttgttctgttgtatgtcccacagacgatttaacagacgatcatcatcgagacaaagcatcaaagactgcattgatgcaaagaacaatataactacatttgacaacatctcttttaaaacaggtcccattttctaacctttttcattatatgcattctcaaatcccttaaaagcttttctttctaaaagaagcgaggcgtatttgcacatacctgcagatagcagtaggcgaagatacatatccgaggagatagcaaaactcggtaaagggaacatcagtgctcatatctttacattcagagagctttgcgtcgctaccaagaacttcaaccctgataatcagctcggtgaaggcgggtttggaagggtttacaaagggcagatagaaaccccggaacaagtacttataacattctctcatacaacatctatccaccatattctgttcagtggtttgattctgattcttgcgtgtttaggttgttgcggttaagcagctagacaggaatggttaccaagggaacagagagtttcttgtggaagtcatgatgttgagtctcttacatcatcaaaaccttgtcaatttggtcggatattgtgcagacggcgatcaacggattcttgtctatgaatatatgcaaaatggctctttagaggatcatcttctaggtaacatatatctaaacaccatcacaacatactttcacatccacacattctaaagatttaccttttttatacttcagaattggcgcggaacaagaagaagccgttggattgggacacaagaatgaaagttgcagcaggagcagctagagggcttgagtatctacacgaaacagctgatcctcctgttatctacagagacttcaaggcctcaaatatattgcttgacgaagaattcaacccaaagctttcggatttcggtttagctaaggttggtccgaccggtggagagactcatgtgtcaacgagagtgatgggaacatacggctattgtgcgcctgagtatgctctcacaggacagctcactgtgaaatccgatgtatacagcttcggagtcgtgttcttggagatgatcacaggaagaagagtcattgacacaacaaaaccaactgaagaacagaacttagtcacttgggtacgcaaaagttcttcaatctgaacaaaaccattgattggttttcttaatttggttttgctaaaatgcgcaggcgagtccattgttcaaagataggagaaagttcacgttaatggcagatccattgcttgaaggaaagtatccaataaaaggattgtatcaagcgcttgcagtagcagcaatgtgtcttcaagaagaagcagcaacgagaccaatgatgagtgatgtagtcactgcgcttgagtacttagccatgaccaaaaccgaagaagatggacaaactgtagaaggagaagaagaaaaagaagaagacgaaagatccaaactttgagcaaatttttttgtttgttttcgtttggaatttataaataatcggttttaggaatattgataactttacgaattcaccaatganaaagaagataaatgagagtttcgtgtccccatcaacatttaaaga

SEQ ID NO: 6136 - DNA, 2539 bp, Arabidopsis thaliana landsberg
gttctctacacaaaaaagaaaaatagggtacgagcctgtgttttaaagatactgtagttttcaaagacaacaagaagaaataaatagttacaaacaacctgtgaagaatctaaagcaaatacattggtaaagttactgctttaatccaaacattgatttggcttttacacataagatattcttgtgaagaagagtgaatagtaaacgtatataaaacaaccagattttacatttaaaagaaggatggaaaaaacaagaaaaacaaaattcaaaccaaaaatgaaacaaaaatctaacaaatgtagagagatacagagaagagtagtgattgttgtattcctatgttttatataagcaacgaacaagaagagagaacgagataagagatatcatttgcaacccataagcatggagttgatcacgtgcattatcagtctgatggctgagacatcgctgcccggtgcgttgcggtgatggtgcagaatctgatatacctgttcaaagattggccgagcgtggaccgcaatcatctggtctgatgggtttatggctgcaaccacatcagtcatccaagccagcttacgggatgtgtccttgctaatgtcacaggctagctgctgcagcagtgaaagaagcacgccttggctcagtggaagcggattcatcgccagtaatccacgtagatccacctgtattggcacaatcaatctcatgggatcttatgtataactgatgggttatgtatgagatcttatgatgcacaaaatccaaacaaaaatttcacctgtgagcaaagccatgatactatagagacatcgcttctctgtagggccgaagtgaaagattcttcgtacttccgttcagatatcaacctcgatagttctgttgttgggtccataggtgcttcaacctgaaaggacatatgttgcgatagtcaaaactcagaaaatgacatcagattaggattcggataagagcagaaatggttctctaattatatgctctctgactcaattacaaaagatgaacagagaataaacttaagccaagaaccaaagatagagaaccctaggggtgagcaccataaactctcctaagcccaaggcagatcctagaccaatccagaatgctcaattcttctgcctaaacttccttctaagctgttagttctcttctctagttaaccgcctcaactatgattgctaagcagcgaaaaagccaccaagagtaactaaaatgctcatgcactaaacaaacacaagatttatggttagtgattagttctagagatgtgcaaaccttttcaagaagagcacccaaaggtccgccacttagttgagtaaccaaggaattagacccaccagaatttgctccagcagctgcgagagctaagagattcctttgggtctcggctaactcacgacttaaggcttgagcaactgacgacgcagaagtaattgattcctgtaaaacgagcaagcagctttagagagaagaaagaaatgattggattttgcaaccataacagagctgtaagaagaatgattttccatcgtacctttagagtatgagcaagctgggagtgtccagagtcaaaccgttgctgggctgcatttgtatgctcagcaatacctttctggaaggctgagtctatttggtcaaacatggccttgcatgccttctcaaaggaaggtatgactgaggactccacacttgacctaagaccttcctgaagtttataaacggcaggaaatatatataagagataacctccctttccgttaaactatgtatgcagttggagacttatagacacttctataaactaccacaaagctaggtgaacctcaagtttacctggagggcttgcttgccagaggtctgaaattgggcttgaatttgcctagctacggttgcttcaagctttatattaacagatttttcaagctgattaactgctttgtcacctattcctctctgtacaaaagagaaagcagctttcttttaagaacaatgaaccttctcaaaaattagctctaaatttctcgtaaaatcttacctgaaaggactctgtgattgcagaagatacagttttttcaataactggtactactgaacgtgctagggctggaccaattgcagccaattctttctttatcgttttctcaaacatggcatttaactccttgctcatgaagtttgtcgttgcattcacaatttgctgggcatggtcacgtaatgccttttcattcttaacagtctcctcctggatgcgggcccatagagcatcagcatttgacttgctggatttctcaatcattctccctaacgcaacttctagtcttttactttcttttccgatagggccagtggcagcatttgatagttgtctctgcatctccttctgcgaagccatcacctggaaaggaaataatgtttcaggtcaacaaataaaagaacaacaaaattaccaaggtacatcttaagatgaaaaaagcaataacttatcatcgataaatgtaagttatttatttaaaac

SEQ ID NO: 6137 - DNA, 915 bp, Arabidopsis thaliana landsberg
aaaggcccgttacttagttgagtaactaagggatttgatccagcagctgtgagagctaagcgattcctttgactctcggctaattcacgatttagggcttgagtaactgatgatgcagaactaatggtttcctgtataaaagcatgtttaacatgaggattaaaaaaggattttgctaccataactagaagaaagagccaaaaaatctggaagaaggacgattttctatcataccctcagagtatgagcaagctgagattgtccagagtcaatccgttgctgtgttgcgctcgtgtgcttaccaattcctttctgtaaggttgagtctacttgctcaaacatggttttgcatgacctctcaaaggaaggtatgactgaggactccatacttgacctaagaccttcctgaagttgacaaatggcagcaaatatatataagagacaactgcttttacgataaacaacgatgcagttgagaatgtatgcacaagacttgtatatataaccagtcaatcagtcataactgtctgaaaagcataaaaaatatatatacaagagacagtaaggcataaaaaaactagtttaaactcgaatttttacctgcaggacttgtctgccagatgtctgaaattgggcttgaatctgcctggctacggttgtttcaagctttgaattaacagatttttcaagctgattgactgctttgtcaccaattcctctctgtataaagagaaatcagttttctttttcatcaatggaccttctcataaatcagctctaaattttttcttaaaatactaacctggaaggactttgtgattgcagaagatacagttttttcaataactggagttactacacgtgctagggttggaccaactgaagcaaatccctcttcatcgttttctcaaacat

SEQ ID NO: 6138 - DNA, 3975 bp, Arabidopsis thaliana landsberg
cagttccaactcaaaatgctcattagatattggacagtccctcattggggactccctcttgggttttgcgcctagcgactttttgaccatcttcagaatcctctccaattatcccctttcttttatctaaaattctttcatgtaatccttcctttttagaagctacctccagatctcccgctttagccgctgccttttgttttcttttggtggcataaggacgtcttctacctttactcttttttggctttgttccggaagggccagcctcaaggagaccaaccacataagccgaagaacatggcactgaaaaagaggaggtttgagagtaatccaccaaaggagaaagaacagctgcagatgtcatatcaacagaaccaggaaccatgacctcagcacgggagaacgttttaagaggcaattgattcccagatgcagaaggcgaaagattggatgacgcttcagaagaatcataaccaaaaacgatacctttacccttctccatgtctttagagatgatagggagaggttccagacgtaagaccaatttctgggcaatggggtcattttcagcatcagcaacagacttcttcaccttctcttctctcagcttgcgctcttctccggtggcaatcttcagatactgtcgcattccttctagaacatcgggggctatcctcggacgacccagaagagggtgaatacctacttgttcttccttcagaacgccaaaaagtgggtcattctcttttaagaccaaaggagcttttggcttttctaccttcctgcccaatttccgatcaatgacttgatcttgaaactgtttcacaaccaagggacaatcatcttgttcatgagtaagcctctgacaccgatagcaacgcttttgaaccttctcgtagaaatagtaaaccatcgaagttagacctttaggaagattgacgacttttgacttttttaaaggtctggaaacgtcaaacttaaccagaacccggacatagtctttgctttgaggtttatccggatcaaaagtcacttctttcacttgccccaccagatctccaagcgcagaaatcgaaagttcagtgtagtaattgagtggaatgttcttgatttgtacccaaatctcaacaaattgtagcgaatctggaggcgggacgagcgaccatctctctaaaaccagcccccattcgttgtaagtctgaaaacccttctctaggacttcaataagatcgtgttcataagtgaagatgaactggaatttttcatccgagagagccactccacggactctccccaccttctgccacttcctaggcatgtcataaatcaaactcgacatactttgacacttcgggttcaacaatctaccaatcaagctcaagacattcttctcacaggaactaaattgtgggagatcgggcatttcgaacggtacatcctcatcttccaaggacatcgccatgagagccttatccattgccgccgacatcgcttgaaactttgtaaaactcttcaggagagcagcgaagagggacaaagcagcaaagaacaaagatagcagcctcaagggacaaatcaacggagaaacaacggagaaataaagccaaaacgcacaaaccagaactgagagaattttggaatcgagttaacaaacccagccgccaagagaaaattagcaaaataggttaaaaagcaataaacaggtgaattgggtcgaaagggaaagtgtttttccaaactaaagctctattttctaaaaagagagatactctatcagaaaaagagagtcctaagcccaaaaaagggaatctgatttaactgccaggacaatcaccaacgttttataagttgtatgtactatcacaaagtaattagaacacgaaaagttatggacgcgaacattatttttattgcctaacatatcgtagcgtttactaattttagaaacgctataaataagttatgtataaatcaattatagcaaaaacacgttaaatgctatcttttagtgctattaatattcatttttcttatagtgaggggatatgggatttctacattgtgaaagaagtttatgcccgaactatatctatgaattgtgatatgagctacgacgacctattattgcgtgtgcgtacggagtttgagctagatggacttggtttaaaacccaaattaaattaatggttgtcgtttcagctgtctgtatttgcagtgaattcaaggcctctagtaatgatcacgagcaacatgagcctcaagaattaattaagtgtaaaagaaactgcagtgcatctcaatttgttgctttctcttgaaccagaacctcttgaggatgttggcacccgaatgaggcagctttgtcatgttcttgcagctaaggcaaacgatttaggtggcaataacacctatgctgcttttgacgctttaatgccaaatattccaggtttgctggagacaactaagttagatgagaacaagttcggtgggattaggagaaggctgtttctagacaatgaagcttcaggttcgaatggtgcgatcagatttcactctgttgaatcaacttatggtgactcatgtttcactaacaaccaaattacagaagctgtacttgaccatgtcgctgcacctgagcaatgtgccatgatcagactaggagatgctcgtacagcatcgatgtctcatcattctgaagacaatgatacagatggtcctcattttattcaacaattttcgtctgatgttgatgaagattttataagagaagttgaagcagctgagaaccgtgagaatcagcgtcgtagatagtcgaaaggaaaagggaaatgcaaagagagtcaggacgaacctatggtcaaggataataccgatgattccaacatagatggtgtgtgttggtctggttcagatgctaatatttctgatgatgatatttggatctagcatttgatagacatctatgcatttgatgagtctcctcggtttttaggcatggcacatcaagaaggacctgatacagcagcagctattaataggccatcacttgctcccggagaagaggatattgggacatcagtgctggcgtacatggaaagcgccagaaaaaaacgtgatgctgctgatgccatcgttgaaggcaatgattgtaatggaaaacaatatggaaggtttgattcacctaatgtggaagatggggtctcatcaggaggttctggtttcgcagacgttggcacagcgatgggcggaggattcactgtttcccctgcagttggtgttggaaacaaagacgctaggccatcatattcaggctttgctgcatttacatctccaaatcagcgagcaagagaaagtttctctggtttaaatgctgcataccctcgaggaccagcgccttctaatgattttactgctgcaaccccagacgcatcacaagattcctctatatttgaagctgcctaccttggactacaaactgcttcccctgcaatggctgcgccaacccaattcccagtacagactccctatgtatgtgatgctggctacactgaagcagtatctttaggagagtttggtcatgactacacacaaaggcgtgatgcataacctgtcattaacgatgcttttgaactcactaacatagatgtgtgtgcgacggtctcggctgaagaagatgcaatatacattggccgtctgtttaaagataaggaggattttcaaaacactttggctatatatgccatcaagagattgttccatttcaggatagataaattagatctgaagaggtgtcggtggagaggctatatacgccaactttcaggtgtacccaattgtttttgcaattgttgacacatagaatgacttagcatggtcctggttctctacgcccctgagccagctcatccctgatgcaaagaataaagtcattgattcagatcgccaccgttcaatttatgcaggagttagaag

SEQ ID NO: 6139 - DNA, 2369 bp, Arabidopsis thaliana landsberg
acccattgtgttcacatcattcaacagctccaaatcaaaaacctcattagtccactcttctttaaccgcagtagcaacccattgaggcaaatccacaccgtttaaggcctcactcggagatttcccagtcaacagttccaatatgatcacaccgaggctgtacacatcggttttcgtgttggctttcttcagcttagagagctcaggtgctctgtaacctaacgcaccagctgttgcaatcacgctggatcctgctgctgctgtcattagccttgagagaccgtaatctgagatcttcgcggttatgttctcatccaaaagcacattgcttgatgttaagtttccgtggatgatatttgcgtgtgtgtgaaggtagaacaagcctcgagccattccctttattaagctcatccttgtaggccaattgatatgtacatctggtcctcttgctgcaatttcaaatatgaaaacagagttacaaaatggtacttgtaaagcaaaattgtctttaactttaagactttagtatcaaacttaccatggagaaacgtggcaaggcttcctctagacatgtaatcgaagacgacaagcttctctcctttagggcctaagtaataagctctgagtgcaaggagattcggatgtcggattcttcccaagacgttaatctcattctcaaactctttttgacttttggtgatcttttctctcaatctcttcactgctacttgacttccatcttcaagtgtagctttgtacacagtcccataagtgcttttccccattatctctgctgttgcacacaaaagatcatctgcagtaaacgccattggtccatcaaaatgaaccagcttccctccagtttcacctccagcttcagcttcccctcctttctcagtctttgcggctacagctccaggtccagcctctccgcccttggctttggtttcattggctttcttcctcagcaagcaacatagaacacaaacaaggataagcataactatgaggagtgctccagacgcaatgaggatgatgtctttggtactcagattcctgtgggatggtttcctttctttttcaggagacggtgaaggaagagtaggacatggtgtcgaaacgctgtatccgcaaagcagtgagttcccgacaaaagaagaggaattgaacttttgggacaagagagtaggaacaggaccagataagttgttataagagacattgaagaagttcaggctttccaggtcagaaatcgaaataggaatctctccggtgagtttgttttgagacaaatccaaatgtataagagaagaaatgttccctagggtttcagggatatggccactaacactgttaccactaatatccatttttctaagcttagtgagtttgcttagctcagagggtagggttccacggatcctattatgactaaaggaaaaatcttgcagctgagttaagttgcagagtgaaaatgggaacggaccagagagagagttgtgatcaagagataagacacggagattaagagacttactaccccaagtatctaagattggaccagagaggttgttatggtcaagagcaagaaactgaagggaagaagaccgagagagactcactgggatttgaccagacagtgaattaaagctgagattaagcctaagaagcttagaagagtcagcaagattcggtggaataatctcagagagcaagttattgctgagatcaagcgtttgaaggaaacgtgatacaccgagagaagcagggattgagccagtgagacggttgttgaaaagctgaactcctctaagattaggaatgagtcccaatgacattggaatcgaacctccaaggttgttgtcatgaagactaagcttacgaagagcttgaagctgtccgattttctcagagattctacctccaagactcttccatggaagttgaatgacgatgacttgaccttgagcacattttattccagcccagcctccagagcaagcactgaatccagaaccgttccagcttctcaagaagcctcttggatcaatcagttcttgtttaactgcttgaagaccttggtaatcagcttgtgttatcactacaccatcccaggcttggcttgagcagggagggacgaagaagaggaggcatatgattagatgaaggagaaatcggcttcgaagtgaagccttaggttgatcaatgtcggtgttgatcatactcagagaagtaatagcttggttttgggtgataaactccattagaagatgaagaagaagaagaagagagaaaaaagaaaataattggagttctttatgggtgaatagtagttgtgatgaggatggaacagggaaagatttggattt

SEQ ID NO: 6140 - DNA, 2174 bp, Arabidopsis thaliana landsberg
agttccctttggctctctgtgggacaaatgattttgtgatcaataaactatgtatatcataagttataatccggactctcatgtacaatgaagtcactctaataacaacaaatacaaagaataatgtttgatccaaaaaaacacaaatcatgctgtgttgcaaaggatcaaccatatctctatttggatttctagtagaagcttctctgaagagagacacaaagggaaaaaaaatgctatatatctttcatgcttctgtatggtggaattggattctacacatttgtaatgatcttccaagaaatctgtcttctttttcctatattgtacaagaaggctaaaaaaggtttgaatcaatgttgttgtatttgtgttcactgtgtttctttcttctatcttgaagcactcttcctccatctatctgactctcttgatttcaaaagttgctcaggctgagacttgttacatatgcaatctggttgtgggttcgcgtagaaattctcttctagccgagggaattcaccgggcagtctcgcatatggcgctccaatcctgttgttatgtaatctcttcacctctgatgaaaactcatcccatgacatgacaccttcgtctaaatgatctataagtcttacaaaatttagcctgccattcacaaacttcatatcagtaaacaaagttaaaggcagttgcaaaaagaagaataatgattgattcaaacctgtctggattgatagttttcttaaacccttcaaatcttcggtgcccttgtactgccttagccatattcccatcatatgtatatacaaaaacatcgctttcaagtgccacaatgtaatccagcgcagctaaccggttctggtatggcttaaagggctctaactcttcctcagttgctaagtatgaatgagcaaagacgtttgggtactcttctcgaaaagcatccatactgtttcctccatatatttcaccagcaactatgtatacagtcgtcgaggatggatatcccattgccttaagaaatatggctgcttctcgaggagacatcgggcaaccgccttggatccgtctctctctgctgtcaatctctttctccttccaatgtttaacattgtacctcattattctcagctcttcagcttccccagctgtgagattgtggctgcagcctgtaaaggcaagcatgtctttctcgtatctgcatttcaaattctcatttttaaacaaacctgtgtccccaaaaatgcaaatgcaggatgcaaaaagaaacatcacagtacctcaagtgcaaagcaatgaaaggttcactgttgtttcgtaacctattaaccagaactttcccaaaatcctcaatctccttggagtaccctaatgcctggtaattagcacgacatctcagcctttggattgatggtggcaagccattgttggccaggcgtgaatcagtgtgtgtgaactttatcaccttatgttttttcaagagcggtaacatctcacttctgtagtaactagcctgcgtaaaagcacaaaacttttaaccacaaaagcccctaaaatctgtttttaggaatggtagaaacaaggtacagaccttggaccaagacacaggagctttgaggagaggtctcatggctgcatatcggggaggtaagtactcgacaatgtcaacatcatctttcaatacgttcatgaagtgtctccagtcaaaaatatctttgaaagtactgcaaatcacaaagaatatctcttcaaattccacttctttttttggataatatcttgttatagagtaaatgagataaaacctcgggtcagtccagaaagattcatggtcgagtagaggaagaacaagagtcgcattcataatctttgctgcagcaaccatgtcacatatctgcatttgatttggaaacacaataaaggaaggtaagaaacaccagagatcaaatctttgtaaaatgcttggacatgaactcacccctgttctcatctgattcaatccgccattcgcgtgtactaaaagataaccgttggttttcctacgcagccctgaatcacacacacatttcagaaaactagaaactgcaactcatgtttaaagaatcaggaaatgcaagacactagaattacttgaacggttcttaggacgtgacgcacactggcgataatttcca

SEQ ID NO: 6141 - DNA, 983 bp, Arabidopsis thaliana landsberg
catcaatagttgaaattactaaagcacatatcacatcatgcatatatcttatgcattgcattcattagattgtaatctcgccgacggagagtatgtgctcatccccgagcaaggaactgtccaagaggaggaccaggagcaagctcccgagactgctatcgaggatctccctgcagccccagctattgaaggcaagccccgatttatatgcataaccgtattattatatgctactttactacacttaatgcttgtagggttgtaatgtgcacttaagtgtaggagttgcttgaaaccactagttgcatgaacttaggattcctttttgagatgaatactagtatgctaggccgagtagccgcttgctaatcaggatctcggtagaagtcgagtgatttttctagcactcgcgcgaggtcaggaattggtttacccactttcatactatgatgatactagttgtagacaacaatccatggggattggttgtctacgagatgggaaaatggaataaggattaacgtggggatacctgtgtcaagcgtttgaacgtactaaacacataccgagaaatatggtaaataggtaagcctagtacctgagtgaacctgcccgcagacatatcccctcacgcgacctgagacgtggtctcccattccggttatggtgggtacaagtgcggacactgcacgacggcagtcggtgtcagtgaggcattgtacgccaaggcggtgagccctgatctgttgccagggaatcgatggggacggttgatgtgtgtggggacggagtgcctcatcacgtcgtgtgtttaggtttaccttgcaaggataaaaactcgattcgaatcgtctgcttctcgcagctaatgagactgcttgatccattgtactgcattgagtaacaactggaaatatgatgagttgatataagatgttgcttgctaataatgttttctactatgtatgagtagatagtacaca

SEQ ID NO: 6142 - DNA, 3045 bp, Arabidopsis thaliana landsberg
tccagcagcattgtataaatatattaggcacatcacggaagcatgtgttcatctccatacgcacaattataaatatgagggaaatcaattcctgaattagccggtcatgagtagatatatgaaatgcaatacatattagtctgcaatgtcgtcctcacgtctataagacatttcctcactttggtttcttatgtaaagtctctgtctgaaaaatctcattgcaaatgactggtttcttgttcagtatcacaaggatttttcatttcagttaagaagtgttgacatctcatacaatgtagtcaactctttttaaggcacagacaatggtctaaaaagtttggagtgctgtataatgattcaaatttgtaccaatatagtaatgtacaatcaattttggaggtcacactgataacaacgatatgaaagaatgaggaaaacctgttttcccatgatatctctcttttgtctacacagcttcccgtgcaaggtcacaaacttgctctagctgacccaagtcatcatgctcctgtatggtgaatcgatcctacaagctgtatgtatcttccaaaaactcgggttacctctgtttcctatagtgtacaaagactataaactcgacgcagattcttctatgtcttgatgcactgtagcattcttcaatgtatgacatcggaatcttgactgttttcgggtactgtatcactgctatcttaaggcactcttcttccaactctttgagtctgtccttagacttgattgtttccgcagctgctcaggatgagacttgttacagatgcaatcaggttgtgggttcgcatagaagttctcctctagcctgggaagtgcagcaggcagtctcgcatatgctgctccaatcctgtctctatttaatctcttaacctcagaagaaaactcttcccaagatatgataccctcatcaaaatgatctatcagtctaacaaaattcagcctgaaataatcacacagaacaaatcagcaaaaaaccagtgaaagaaactacataatctcgccaaaatgaaaagctttattccatggtaccatacctgtctggatttatggacttcctaaacccttcaaactttctgtgcccttgtaccgccttagccatattaccatcatatgtatacacaaaaacatcactttcaagggccacaatgtagtccaacgcagcaaggcgattctggtattgactgaaaggctctaactcttcttcagtccaagggttgtatgagagaagacatttgggtactctgcacggaaggcatccatactctcgcttccatagatttcaccagcaactatatatacagtcgtggaggacggatatcccatggcttttagaaatatagctgcttctcgcggagacattggacatccgccttgaatccgactctctcggctatcaatctctttctccttccaatgtttgacactgtacctcatgattctcagctcttctgcttcctcagttgtaagattgtggttgcatcctgtaaaggcaagcatgtccttctcatatctgcaaatccaaaatccatttgatacggaaccaagatccaaactatttcccttgttgatgataaaagatatgtcggatctacctcaaatgcagagcgatatacggctcagtgttgtttcttaaccggttaaccaaaaacttccctacgtcctcaatctcctttgtgtatagcagtgcctggtaattagcacgacatctcagtcgttggatagatggtggcaagccattgttagcaagccgtgagtccgtaagcgtgaactttaacaccttgtgacgtttcaacaatggcaacatttcgcttctgtagtaactagcctgtatatcagttgtgaatttaagaatttacttctcattgtgacaagcccttacatatataggagaagagataaaactctggaagctaacaacgaaacctacactaatatgaacaaagcacggaccttagaccaagaaacaggggccttgagaagaggtttcattgcggcatactgaggaggcaagtactcgacaatgtcaacatcgtgtttcagtacgttcatgaagtttctccagtcaaaaatatctttgaacgtgctgcactcaaaacaatatttattggcattctgcttcatttttagtaaatatcttgtggtatcaggtcaataagagtgccaagatatagagagaagacctcgggtcagtccagaaagattcatggtcaagcagaggaagaacaagagttgcattcataatcttggcaacagcgaccatgtcacatatctgcatattggtcaaaaccaacaaagaatagtacatcaaaacacttgactatggagaaaacggagatcaataccctctaatatccttttgaagtaaactcaccccagttctcatctgattcaatcctccatttgcgtgtactacaagatacccattggtttggcgttgcagtcctagacaaagacataaataccagattttgaaaaatcagaactgcaaacgagcttgaagaagaactaggaattttaagatagcaacatactcgtatagttcttagggcgcgtcacacattggcgataattcccgctttcaggtttctgccaaatttccggaatctgtgagaagagacaacaaaagcataaatccaaatgaccaagatcctcgaaaatgaagtcaaacagaagaaaaaactatcttccttacattgcaaaaacagaggaaatgataaaaaaaaaattagttaactatcaaaacatgtaagacctccgattacactgatcacagagaacttcgcgtactttagatatgttacttaacgaatttaagtcaagttacaatttaactcaacataacaggttagtcactaacacagattaaaccatatagtcaacggtaatgaactattaatcaaaccaatatcaacttggatcctcacggaacctcaagattacatattgcagagctagaagattataaagagtttcaatttcaagtcttcacaaactagaacacaagatgttaggatt

SEQ ID NO: 6143 - DNA, 1053 bp, Arabidopsis thaliana landsberg
aagaaaatgtaaaaacgtaaaggcaaattgttttgtatacatcgcgatagagtagatcttcggcttcaagcatatgtatgatatgacccattttaggtctcttgttcgcatcaggatccacacaacgcaaagctacaagcaacactcgtttaagagcctttgaggatggtggttcgggtattttcggatcaacaacttcttctgatcttcggtttcccaccattgatttaagccaatccactagatttgtctacagccacgacacatagtaagaccatttacaaaaacatagagaggattgaatatgcttatcaaatacctctccttgaggccgactataatcaaccgggtttcttccagtgattatctccatgattagtattccgaagctatagatatcactcttctcgtttaacattccggtgcaagcgtattctggtgctacataactaaacaaatcaacccacaaagtaaaagttatttcctaatattcacattcctaaagactgccttgcagattgcaggagagagttaatgagtttaatagtttacccgaaagttcccatcacacgagtagtcacataactgctctcagaccccaagagcttagcaagtccaaaatccgaaaccttagcattccattggcgatcaagtaagatattgcttgatttaatatcccgatgaacaacttttggctcaagaccctcgtgtagatacgccaatctacagatataacaaaggtttacacacaacaatagcttataaacatagaggacaactcaaaagctattccagacttaccctttggccatccccagtataatattcatacgtatatcccaagttagcgggctgacatcgccaacatcaccgtgaatccattgctccaaattaccattgtcgacaaagtcatacacgagcatcctatagtaacgaacccagcattaggtcacgacatcgcttttgtaacaccggaaaagagatacgagcagcggtatatatacctgtatgcaccttccacgcaataccctaaaagcctaacaagattcttgt

SEQ ID NO: 6144 - DNA, 849 bp, Arabidopsis thaliana landsberg
  unsure (1)..(849): unsure at all n locations
ccgtgatgtgaagatttgagcatctttttcaggttttggtcaaaattgaatcaaaaaggataatcaataaaacttagatgncggcttggctatctgggacaacatctttcgcaaggctctcatcatccaatgcatcggattgtgattgagaagctgtcagttttgccgccttgtaactttttgagcttcttacgatatcttgcaggctccccgataacctgttcacaagacgagtaaaaagagtttatgacagtagtctgtgcagctaagattgacaataataatacccttaaacgtttacttacctatttgttcctccagacagattgtttcctgttgaaaccaagactcgaaattagcatatctggttgagagaacatgtgatcaaagttatatttgggtcgataaaataccttgcttcatatgcatagaagaagtcacatcactatcattgtctgatgaactatctgatggtgctttagtggagtcactcgtagtcgtcttagattcatcctcctcagcatccttgaagaaattcgttgtacttttgttcgctgtgactgagttagagattttcttcacagctttctccttgttgttgacattcatcttactcttgttcactgtaaccgacttagagcttttcttcacagcttccttcttgttgtttactgtgcctttcatgggtgcatcagaaagatcaacctttgatccactgcgatcattcttagccattgactgcaattgactagtacctgaactagatggttgaactctaccttttgtctctttcattttcattgagccatcaatggaaccaccaggatgcaaatcaaggcttttcttctc

SEQ ID NO: 6145 - DNA, 2972 bp, Arabidopsis thaliana landsberg
  unsure (1)..(2972): unsure at all n locations
gtcgactctaggagtctactcgatagtgcggctgagttggtcttgagcgaccagagggtcgctctcctagagaggagaggatggaacctgcggctgttactccggaggcagctgcgtccgtagataggcgatcctcgggcaggtcccatggaggaggacgaggctccagaggtgggggccggtcttcaaaccggtctcaggaagtgaggcagacgtccaactccggcggaggatccgcgggaagtaggcctttccactggtcttacactcacgatcgtgatcacccgatcgttgaggacgaggctgggttagcgaacctgcttcgccatatcaaagggaggaactgccaggttcctggagtgaagaacatggccgaggcggcggcctatgctgacatgatggcgaaggagggtcaggtaattatcgataactgtctccttctaatttatatctttacgctagttgtgactttcggttttgctttcggtacgcgatagctgccacaaacaagctggttgctctctatgagcagcgtctgagccaggtcccctcggcgaacgagcatgaagaaggaaaggccctcatcctggagctgacatcgagtgtgaaggctggttaggatcgcgaagtctcgttccaggtacacctcaggtttgacttgtttataaataattcgtcgatgatttgatgattctaacctgattgttatttcaggcgaagatcgagaggctgaaaatggagttgtccacttcaaaagacctcgagaaaggttttgctgagaagatcgggttcatggagatggagctcgaggggttgcaagccgaccagcagacgacgaggaggcagattcatcgcttggagcagaggagggaggagctctccaaaaaggtgatggacctgactttgactgcacaaggggcaaagaaggcggttcacgatgctttagttgagctggctgctgcgtattcgaagctgctggctgggatcaaggagaagtgggtcgccaaaaaggagtacacggtgctggaggggcaagcggctgaggtggagtcgaacctggctttaatcgaccagatcacaaaggctgctatcgatctgaccgtggagaaacctcggctgcaagcagagctggatgacctagaggcgcggtacaaatcgaaggaggtacgtctgatggacgtcgacgagcaagggacgccaattggcttggatgagttcgggagcaacaaagacgcttttccgggaggtctcgcggagggttctggtactgtcttcgctacgccagccggagaatcgagggagtgatcactttcgctccttgtttgttttaggattttgtgttttgtttcagaattaatgcctgggaaggcttttatcctttcgtttattgctttttgaacttggtgcctgggaaggcttttatcctttgttcgtttaagtacttggatgcatgggaaggcttttatcctttttagcaagtattttttggttttccattcgagtgttgacacttcgttgattttggtgtatgatcacctagttttgtccatgttccggataataattggacctgttttcagtccaagttatttcggatgtgatatggtatgttcttcgtaggttcaaacttgagtaagtttgagtgtttttatctcgggaacctgttgaagtgtggtcacacaagggacctgccagatttttggaactgggcttgtggtatcgccagatcgcgaatgaaaccttcgtttcttccttgtttagtatgttatgtgttgatagcgaaggaaggagtcagatatggttgtagtaggtgagttctgatgaagtcgaagtgatgtgtttttaggtaaggttcactgtagaatttttggaagcgagatcacaaaatggatccgccaacattaggacgttgggcttttgggtatcgtaagattacgaatgagttttaaatcgtagtggaaacgattgttttgcgagacataatattgagtatcaaaattttcttttattcttatttcaatattgttgagtacaaatgaggtaaagaaannnnnnnnnnnnnnnnnggtcattgagcaaggacctggtcgataccgaagagaggttgaactgtcaggtgagcagctgatatttgttgatgggggatgcgatatctatttcccttattgaagtttcgcctttcagatggaagggttgaggtggtaattgcgtttgcggaggtgactgcctccatacctggttaagggattaggtccttttgtgatttgattgaagtggtggctgcgctcttggggggagttgcctacgtaccctgccaagggatcaagccttatcgtagttcgattggttttgagtacctattcgtggtatttcttgagatgcatggcatttcaagaccgtaactcaggtactccgttaataacttttacgagcttatagacgccgtcacgtaccacctctgtgattcgatagagaccttcccaattagttcccagttttccagcgtttagctctctcgtgttgctgaacacttttcgtaaaacgagctctcccactttgaatctccgaattttgatattagagttatagtannnnnnnnnnnnnnnnnnnnagttttgaactcagatctttccctgatctctgcgttcatcgatgaagtccatgttgtcctgtaacatttgcgtgttcaggtaccgagttaccaggactggcggtccttctcacgcttggtaatatgctcccaacagggattactgcttctaaaccataagggagggagaaccgtgtttcttgcgttgatttgcgaggtgtagttcggtaggcgcagagaactccgtggagcacgtcggaccacattgatttttttgaataaagtcttttcttgatgttgctaagtatagccttgttggcggcttccgcctttccgttaccttgtgggtaacaggggatggatgtggtaagaaggatcttcc

SEQ ID NO: 6146 - DNA, 3679 bp, Arabidopsis thaliana landsberg
ttgtcttgggaaatgtcagtcttcgttacattccggtttcgtttatgcagacgattaagtctttcactgcagctactacaggttagggttttcagatggaaagtttcctatttgtgatatttctattgtctattgtctaattgtttcgtatgtatatgtttgagcagttgtgttacagtggctggtatggaggaaatactttgactggcgtatttgggcgtctctcgtgcctattgttggtggaattcttctgacatctgtgactgaacttagttttaacatgtttggattctgtgctgccctgtttggatgtttagctacttccacaaagaccattctagccgaatctcttcttcatggttacaaatttgacaggtcagtgccccttcctggagtctccttatgaatgaatttcttgctatgatatactattcagttcttggaactttcatttccatgatcattgctgagtcatgaaaactgcacttagtttctaattacaatgatatttgcttgttatgtcttttttggatttgatatgcaataactttgcttctattgcattagatatgacatcttagtccaaattgaaaaagcagtcactttaatgtgatttagccataaagttgattgatgtataaagattcaatcacatcaccttttgagaagtaaactatgaatatccatctgcgtagaagaaaattttgatttttctgtttttcattatttagcataaacaccgtttactatatggcgccttttgccaccatgattctcgggataccagcgttattactggaaggcagtggaattttgagctggtttgaagcacaccctgctccctggtcagccctcatcattatactcagttctggtgttctagccttctgtctcaacttctccatcttctacgtcattcactccacaactgcagtcacattcaacgtggctggaaaccttaaggtaactaagacaaccctaaacccgttactaaatttttctttcggattgctctggatggtccaaaccaacaaaaggataagcactattaattcattatactggcattactaagttcttatcaatttacctatcttaccatggtaaaagaaatagaaagcctgtcagctagagtttcttcgcatctacgtcttgagcgtacttcatattccattatacgtcttattcgtagtggtcagggcatgactgtatccatataagtttgttttaaacaagttaatcaccactagaatatcaaattttcgaggcacattgctatggtttttgtcatcaccaacttgtgatttgtttgttgccttggacactcactctcatgtttgtaatatgatttgcaggttgcagtggttgtaatggtctcatggttgatattccgtaacccaatatcatatatgaatgctgttggatgcggaattacgcttgtgggctgcacgttttatggatatgtgaggcatatgctttcacagcaaacaccgggaactcctaggactcctcgtaccccaagaagcaagatggaattacttccacttgttaataatgataaactcgaaggcaaagtctgatcttcttcattccgcagctcagtttagtactcactggttcagggtgctgcagaagagaagcattgacacaaggggtgttgaatttttactaaatatgcattttactcaaaaaccttagtagagaaaagttacatttttttttttcgttttgatttgagctcgtagaagagataatggttcctactactatttatatttctgtgaagtgtagaatcttttaatttatcaaatacattttctgaaacccgaaggagagaactactacatttattgcttcttcttttttgaaatttctgtgtatattcattactactatgtcatgctctacataggaagggtcgagagaatcatctcggctaagttaacgttgagcgaacaagtttaaaataaagactcttcttgaagtgtggagcagttctgatttctatacaactgaaaactgctttattattcatttctattgtatgtgctgtgttggcccaataatgcaatatcttcggaggatagttccattgacaggtaatgtcgagcttctcttggcctgaatcaagaaaaaatggagattaggagagaaatcaatcatactcagaaactatggtgaaccaactggtactgaccttcgccgtctgcctttctccaaggctccggataagttagagggatctgctcttgaaatctgccctatgaatgaagcatattcatggaaagctcttcctttcaatgatctcagagggactactgactctaagacaccggaaagccgtgtcattcgcctactgcatgcggaaaaaaacaaaaagcaactccggtaatgagaaagagaacaacggaaaattttggaagaaaagtgagccagcaagaaatttgcattgcaagcgatggacccattggaaatgatgatattctcatcatacatctgaagaaaattatttaccattttagtaagtcttcaagtatatctggtttcatatccaagcagcttccattgctcgatgtgtaatcctgccttgcctcgtctactgttaatcctctttctggtaccatggtggctgatgaagtaggaacggatcccgttgtcgtaatttggtttgtcaaaaagcaaaattcttgctgtgacacggtggaagtcatctcttcaagcatctgagataaaccagacgtatcaagatctcctgaagtgttcatcattggctccaaagctccctaaataagtgaattccataagtcaaaaaagtctgagctggaaactatgaaaaaatctagaaagagaggaagctgaattgtaatgtaatactcacaaggttcaggcatctggaatgtgttaggtcagcttctgaaattagattggttatctgatgagtgagatcaagaacttgtggagcttctacaggttctgaatccaagtatggcttgaaatcagcaagattggaacagattttttcccatgattcttgcaccgcagatctagaggtatctagctttggtttctcagccgtcttgtatgtcttaccaaaatccatacggctacattcatctgaaacttgttgcatcttctgggcagcccctacatattccttgaaacagtcttccatcactgtcgcatcagaagattctgcaatgatctcacttgtattctttaaacaatcaaaaatctggaatctgtctatgtatatctcttttgatgggggagtctgtacaacgtcctcattcattgaaacctctactcttccatcaaaatgtccgcaagatactgctcttggcgacagctcagcttcaccatccattaaagtttctggaacatatgaagactctggtacacatgatacatcaactgactgggacacctcattaatgtaagagaattttgatgtctcatactgataacaagctgcctccaatatttctgctctagaaggatcagctaatgggtttgtttccttttgcatatctggccaatatgaggacaacgtaccatcttcttggaaaatcaatctgtcgtccttctgatgttgagaaatggaaacccgtatgtcagtcagaggctcatcttctgaatcagaggacatcacaacattgagcttgcgccttctgtttggctg

SEQ ID NO: 6147 - DNA, 3628 bp, Arabidopsis thaliana landsberg
ctctacgcctcaactgagattcccctgatggctgttgcagatatatcctcgttggatcattagggtccacgtacctgcacatacacaatgacgaccacacaagattttatgaggaacaacagcttttactactatcaaaaaactttccgattgatttctgatgggacttacgcatgtctcatcatttcgtccacaggtgtctgagcggcttgaagaggatcaacatgaggagctgccgctgctgcttctgctgcttgttgcatttgtctgttgtattgtctcactgatgatatgagattcaagaagagaggaacaaatgtcccacaaccaccttccttaaataggatcttgaaactgtgtgttgaatatagagctctatgctcattttctggcaccacctggaaattttgttacatgccaataagtaaatatgtatagtttcctaacaaggaaagaaactataaattctccatgaaagtttgtacttacaggctccacttgtccagcaatattgttgcagtgaaatattggctgattaaatttctcggcatggatgtaaagctacagagtaacatataatccataagctaatatgtagcatgtagttccataaccaaatttaacagagctacacttgtgccatgtattaactaaatcagagacaaaaataagataaagttactgtaccaggggcatgtcaaaagcaacaaagttgtcaacaggcttgcttgaaacaaagaccatccgtatattagacaagtaaatcacccccttggccttaacatgacctccatgccctctggatcatacaacaagaaagaacatcagggaagtgtttaaagcccagagctcatatgtctgttcacttctgagacttatcttatttacaagtaaacttaatggttcatatgctagatgagtggatctaaaccgactcaaaacggtactaaaatggagaccaacaataatcatcaaatcaataaaccacttaaggagatccaaaacatgcgtgacgagagaagggaacacgaacccagggatcttgtcgacttcaaactcaacaccatctcggactaggacgaacatttcattaacaaagggaacaggcatcccattgggtagcaattgagggtttagcgccatgaactgcaattcagattgatcaagccaatgattatataattccttgttctgttcttcttctctgcgtaacctgatcacacaaatgagaatataaacacatttccaaatatacttagacaatcagaagataattcaaaggaacatgctccaaattagcaaataattattcacagatccaagtaactagagccaattaacatccacatatcatcagcttccaatttcagatatgcaaaagagcaaataaaattgaggtttttagctaattcaaatcgaaacgttcctataatgtagaaacaaagactaggattggcaatacgtgttcaaaacaaatcaatcaacaaagaaaatatctaattccttagagaatcaaaatctgatagcaataagaaagcagtaacagaacgatccaagttcaatttcaagcaatcctttactcgtaattttctcgcgaatagaaaagctgaaggaacatacctgggtctacagagcttaaaaggattttgatcggagagattgaagaagaagaggataggggtaataaaagggccaagatcacagtttctcgttttttccagaaaagagacgcgacgcggtttattcttaaaaccttctaaccattttattcgtccctctacttatttctttagttcgattttcgcccgcaatttgatttcgttacaattgtccccatctacagttactatttgggccttattacatctcagattaaagggaccgttcagcccattttcagttgttttaactttggtttcggtttaggtgtttatttatttttttgacatcttgtttcggtttagttttggtttggattgtttgagctttcgattttaaccaaaacgtgaagacgagttttagagattcttgttattgttttagctatttataacaagtagttacctaaaatgccaaaatcattagcttaagattaggagttttgttgtttttagaacattttgctcagtacaatttagaaaccactttcaaaagagtattcagctatgcttctatagtcctattatctgtatgaaacttttgataaactcttcaaaataatgatacaagttctttaattctgcaacaattataccattttaataaaacaaccaataagatacaacaagtggcagaaaaaagcatattattcccttccaagacaagttgatcgattttgtgatgtgggatggaaagtgtaactttgagacaataatgatttgtagattatattagtaacaatttattatttatcagcaaagacagagagagagttcacaaacagcatcataatgtagaagagaaaacaaacaacaaacaaacaaaaaacttaaatacaagccttaagaaactatcaagggttgtgaatagtataatctgcaggtttcttcaacaaaacttttttaacggtagtttctgtacacagggctgtacatgctgctctctgcaaacttgacaagatcctttgcacgtggcaggttcgacgccaatcctacaccacaatacatcgattttagaacttgagattagagagttcagacagtctcattaaaagagttaagacagtttcattcaactaaccgaggtcataggttttggcggcgacacaggctgcaatgttagcagagatctctctgatgtttgagaatggcgggtagatcagaccattggcgtaatgctcttctgtcacttgtgcggccaatgcttcagctgttgaaaacatgagagagagatgacattgagaatctttaagtgtctttatcagtatccatgtttgattttctgaagtttatttttacttacaagctgcgaggagcatgtcatcacggacacgaattgccccagacatgatcaaaccaagacccagaccagggaaaatgtagcaattgtttgcctgaagttaagtaggatagtggaaatatgatgtgagctctaagattgtcagatatacaaagttgagagagaagaagttgttgaaatagcacgaacctggccaggcaagtaggttttgccatcgtacacaacaagatcaaatgggctttcacttccaaagattgcacgaccctttttttaagcacaatatatgattagattcgaggagcagcatgaaaaccaaattataattttgttgtataatcgggagtgaggacatgaatcacattcagatgtcatatgagacaatattataccttggtccatgtgtaagcctgttcagcagtacactcagcttgagaagtagggtttgagagagcaagaatcaacggtttctataagccaacaccaagaccagcattagaaaaatagcataaataccttgttttctgaaaaagcagagagtaagaacaagaagaaacctcgttgttggtagccatggcctcgacaacttcttttgaaaaagtctgaccaacaccggatgttccaatgagaacggttggcatgattgccagattgaaaaagtttcaacaggcag

SEQ ID NO: 6148 - DNA, 6573 bp, Arabidopsis thaliana landsberg
atctcctcctcagaaggtgagtttttacttgacctcaacaacgaatacatggacatgataaacccgggagtacaaaacccacattgggaaccatgggaagatgccaaagactcctgagagaatcaagatcataacagtgacaaaagaatctccgcaaaataagaagaaatagaacctgagagaagtaaatcttacctggacagggtgcaagccaagtttgcgatgcccaagtccctcaatggatattacatgcatcccttctacagaatagagaggtgctaggcaagcgttgacagcataatgcctgcaataaaagtttccgtatgaacagagaaagaatcaataagaaggcgcaaatataaactaaacaaagccaacatataggagggacagatacgcacacagaggtctttgacttcctgtcataactagacaccatcaccgtgcaagccccacaaccaccttcgccgcatcccagctttgtaccggtcaatcctaaatctacaagaaacatctgtaagttagaaactacttcatgatcgtttagaaaaaaagattgatctctgcaagtcattttttgtccccaagcgaatctagcaattggagcataatcttactcaaataaagacagtggtctaaaaaaacaaaagaacagtggatcaaacataatctcgatttttttagaatccagaatctataagtcaaacataagcctttttctttaacatactagagtaagaaactaggaatccaaaaaacagaatcttcatagagagtatcagttcaaaattgaattgaaaattaaacttgtttgagtacttgaaatcatccccagcaattggatattaatcaaagaagttgatacgcacctctgagatattcgagaagtgtcatatgagccaatccatcaggcaagactctacgaacgccgttaacgtacagtaacgcctccgtaaactcatctccgatctcgccgtcctttttcagtgaacccatttctcaaattgagagaaaactcgattgggatcgaaacaaaaacgaagatggcgaagttgattacgccaagtcaagagaagcaaaaaaggaataacattttccttttttaataataaaattcgtgttcctttccgatagcatccaccgaatgaatacgcatcttcatcatcatcacttgtgcagtcaatttttttttttttttttttttttttgtaaagaacccaaaatagaaagaacgaaatttaagtttgaacaaagtaaaacaattgaagcctatatgatgtttttacaatgccacttatatatttgtttaactgaattttgctgattatgtttcgtttataaattgtagtctgattagttatgactagtgtgttattgtcttgtcttaagatttactttaaaagaaattttgatgatattgtttgttttatttttggttttgatatatgatgatgataagcgtcttgcattgctcagcataactgcttcacattctttgctcacttgaagttagaggttgttcagaaaaaaaaaatctgatattttatctcgatggcgcgcgcatttagtcaacaaagttgctgctttgaagaaacatgtatcatgttacatcatgtatttggagactggaagtaacttacatatatgactttgacaaaatggattgatccatctttctcccctctattaaagtttaaagctcaaacactaagctttgggcagaaatctgaatttgcaaaaggagctgaaaactcgtcgaaacaagccatcctgatacgctctggagtggctggagtctccagagggaaccagttggtgagacctacctcgcttctagccgctttgattgcttcctttattgcaaagaaggctgatgctgcaagaaagaacggtggctcacccactgctttagatgaatgtattgcctttgcatttggattaccctgagtataatctcatgttcagtttcaaatgtgttgctaccaatttaaacagcttgttcctatagttgcataccttgagaagagaaacattcagttggaacggcatgtcgttgatggaaggtattttgtagcttccgggtccgcaagtgagtaaacttcctggtttaatccatttatgagctgcatctccccacttgagttcttctagagctacccaacctagtccttgtacaaacgctccttctatctgcaaatggtgaatttcagaaataacacttttctctatgattttcttggattttaaacattgcaaaaggccaacgaacagctaaaagcgtaggatgttgagagaagattgcgcacttgtccaatatcaatggttgggttaagagaatatccgagatccaacattatgtctgcttttcttgtgtgaaaatcaccagtcaatgtatctatctcaacttcagcaaaggcagctccatatgtgtaatatctatatgcgttcccttttccagatacccaatcaaattcaagttctggaacaatgtgaaaaccgtgagctgataggtctatacgttgaaagtagcaggcacttgctagctacatacactcagagaaaaagagagttttgttcatcaaaatcttctgagtttgtatcaaattgctagaagaaagaaagaatacctcagagaatgtgttgaaattgtgtttagatgcaacaggctccattcttgctataatctgctcacaagcgtctaaaactgcagcaccatacatatcagaactcgcagaagcagcagtaggtgacgcattaggaacctgttacaaggcaatcaaaacgacaagagagcaaaaactgtgaggcatttggaacctattaagagaccacagaaatgataagagagaacaacaacagttttgtctgactacgtcttggccaaaagtccactgcttgtaaccgagttaaatgtaccttgtcggtgcttgtttctgacacaaaaaccgaactaaggagaatgttaaaggccgttgcagcaacttgagcaacctttgtatgcaacccttggcccatctcaacacctccatgtgtcaccaaaacagtcccatcggtgtaaacgtgaacaagagcaccggcctgtgacagccgtttaattatatattggattaagtatctcaaaattcagattctagctttgaacggtagtgcaatggtgagatttccaaggaagctttagcttaatcttttcagttcctcgacagataactaaatttgaaagaaaaggattcacatcaaacaaagataacctgattcatgaactttgtggtaaaggatatgccaaattttgtgggaaccatagctacaccacgctttttccaccgattatgactattaaactcgtccgcttctctacgagtctttaggaagttgctggatactttcagttctttccagagttggtgcaatgtgcagtgctgaagtgactgaaagtaatgtgtgatcgatccttccacttgaaagttcatctcctaaagtaaatatcaccaggaaacattaaactaaacttacaaaaggaggacagattcctacaaactttcaggagatgagtatctttagaaaatattcaactcactttgatttcttcagggattttatccagctcagctgcaattctctgaatccaattttcagttataagcataccttggggccctccaaaccctcggaaagcggtgttgctgggaaaattagtaaagcaaacgttcccaacgatcctcacatgtgggatctcataaacattatccgagtgaaacatggcacgttcaagattagaaagagagagatccatagagtttccaccattgttgtagatttcaaggtccaacgccaatatttttccttcgttcgtaaatccaacctttaagatagcagagcacatttaaaaggaatgattagtttgtctaacaatctattcccactctttcttctactttcaactgttttcagtcattttttgattggccgctcattaatggccactgcctaaaaattcaagggaaaaagctggaaacaacagagaaagataccttgtactttccaacgaaactatggcgatgaccagtaatcatcatgtccacatctctgtccagtatgagtttcacgggtcgattcaataggtaggaaggaacagaagctgctgcagcaatgaaagctgatcttgtttccttaccaccaaagccaccaccaagtcgtttggttttgcataccactttagacattggaagaccaagaacatgagacacatatttctggtgctgttgaggagcctgtatataaatcataactaccaatattggcatacgcagagacaacattatcatttaatatcttaaactggctgatgcctaatggttttttgtacgttattctaaatgatgtaaatactaaataatatgctcacttgtgtggatgaaatcatatgaacttcgttgcctccatctatagtccaaaccaaactaccattaggctccaagtaaaagtgttcctgaccacccatttgaacctctccctctattattctgtcacactgaccagattgaaagcacagctcgacatccccttttctaagccttctctctgtgttcggatggaaacttttagcattaatcgcctccttgattgataatattgctggcagttcctgatacctaacgtcaacttttcttgctgcagtttttgcattttcatgtgtatccgcgacaagcacaccaatgacctgaaatacaagattagcttagaaataagggaacgaaagcagtacatgaaaacttttttaacttatttgacgtaacaaaatcaatacatgctcctttacttttctggtatcacttcttctaagatacagataaactaaaagttccccattgaggtttattttcttacttgtcccacacacgtgaccacgtctgtagcaaataattcttcgtcggcaacaattggtccaatcatattattcccgggaacatctttggcaagaaacagaccaacaaaaccagatgaagatttggctgccgaatcatcaactgaaaggatgcgggcatgtggaactttacttagcactaaagcagcatgcaaggtacaaggcggcaatggggtatcatcagtatattctgcttcccctgtgacctagatgaatatacaagagtgttgagatacactctatggaccttcggcgagccaacagatggaccaaaatacctgcattcttgccgaaagatggacctctggcaagccaacagatgttccctgttttactgtctcatagtcttgttttccaattctagagaaccgaggaacaagttgcacagctgacatatgcgagggtggaaaggtctctatagtgggatttacattatttacatgatgagtaacccataagaaaaatttaaagaagaagcttagggttagagatttgcgaaactccaccattcccccaggagcatcttccttaatcacgacatcgctctgtatgaccttaagcgcatcctgcagaagatctttattccaattctttccaattagaaactcttcagtctttctcgcacacaaagaaagaggagccacacctccataagcaatggatgcatcagaaacgaacaattgttgacccttgtcttcaagaaacacacgcattccaccattgacaatagctatatcatcatccctgcgatgggcctgcttaaattctttcacatactctaagggtcttgtccatggaaggaataccgacaacaagatctcgttgctccccatatccactttacgataaccgaggaagaaatcttttgcaggtatagacctaacatctcctttgcagttggttatccgaaactctgctcttgaagccatccaaagaggatttaaatcagatattggactagctgtacagatgtttccaccaatgcaagcaacatttcttatttgtgtcccagcaaaccacttcagctgttcgataaaagccttgcatgctgatgtttcatgtgcaggacgctcctttactatcttcctgaataacctcaggagttcagaaagtctcaaagctgaaccaacctctatcccattgtcattgacattcaatgcgttgagttctgggacttgagcaacagagatcagcacctgatactgtaacctcttcaatctcatttcgattcccacctctgtattacctaccagtagttttgcatcaggataatttgctttgagctcaagcaagttctgaagacatacgggtctataccaggtaatccccccatttccccttaactttaagggagttaacttcctcagcaaaagttcaggggggaaaataagctccttatctgtatacttagctccatctatatcactataagagattgactgaaatctatcttcattacaactggcaacttcatttgttgtttttgatccacaagagcaaggtttgccagtagatgggcaaatagtagaaccatcttgaaggctaagtgaagatacaccacagtagagagcatcatcagattttgcaaaaacccgaaacgcatcaacaatgggtcgatacccagtacaacgacatagatttcctgcaagaca

SEQ ID NO: 6149 - DNA, 1665 bp, Arabidopsis thaliana landsberg
gcggaagatctctctgatcaggcttttcactcccaattcttcgattggattccatttcctccttatcccctttgttaatcatcgcaactaataacaacaaaaacccaaatcaatataaacaaaatcccacatgtaaagatagatcatttaattttaccttgagaaagccattgttcacgacgaagacctagcttgctctgtttcaatttggcagacctgttcgtctgcaaacccaaagagtgaaatcaactctttgaagagagaaatgagatttgaggaaagattgaaaccaatacccttttcttttttccgaaatccctggcggttggagctgaagtagcagaagcgttggtgatcgaatcagaaatcatggtggttgcagatgattccaaagcaacaacaaaatcaaatacaaataaatttcaaaatcacgaaatgaagatttctcaaaaaccctaatacagatttgttgcgagagagaagaagaagaagaaacgtgcgattttttatttttttttgctttgtttgttgtgtctgtgagagaaaacgagagagagagagataaaataaggggataacggaaactcctcgtctccgcacagaactttccttctgactaaagtaccctttcttttgacttttgaacacgctcgaatgtaggggtggttttgtaattgtgatggatctacacgtgtgagaaacttctgttcatttaaaaacggtggcgtacggtggactacacgtgaggatagttcatatgattcacaaatatcagcgagcttctagatcaatcagctgggtttcttctggttacagaaaaaattaaatgatttagaaaaacatcaaaaccacaaagtcaaagttgtgtctctttctttcaatttgatgaatcgatcaaacacatttttatcttatattttgatgtaacaacaaaacatgaaattaaacaggtcaaaatagcttatgaaaattggtattagggagctaggaaactgcagatgagagttgaacaacatttaggtaagtttttaactaagtcatgattagtttattgcatttcgcacattaacctgcaaaactaattactactataataagaaatcttaggtagcaacatgaaaaaagtaagaatgctaattaacaaattacattaaattttagaaagaaaaaaaataacatgttaaacaatattttttattgcatcaacatagttctaagttatgaaatgacataggatgataaaaatcgattttagtgaaatgacatgtaacttgtaatggtgaatcagttacatggtttaccatactttagagtgtatataacttcaatcgatcagtgaaccatttaagattacgtaaagatacatcaagtgcattaagagagaccaattgatctactcgacacaaacagagagtataagctagtgtctaagattgaccgataaataataataatacaaggatttggatttaatccttcaagccactctaacaattccaaaggcatgaagacagattatcaacatgaaaagctgaaacatgtggaatgttttttaattccacaattgtccaaaaaaaaacaagcttttatgactttattacaagctaacacactgttcaatatgaaatcaagaaaagaatgaaaaaaaactgaattaaagaataa

SEQ ID NO: 6150 - DNA, 2207 bp, Arabidopsis thaliana landsberg
tacacagcctttgttaattttctcttacttgatgtctcccttcctttttcctgtttacaacaaacggtgtcttgaggtgaacaaagtcaagagatgatatgaaacatcgttgcacagatgaaagatccatctgctttttgtctggaaaacaatcaaattcctgagaacatatataaccgagtgaagtgtgagtttttgctattaaaaatgacacgcagtgtgatttacatgagggcagatgcaaatgaaactcaccatcacgagtgagtgtagattcgggaagctctcaaggaaggttggcaacatttcccaccaagtttgaaatctgatagttggttaatcaaatctttatatcacttacagatttcttctctgacgtcatctatgaattctgaaatttaaaatctaaatcgaagacacacgtcttttgaagacgtatgatttaattacccggagttgaaaaaatataaacacgaaagagtatttaccaaggaacaatttagggtttctgattctgccgaagaggaaaacagtaatcattgtagacgtcaaaagaaaaatggaaaccctagattgtctgttgtcgtctactatgtccgaagaggaaaaatgctcaaatttgagacaacattattacataccaaagccttagaccaaatcattcaaaattcaaaaccgctcaaagccaaaattagtctttctctcagcagaaaggtcagaaaccatcagcacaagaaaacatagacatgggcttgtatgttccaaatgttctcaagcgaacaacaacttcacatttgttagatcgtcttggaaatgtaaagagcttgctgagcatcacatgatcacgttgatcctctatatgatctaagcatagagtaaatttcttgagcactgttgaattctccataaaataactccatagtttcttcatatccgccacctctcttgcttttacctcaacaaactcaagcgatgataaaacacattggggcacatctgaaaaatttattccccagttataatctcgaaacccctgcaaattaaagtagagaaacaaaagaagacaagtttagtatatccaatattttcagaatatgagtttcaattagttagttgattaaacagaacaaatacataccatgacgagagattttaaattctgacagctctcgagaaagattagtaaagattcccaagatccgaccaccatgtccttgacgctcaatatagaaagtttatgaaattttggtagtgatttcgatttcgagaagtgacgataatcctacaaaaggagaatgcatgttacaacttttcacattcaaaagaaaaagaaaaaaacgcttatatagatagttagagagaatcaagatagatagtttacctgaagaatgtcaaaggagatagtcaaatctctgacacaagagatgagtttaagaatactaagcaaggtttcaccaaaataagccacatcatcaagattcaacatgacaatggaactcaaatcatttataacgattctttgaataaactgacggttcagctttagatacttgagctttggggtttgcattacaacttgtgttttcagatagccagtttcattattggttagacagaagctcaatagagactgagatgagactttagctccatacatcttgtccatagttagggtttctagggctgggcagactgagaccagcttctccatatccaaactgtcaacaaagttgattttttgtagatccatgatcttaagacaaggcagagaaactgaatccggcgatttaggcaagtttgcacgatggagcttcaagaataccaatctctcacatgatgtataaatagttggaggtatctcaactctatcatatacataccttctattactaccaacatctaaatgttgaattttatgtttaatcacattgttcatcatcatcgacgtcatgtttcgacaattgtgaccatatccaacataccttagcttaactctttgtaagaacataaacctttcgagaaaatcgaacttatcataatttttggagccattgatcaccaaatccaacccaagcaaagattgccaaacatatctccatctgcgacatataaggctagtcttgaccacctcctccgtgggaagattgaaaaatatcttacaaagcaaagaatctggtaactggttaatattttatgaccaacacgtt

SEQ ID NO: 6151 - DNA, 1129 bp, Arabidopsis thaliana landsberg
tgttgatcgcaacattttatccgtggcacacaattatatgctttaaacatattacttttcattcctcttgttctctattattgaagtggttttgttttggtcaaagttctctattattgaagttctagtaaaaatataaatccaaaattaatgatacatcagaatttggttgaatatatatgtatcatagatttagcattattatcttccattataaggaggtacaactacacgaaccatataccacacgagtccgtattaataaaaatgacaaatgtaattacactataagaacaataactacaactattatcagaaattaaaacaaacaaaaaagtcaaaaatatataactacagtacatcctccgtgggaagattgaaaagtaaatcatagagcaaacaatctcgtaattagttaatcatatctttgattatattataaccaacagatttcttctcagtcatcatctataacttctgcattgtatgataaaaaaaaaaaatcgaagagtactatattataaacacagatctgttgaaaacgtatgtctgattttacccagagttgaaaaaaaaagatgaaaaattcagagtcaaacaaagaatcacgaaagagtactgagcaaggaacgacgatcagatcaccctactctgcttagggtttgtgagtcttgatcacgtatttcacgtgaatgcggctatttaaaggtcaactgagaaggttaatttaacttgaaaatccaaattctataataaccaagatttacgtaaaaacaaaaaatatatcgtcccaataaaaataaataaaagaatatcatatcatcgtcccaataaaaataagatatttttatctaatagcacatctggttttaatgttttatcattcttaattcttataacaccaacagagagtagaaaccctgctctgtagatcatcatcggatacaaaactggatttatcggagacgatagacctcacaagctggctcaattaatccatgacaacttgactactcgtagagcttcttggaatcgctttgatttcgtcgatgatgttacagaaacaggcacttactgtcagtttcttgagagctgcaccattttctacaaagtactttgttaattttct

SEQ ID NO: 6152 - DNA, 1128 bp, Arabidopsis thaliana landsberg
  unsure (1)..(1128): unsure at all n locations
cgaaatggttatatcttctgatactctacaggtatatacatgcttgattcaataacattaagcttatacactttctttatggctttatcacattttctcagtgaacccatgtttttgtgtgtttttttggctgcataggttattcatgattactgcaaaatggaacaactacctcaattctctaacttgtctcgcttgcatgcttacttcgaagatacttggtgggaaatgttgccaaccttccttgagagcttcccaaatctacactcactcgtcatggtgagttttcatttgcttcttctaccctcatgtaaatcacattaagatttttgataacaaaaactcaaacttccctcggttatatattatcaggaatttgattgctttccagacacagagcagattgatctttcatatgtgccacaatgtttcctatcatctcttgagtttgttcatttgaagactccatacgttgttaacatgcaaaaggaagggagaccgctcacaggaacatcaagtaagaggaaattagcaaagtactttctagagaatggtgcagctctcaagaaactgacagtaagtgcgagtttctgtaacatcatcgacgaaatcaaagcgattccaagaagctctacgagttgtcaagttgtcatggattaattgagccagcttacgaggccgtctctcataaatccagttttgtatccaatccgatgatctacagataaatcaaggcttgttttttttgtaacatgttggtggattagtctcttcttacagaagaggtttctttacctactatatattaacactctctgttggagttgtaaaaccagatggtatctatgaatttcctttttttttttttttttttttttccaaggtgggataaaatcataaaagtaaagttacatcttttttgttacgtaaatctcggtcattataagattcggatttacctaaaacttaaattaaccttctcaattgaccttaaatagccgcattcacgtattgacgtgatcaagactcagaaaccctttgcagagtcgagtgatcggatcgtcgttccttgttcagttctccttcgngattattgtttgatataacgcagaagttatagatgacgtt

SEQ ID NO: 6153 - DNA, 2310 bp, Arabidopsis thaliana landsberg
tcttttgctgctatcttttgtgtattgaaaagcccttaccgttaccggaacctcaaagagctatatctgtgtcgagaaatacagagatagtggagataaagcaatcttcatcgcggaaagggaagaagattctgatgttcaaggcattgatgagtatgagcaagtccagaaactaaaatctctctttgtatttgataaatgacttagatttgtacaaaactaatgtggaataagagagagtaatgcttattttgtcaaaattagtacttttctttcagattatttagttgcaattcaacataaaccatacgaaaactattttcactgttagtttcgtcactttcttctacacaccgctctttttatctttgacttaagatagtcaaaatcacacgttaaggtaatctctctttatttcttttaaggttacatccaaaaatagattagtacgagccatcaatatttttttaatagtgcaaataattgtttcataattccgaagttaattagtgaaaatttctctttgttaacgggtggacatccgagtacgcggatcggattcgaataaaacctgattgggtacgagttattcagaataaaaaatttataatccaataagataaatctaaaatcttggtttggttttgcttcggatcgattgcctatagattttcagattcttttttaaaatcgaaacctggaatttcaagtacatacttggattttcggattaaatttgagtttctggtaaaatttatatattcgaataaaatattcagatacggatcaggtttcgaaaatacgaatccaatttttcgggtcagttttgattcggttactcggttccggtttttcccactactaatgatgtaatagaagaagactgggcccaacaaaagctcattgtctaattaagaagaagaaacgaagtaaccaacggccacgattactccaacacaagaccaaatctgattggttgacattatagatcgtcgtaagataattggtccacgtcatctccgatgacataagttaaatgtcttcgtcttccataaaaagcgactacttcaccatcaccttcgggcactggacctatttaagcatcctaacttcttcttcaaagcttaaaaaccagaaaacaaaaggaagctctctgttcaaatcaaaaagagagatcgtacgcaaaagtttccgatatggctcgctcgtttggagcaaacagcactgttgtgcttgcgatcatcttcttcggtgagtgattttctgatcttcttcttcgatttagatatcttctgcattgttgcttgatctcagaactgtaaatccgatgtaatgtgttcgttgttcctggatttgaatgtgtttgtttacaatgttgtgttgcaatttcacgatcttaaaggttagatctcgattacatagacaatcacgatcttagagattcatttcattgataatagagtgaaattaagttttgagattggttgattggtgtttttggtttcggtagttttattgacgattggaagtttttacgattcaggatgtttatttgcgttttccactgcaaaagaagaggctacgaagttaggatcagttattgggatagatcttggtaccacttactcttgtgttggtgtttacaagaatggtcatgttgaaattattgccaatgaccaaggaaaccgtattacaccttcatgggttggttttactgactctgaaaggctcattggtgaggctgctaagaatcaagcagctgttaatccagagaggactgtcttcgacgttaagagattgatcgggcgaaagtaattacttaattctcttttgctatatgtttgtttcaccttggatgatattgttggtttaattctttcttattgtatttggcagatttgaggacaaggaggttcaaaaggacaggaaacttgtaccttaccagattgtgaacaaggatggtaagccatacattcaagtcaagatcaaggatggtgagactaaggttttcagtcctgaggagatcagtgccatgattctgactaagatgaaggagacagccgaagcctaccttggaaaaaaaatcaaggacgctgttgtcactgttccaggttagtttgttgttaattcggggtttctgttatatatgtggtggagatatatatttattatctgtattggtgattgattgtgtatttggtgtaaagactatccgctgcctactttaatgaggctcaaaggagaggtaccaaggatgccggcgcgatggccgggctccatgttgatcgaaccatcaacgatccaactgct

SEQ ID NO: 6154 - DNA, 504 bp, Arabidopsis thaliana landsberg
cgcttggataatcaattcatgattcctaaattttaactaatttccagattgcataaccaggaggttggtctggtttcctcagcagtttgaacctatactccttgaaaccggattttcctgtcacttgccagcaatcagagaccagataaagtccatcatagatatataccttctcattattatagagctcccctcttatgactcttacttcattccttcttcttacacttgcttctagtgcacggtttcctctttgtaaaacttgatcacatggtttaccaccatgtccgctatagatcaacgtttcaagatcctcggtttcattgtcgtactttcctgatgttaccacactcgtagcagcaggaccatccactccactctctttagccaatagactatcaatgcctccagcagtgtttctgtgaagcccgactaaacacatttcacaccagtaatagaatatatcacctacttgtactccgggaatgggtccaattctcctcg

SEQ ID NO: 6155 - DNA, 1417 bp, Arabidopsis thaliana landsberg
cttgcaccctacttactcctccgccgtaaggtgatggcgggaacggtctaggcaatgactgatcagccgaaggaggtcgtgacagagacgaatcgtataccgtaggaggagacggtggcggtggctgaggacggcgtcgagaataaagaggcggatcacgagcaaaagcagcgctgagatcggagacgagatctacgagattggagctagggtagacccaattctgaaggtacggaagagaaacgagaccagaaggagtgacatgtgcgtgaggtcgcttgatgatcatatcagcggtgggattcacatagacgcaaggaggatgacgaggatatgactcgaggagccagataatcacaggtatgttataggtgactccatgaaaaggcatcggaatcgtaccatctgcttgaaggaggttgacggagcgaccatcgttgtgcataaacgatgccgttttgggctctaaggaagggtaagaagagattaggttaagtagatgttgccggatcaaccacttgttggactcttcgtaggggactgaagatgggccgcgctgggagagggcagaggagaggaactgctgaacctgctgcggattagacggcgggggaaccatcggagttaaacggtgtcggcgttggaagtccaaattgaagatgacgacgacaactggggaggagattcgatttaagaagaagaagtaatgttattatacgcgtctttattagctatttactcttttacccttcagtgttgttttggatagtgtttaatccggtttactccataaaaatttgtaaggagtggacatgttccaaagtccaaagtttaacacccaaaacataaagcgagtttgtgatcaaagttttattcaccttactcatgtaagtaacgagtgaaaaacaaaacagtttttttctcataactttaacaataagaagattcaaaccacttgacaacaaaaataaacgaaaagattcaaaccacaatttttttctcataacaaaacaaaaagaagattcaagtcacttgtcaacaaaagacagaaaaatccaagtagcaatttattcattttgatacttgttttcaaacttcccagagacgagtccaaacaccaagctgatggcaaacgtaagcatctagtgacgcctgaagaatctgatcaaggtctagatcgtaagcggtccaatcgctcatgcttatctccggatctagcatcactccttgatagcccatacattcctcgtcaatctcttcaaacgaagaacgcctcatgctccttcccctcgaatcagtcacgtaccgccttatgtccagaagttcaccgatctccaactggtggcagcaccgagcaacgcaatcctgcataaagacacattccagacaccgacgaacgtggtttctggatgtgcta

SEQ ID NO: 6156 - DNA, 2906 bp, Arabidopsis thaliana landsberg
cacttattgatcggtccccatatcatatgcgtacataaaggctatgggtcaactcttccccatggtctaatatatttcttctttcctttgaacaagtatagaatcatccattttataggtacatttgaagaccaataattattctataaaaaaaacacctacatatagacattggccaacgttagtattttacgatactagtctatatataccaaaaaaaattaagttctagatattaccctttttctttttggaactttgatctgagaaaacccacaatgcagagacaaatatatgttcacaaccaatatattagaatttctttaacaagttttagtaactatgtatgtagataaaaattgaatctgcatttctagggattgaaccaaaccgatcaaaccgttatttaccctcccaaatgatgcataactattttaagtgaagcgcgtgtggtggtgtgaaggaaaggaaccatgaaccatctaaaatgtgatgacgtggcaaaagctcgtggtgaaattgaatgaaaagctggaatagataacgaccggtgtgagtgagagagagagagagagaattcgatccatcattatacaaaaccttcttcgctttttatttgatttatttatccttttctcatttgattttctcgggaaaatctctctgcgtagtagatccaagtggtggtttctgagtagtagtaagcaagcaaatctggatgttattgtagtcggtgtgaatctgagttcgaaagatgaggaacgttgttaataacagcgttgagactgttaacgccgccgctaccgccatcgtcaccgccgagtctcgagtacagccgtcttcttctcaggtaaactactaagcttcttcttccagattttccgtgattgaaatgtgtttttcttctgctcatagatcagtattgttacttgcttgatttagatcgtgattccgagatttatagcttttgtttgaatgattgctctgaaaatttgatctgttcttagttttgaatttcgcgattttgctgttttgatttagctcatagttacgaaactgtagtgaatgtgatttgaatttgcgattttggtgttttgattttgattacgattctagatcagagctaatggtgagcttagttcttgatttcacgactttgatttgttctctctggattacaattgtggtctcaaaaaggtaaaaagatgcgttgttgctttttcaatctttttgtggattggctttacaagtcataatagcatccatgattaaaaaggttaaaagcgtttctatttcatgtttggttaattttccacggatagtataaatttctccaaaagtgaattacaaacgtttagctacttattggaaactaaacaagattaactttattatcaaaagcttttactttgagaaagttttgttgaaacagttctctctaaaggggatcaagatgagtctaattttgtgtgtttaatttgtacagaagggaagatggggaaaatgttggagtttatattcatgttttggaactcagaagaacaataaaaggattggtaatgctgtgcttgtacctgaaccggttacatctggagttccggtagttactgttcaaaactcagctacttcaactactgttgttcttccctttatagctcctccttcatctccagcttcgtttttgcaatcggatccttcatcggtttctcactcgcctgttggtccactttctcttactagcaatacattctcgcctaaggagcctcaatctgtctttaccgttggaccatatgctaatgaaactcaaccagtcactcctccggtgttctctgcgtttataactgagccatctactgcaccgtatactccacctcctgaatcatcagtccatataactacaccttcttcacctgaagtgccctttgctcagttgcttacttcttcgttggagctaactcggagggatagtagtagtgggatgaatcaaaagttttcgtcttcgcactatgagtttcggtctaatcaggtgtgtccggggagtcctggtggtggtaatctaatctctcccgggtcagtgatttcaaactctggtacatcttctccttaccctggtaaatcacccatggttgagtttcgaataggcgagcctccaaagttcttgggttttgagcactttacagctcgtaaatggggatcgaggttcggttctggatcgatcacacctgttgggcatggttcaggtttggcttcaggcgctctgacaccaaatggtccagagatagtatctggaaacttaacacccaacaataccacatggcctcttcaaaatcagatctctgaggtcgcttcactggcaaattcggatcatggctctgaagtcatggtagcagatcacagagtttcgtttgagttaacaggtgaagacgttgcacgttgtcttgcaagcaagctaaatcgatcacacgacagaatgaacaacaatgaccggatcgaaacagaggagagttcatcaacagacataagaagaaacatagagaaaaggtcaggagacagagagaacgaacagcatagaattcagaagctgagttcctcatcgattggatctagcaaagaatttaaattcgacaacacgaaagacgagaatatcgagaaggttgcaggaaacagctggagtttcttcccggggttaccatctggagtcagctaaccaaattaaaatgacatctcttcttcttcttcctcattaccaaagacagagatataaaaccctataagtaacaaaccttgaacatggatcgtgaaaaaaggtaagagatttgggttctaacaacttatacacactgaataaataagcttaaagctttgatttgcagttaacttctgtactcatgtaattagaaactttg

SEQ ID NO: 6157 - DNA, 2406 bp, Arabidopsis thaliana landsberg
aaacagtggaagtgtgttatccactagagagagacccaagttagtcactgaggacagtgcatcccaagatggggtggatttcagtctcaataaagatcaagctgacaaacaactcgagcagccactcgaccagtcactcgagcagccacttgaccagtcactcgagcagccactcgaccagtcactcgagctgccactcgaccacttcactagaccgaccttcctagcaacatcaccaactgctctgaaacatgttgctgtcaaaaacaaagaaaaagtcttcattcctcatccttacaagcccacacttccatttcctggtcgacacaagaaagagttagaagataagtacagagctatatttgccaagaacatcaaggaagtcgaattaaggatccctcttgctgatgctctaacgcgtatcccggattcccaaaagttcctcaaagacttgatcatggagagaattcaagaggttcaaaaaacaacaatttagagccatgagtgcagtgccatcatacaggagaacgatgtcccagaaaagctaggagaccctggttcattcactctaccatgctccctaggttcattgactttcaataaatgcctttatgacctaggagcatcagtaaatctcatgccactctcagtagctaagaggttgggtttcaacaagtataaatactgcaatatctccttggctgataggtctgttagactacctcatgggttattagaaaatttgcctatcaagattggaaatgtgtaggtgcctacagacttcgtagtgctaaacatggatgaagaaccaaaagatcccttgatattaggaaggcctattttggcaacagttggagcaatcatagatgttaagcgaggaaagattgatcttaatctggggaagaatttggatatgaagtttgatatcaatgatgctatgaagaagccgacaatagaagaacaaaccttcttagttaaggaagtggaacagttagctggtgaactgctaatggaacttgaagaagcaaataattgaaaaactgttttgatcaatagtggtaaaggtgggtatctccctagtgaaactttgagttttgagttttcattagactcacacaaggcatcagttggctcagaggtttacaagggcttgatggggtcagacacaaaggttatgaaagctaatgaagtaagttcaacacatgctcgaccaacttattccaccaacaactcgaagaagcctccaacttgtcctgaaagctcatgctcgaccaaacaactcaaggcaagcactcagatgtcagatgattggttagaactcagggagagatctaaatggcaagacaaagccatacaagagctaacacatattgtgaaagagctaaaggatcaaatcaaggagctcaatggaaaagccaaccaagtaccactcaacatcaaggacgcccctgacgatggagccactatacttgtcagcaaagaaggatgtgaattcacgtcagaatggtctagaggagaagactatcttgataaaaaaagaagcttactgtgaggacatggccactgagtacccaattgcagacttgtcaagaaaccctaataagtatgatgatcactctactaaagaaggagaggagacctcatttcttctctgcaacccaccctaagcctaatgagtatgagaagtcaagcttagagacttaaaacaagctcacttgggaggaaatcccatgtctatctttgtaaatatctttatttttccttgttgtttttgatgcatttggttagtgtcttcaggagataagtataaagagctgagtgaagtggattttggctctgagagtacaacagtatactcgaccacagagcaatgaaaaatactcgaccatgttttagcttatccacgccagggatcactcgaccgttgtgctggtcgtagcagcagaagagaggttgagtatccttagggcggtgttggccgccatggagctgatgaggtcgagtacccacatgctagagctgacacagaacaggacggctctttaatgccctgggagcaatcataggcagccattgacgaccaactccgttcattcttcgactgaggtaagcgcctcacttcaccattgtactatataatctcttgtttatattgtgtttttgttatgtgttttgtcctgagtactctcttccaaatttggtcacacagtggactgtgtgatttaagtttgggggaagggctcaggaagtgtgtgttgcattgtatatactcttgagttgagtcagcattcatctaaggcatagaaaaaataaataaaaaaattgaaaaattagagaaaatgatttcacaaaaacagagtgttcatgtagttgtattacatttagaatcgagtgtagagtgtttca

SEQ ID NO: 6158 - DNA, 3776 bp, Arabidopsis thaliana landsberg
agaaacaagccgcccatataatcatacccagcacatatgaatacaatggcgcatgcaagtgttgcatttgctcgtactggagcttgacgctgtaagagcctgatggctccattgatgtttcgttcatgcgttagaacacgaataccttcgtaatacacggccgtgggattattagctgcaaaacaccttaagaaaaatgttcgatgtcggccttcatcagcggatccggagggattgtggccccctccagcttggaagtcatcgggcgagtcacacaaggtgagaatattggcatctttgaggacatccggacggtagacaatgtctcttccacgagtgccggctcgtaccaatggaccaaggtcagaccagcattggtcagccaggttcttagctatcttcgagagtaaatcgtcgggaagagtcgggttaaccatgtttgaaatgagatagtcagaggtcgtcagtaatttcttcactttaataaccactactgtgaatttggttggggcaattacggttgaaatgaatgtcatacttgtgttggtaagcgttggctgtcaaatcaatttatcacttgagttatgttataaagttaatatgcagtgtacgagacatatagatatgtacgtacacatttatattatgtaattataagtgaacgatgtgtacgacaatatgatagaggacaataaattaacttctgacaatctccaaattaaatgtagttgcaatcatatatataagtcaggtttgttcataataattggttgcaaagaaccagaatattgttcttggacgattaaaccaagtgcacagtaccggcctcccgcttgccgtgctcgtagatgtcaacggagtatttctgacggtagaagaccatatctgcttctcgaatggttgtcagatccaaaaaagggtgtccaaacgcaagcaactccaggaacttcatcgtgtatggcccgcaatctcctgtagttgggttttgagcaacggtaggacaacgcacatactcaaaaggttcaactgagtacggagaaatcaatacatcctggcacatcgctctgactaagtacggcatcatttcgcaaataggagtcattctcgccttcacagccgactcccgcgtgtgcgatattaaagcgtcatacacagttattagccgttcattaaggttgattcccaaagcagcccaatgttcactcttccagttcatcggagcatacacaacatcgacatccttcagccacttcatattgggttcacggtttatgtgaactccattagcaatgtcggacagtaatttaccccatttgaacccgttcttattaatacacttcttgaagtcgcgtacctgcttggtaagtagattcgtcagcatcatgtccaatacaatacatctgtttgctatcatctgttccccgttcttgtgccacatcaacattgccatcatttctaaatgctgaaatgttcaaaaaatatatcagtgtacgtacacttccacgaaaaatttaatcatctatgtacaatttataacaaggaatgtacgtatataaatgcaacgtaccgaactttcgacccattcaccaggtgttagaaggttcgcaaaaaactcgttgggcactttgcgaaacccgaaaagagtgtgaatcctgtaaatccagaaaattttttgataacaactttaagacttggaaaatgatgattgagatattaactaatccattttactataatgtacttacacagagggtcctttaatgatattgctgaattcctctacttttgaagggtcaaccacgtccagggggttgtatgagacatttccagccctgataacaacctctatctgttgagctggtacatcggacaccaatactgtttttgccttaaaaccatgaggatgggcatcatcctgttcatagacaagttgtttcttcactttctttggggacgattttttttcttcttttgcttcgacagcagcagcattgtctgattcatcctgttgacaaatatgattgtcaacaacagtttcatacgtttttctatgtttaaaataggtacatacattatttttaggaatatcggtcttgtctgcttcatctgaccctgggttaggatcctcagtttctacagacccctcgacaatacacggctcttccatgactacctgtgcaagtttacgtacacaagtatatataatgtacacatataatcctatgtatgctattccgaaaataggaattgaaacacacaaattgttacctccaaatcagtggctacagctaaataaccaacggctttggtatccaactcccgtatgacctgcataatataaattttatacatttggacagttaatagtacattttattttttgcaagagttagcttacattgttaactacttgaaatggtgacgggggatcactgtgggtcttctcaggtatttcaacttccattcctgtcactaatttggattctcctgccgcctcaacctgtagaatttatcatcggaaagcaactttttagtaatgtatgaaacaatatatatgtacacagaacatagtgacaaaaatgtacgtacacttgtgctaggtatgtgagctgtatctccatcagaaggctcataagtttcttctgactcgctgccattagcttcagtcgcagcactggcatctcttgcttcttcctgaaacaaaaataattttcaaagtcttatgggcgtacacatatggaaaaagaacaagtgactaacacatacctgtgcagatgttgaaggtaaacttgatggattgtctaccatctctgtgtcagcatcagctatttcatcggcccctgtatgggtaccaactaagccaggttcaacaacatcctttggtccattatcatgaaacataggctacaatagagttaagcggtagataagtggagaaattaatgtaatatatatgcatatagtcatggaaatctgtatataacgattaccacaagatctacctttgaaactcttgcagacacattagatggaacttcttccatctcggtgtcatcagtagcttcttccacaggcctcccttcttgtgtaacatagacagtcccaggcattgaacctaaaaggacagtcttaccaacaacaaaatttcctctatcctgaaacatagtttaactaacttcttaagcgaatatgtacatacaccatttaaacagattgttaagagtattagtagacgacataccggatgggattgtgtggatccagcataaggaactattaaaaatccagtgtctaatatctcttcttcagcggccgaagaatccaatccatcatttgcagtaaaatcactttcattattagcgccatactgtatcgaagcagacaatacagttatacatatggattataaaatatttagcaatgtacgtacatgccttacctgttcatcaatgaatccttgcatatcttccttattggaatcagatagctcagtagtgtcaacagcaaaagaaacatttttcttcggctttgaaggttttcttcttccgccgacagcagtggtatgtactccagggacatcccaatcttcctctttggaattacagccaatagaaagcgcaggagtgtccacatcatgagaaacacgggtcagccttgaagactttctcgttccagtgcttccttttgtagacatccttctcgatggcttcttcgcaggaaccggtgccttatccatagaagtaggtgcttcccgtgaatcatgggaaggtatggtt

SEQ ID NO: 6159 - DNA, 2566 bp, Arabidopsis thaliana landsberg
aaagttgcatttgagacaaacacataacagtaactcactagagtaatgaagtcccttgtgtgttataatgtgtgattcatctgttctccattttagagctcagattatcatcctctctctctctctctcttaatacttatcttagttgtcttttattagacctggtttctgaatagtttatgcttatgacaggtgcatgagaaggatgtgattggtataacacaccacccgcatagaaacctccttgctacctatagtgaagattgcactatgaagttatggaagccctgagttttctcatcatcaagtcttgttttctgtatgattagtctgtctttatttgatttgcactcttctcgggttagaactagtgtaatgtgaaaccatctttgcaaagatctcagccattttgggaacactacccacagactctaaaaccagcatttcagattttaagaccgtttcacctggccttgagccttgtagtagtttatttaacaacgtgtctccttcctctttgaccttcccagccagtcaactcccatatactttttagtcttaggaaagaataaagtcaagctcaaaaatatataaaaaaaaatgaaaacttgggaagttcaaaagaaacaaataatgattctcttaacttgatgaattactcacaggtaaatttacaaatgatgatacgctaactgctttccctagagaccattacaacgggcaaagcatttcttctggcaacttattcaaaaggaaaattgtttctcttaacaaatctaagaaaatattataagaaaaaaagaggaagaatataagatcagaagaaatgaagaagagaaagtaactgtactagccagactattgccatgtccttttgaacctacaaaaataacagtaaaacaaaatacatcaaatctataaactaagatcaaatatatgagatggtgttgtgtaataaaaaaaaacttactatgtaatctcccaaaaaaaatggcaagacactaagctccaaaccatgagaaatcatcaccaaaaccaccatagtcaaagtccaagtcagtcaatggagacagaatgccactctgatactgaggcaactcactccctgttacaccgtcttcatttccgagtaaaccaaggggttgaagtactcctcctggggcctcctcgaacccactgttgtgaggtggtgcttgtgtattcatttctatctgtgtatggagaatgtcgtcttcctggttatgtacaaacactgcagagggattgtagaagttgtaccctgacccaaattgaagctcttggttagggtttggtccataaagcattggcctttcgtctacaggcatcatagtttgttcattaacaagtggaagataagtatagttgttattgaactcaggaaccactagttccagaccattatcctctggtcctaaggcaatatttgggtcgacaacatcgtcctcttgatgagtaccgttgatgttatattctagcagaggggcatcaacatgattcatatcaggtaagatgtttctttgttgagcttcaggttgttcttcctcttgtcgattgacagttccggatctaattcgaggtcttttccttctgcgatgtttctctgctttatcttgatctcttactgaatgtgagatggctgttggttgttctttttgaatctgatttcttctactgtctttagatgaaactgaacctgaagcttcctctgtcccatcaacatcatagtcactgtcactgttgaccacaggtttcctcctgtcagcgttattacccctacgatgtgtctcagtcacattggagtttccattgtcactgctaggctgctgaatcaaagattcctcttggttcaaaaccgccaaccaaatcgcactctctttagctgtcatcttgtcctgtaaacatttcgactgacgaacatgcctcttaatctttgcaatatcaggtaacatatgattgatcactgccgttaaaactccaaccttccacatcttcttgagatcatgaggttttcggtaaggaggactctggcttttaggcagaccgagtttcacccaccattcttcattccccgttggccaccaaggcggaggcgtccctttctccaacggatacttcctttgaggaggatcacaatgttgcatcaaagaagataacaaagaccctaaagtagcatcttgcaaatcctggagaacaaactgtgaattcctattcccatcagatttcccaaacgctaaacactcctcttcgtatttagcaatagcagcaggaccgttcttatcaaacttcactttctctttccaccaagctcttatattgtcagaggaaccactcacaggcttgcccttttccggtattataccatagacaaacccgcgaactttgcagacttccataagcttcaacatgtacttaaggataccatcttgagctctagacattttcttcctctgagcttgatcagagattttcttaggtgtcctccttcgttgagctccttgagagccagctttttgtcgctctttgattctttttaagcctgacacga

SEQ ID NO: 6160 - DNA, 1267 bp, Arabidopsis thaliana landsberg
ctcttgtcattaatactgtacatgtttcccccatatgattgggttagttattttcattgaagaaatctatcacatatcccataaaaacttacatctacttttcttcaagtgagtgaaagtattcccagtaacattggttttgcagctgagcatgcctacgagagaactcttgtgcttaatgcactgatttgttggagactttgtgattgaaccaacacataggcacttcactagtaaaaacatctgtctagttccgtttgtgaagttcgatcttctttggagaaagatgctcaggacttagtgtcatgttcttgaccagattcattgccttggaatccccataactctttagctatcgcatccccctcctctgaaaaatataaatctcattagtctctaatcaagtgatatctataatcatacacaaacagtgatataaactcgaaacctggcttcaatttttcaggatctggtaactcctgctttttgaaaggattactacattcagctttactcgatgatttctgagagtgtaatggtatctgcgagtatacattatgcaattttttatgtaactcttccatctttcctgatatttcatcagctctgtccatatctatgagaacctgaaaagaaacacatcaatcaagcaccgagaagacgcataaactgcagtaggaacatcaaaggttttggttacatttaatatacctgggcaggatttttgttgaaaatgggcgcaaacctctgccgacaatactcactaaaaagtaaagtgagaagaattaacggtatggtgaaacccgaagcaactgttgatagctttaatccgaaaaaccccaaagctataatctgtgtcaagatcagtgaaaagattgttgtgttgtggaaaataggccagtattgtccaccgctttcgtactttgtaatatacacgttgagtatctgcaaatagaaacaattctgttgagcatctacaaagggttgtctttaaaaatatatatcaagagttctttttactcaatgcatgagcttggcactactaatggctcttatcacattgtacatgactataaacattgcagaagcaaaattccgaaaagcacaaatccaatttccatctaaaacatgcaggtcacaaagtaactaaacttttacaaattaggtacaagtccattatgatgcttttggagagattaactgtgatattatgtaccagaaatcagagaacacacttacttgatttttgtatatgaaatatgcaagg

SEQ ID NO: 6161 - DNA, 1555 bp, Arabidopsis thaliana landsberg
tctctacaataatatgaatctcgtttattcttcttgcttgcagaataaaaaagtattaatttataaaatacgtctattcgaacgaattatttgcgccgagtaatcaagaaaccaatattatattagaacttcacaaactcaagtaaactcaaaaagataatctaaactaaaaagtacaaagacttggccatcgattggattatctataggattaataaatagagtatctcacttactttaacttatatttccatccatactttaatattaatatccgttgatattatacttactactgaaatctctctctctctctctcatatcaacatgtagaaggggaagaagatgttcttctcatcacgaaaagtcagcgtctctctcttcatcatcaacctttcttcttcttcttctcaatcttttctcaagaaaatcacaaatttcccaagaaaacactcacatatatgatgctatatatagaaagatagtctcatctaattctctctctccctcggattcgttagatgtgatcattttttcttgatttttgatcagattcttgcgtatagctgtatatatacaccaagatacactcatcatcgtcatatatagattatgtgcagcgtctctgagcttcttgacatggaaaacttccaaggagacttaaccgacgtcgtacgaggaatcggaggccacgtgttatcaccggagactcctccctcgaacatctggcctcttcctctgtcacatccaacaccatcaccgtcagatcttaacataaaccccttcggagatccctttgtgagcatggacgatccactcctccaagaactaaactccatcacaaactccggctatttctccaccgtaggagataacaacaacaacattcacaacaacaatggtttcttggttccaaaggtatttgaggaggatcatataaagagtcaatgtagtatcttcccaagaatccggatctcgcatagtaacatcatccacgattcttctccgtgtaattctccggccatgtcggctcacgttgtcgcagccgcagcagccgcctcgccgagaggcatcatcaacgtagacacaaacagtcctagaaactgtctattggttgatggtaccacgttctcctcgcagattcagatatcttcccctcggaatctaggccttaaaagaaggtacaaaatttagtttatcaacttttctcgatcttggatcaaatgattcattaattgttagctttacacacgatatattgaattaatcaaagatggttttgtgttatgatatgtataaaataattgggatccaatttacattatttttatgataccatatagagtagagtgaattagggttctataggccacttggtagctaggtttataggaatctatcaatcgctattaacattcggaaaaagtcggatgcatgcattgctaataatagaatgaattatatatggtttgtttgtttgtgtgacacttccctttattgagttttatagggggttttattttatttttgtttgtcttttatcaggatcaatatc

SEQ ID NO: 6162 - DNA, 2303 bp, Arabidopsis thaliana landsberg
ttttctttgtagaaaagtaattcaatttagtgctaaaccttactacatttattttaaatcaaaattgactttggtacaatagtagatgagaaaaacttaactagacaaattatcggtgtcacggataatcttcttggaaggaagaacaattgctgccactggtttatccgggaatccaccgccttcatcgatgatcaatctcataccatcgatgtgaagttttccatggtgcccgctaacaacaacagtatgtttatcatccagctcctgaagaatgtttcagagaaagagatttcaaaaactaaggaagatcttaacacaaagtttgattctttcgatgccttacctgtgggatgtcccaaacgtttttcctaccacttagatgttgtatttttgagatgctagtgtctttagctctcaaaagcttcagttgttcttctacgttattccctttctctaaaccagcatgtacggcgatcaacttacaatgcttaagcccttcctctgtttctatacaaacatcgtcctgcaacagaataaccaagtggactcatgatagctcctttgttggaattagcatggatgttaccatctaaggggttgcaagagattaatccgtaagtcttaagttcgagttttgtaaccactaaactactattcctacaaacatcacagggtagcacggtaggagaaaagagcccgtaccttttcatgaacccataccatattggtcaagaacttcttgtgactctcaggtactgccttcatcaaatctatcaacggaatagataacaaacaagtattaaaatgtcatcatttcatcagcacaaagatgagactcatgagaacatgtaaactccaaatcgagaaagattcaaactttagccaaccacgtagctctatattgaaatgtgaacagatccaatcgttgcatgaccaccaaattcacaagaatgacttgtacgagagaatagaagtgtgtacagattcaatcgcagcttaaataaccaaatttcacaaacaacttcaaccagcttacaagtttccaccaaatgtaataacaaattaaaacctatgaagaacccaaaacacaatgattgagaaatttaccagaagatccatgtggaacgccataagattcaaaagtcgatccagcatcgtaaatcgatcctttataagccatccctttcacagaattgaacgtagccttaattttaccagcccatcttctaccttgaagatgcatatcttcgaacccttcacctgtataccatccttctgtctcctcactttttgagtactccttccacgtatccttcaaatcagatccatctgaaggacgaggcaacaaacctaagaacccagagaaggcaaagtcatggttcccggcgagaaagacatgagtttgatcgggatgtttctccggcagagagattaagaaatcgatgacttttcgagtctccggtccacgatcgcagtaatcgccaaggaatatgacgagagctgagctgaaatctgatgggtcgatggcagattggagattaagccagaggttattgagctttgatatgtatccatggatgtctccgacgcagatcaccgttcgtggtttttgcgccattagtctctctctgtttcttgaaatgatgataatgtacttgtgggcttcatgggcctttggctatatatattatttcgaaataataacatgtttttttggtcgtctagtttttcttagcttcttcttatctcctttctaagttggtggttcataagctaacaacatgcaaaagaatttacaagtttcaattttttttttcataacagtgttaagtagttataccattttctaattttggaaaaaaattatcaagttatacaagtagcggaaaagaccgaaacactaattaaaaagtaacaacagaacaatcacaaaaactactagaagtttcaattttaatatgaagacatgatatacttaattggaaaaattatcggtgtcgcggataatcttcttagaaggaagaacaattgcagccaaaggtgtatcggtatatgcaccaccttcatcgatgatcaatctcaagccatcgatgtgaagattcccatggtggccgctaacaacaatagtctttttatcatccagttcctacagagtgtgttccagagcaaacaaagtcatacaaagagatttcaaaagagagcaagatcttacatacaaagtttggctctttcaatgttattgttacctgggggatcccccaaacggttgttcgaccagttagaggttgttttcttgggat

SEQ ID NO: 6163 - DNA, 898 bp, Arabidopsis thaliana landsberg
gtgactactgcgatcgtggacccgagactcgaaaagtcatcgacttcttgatctctttgccggagaaacatcccgatcaggcccatgtctttcttgccggaaaccacgactttgcttttgctggcttcttgggtttgttacctcgcccttcagatgggtctgagtttaaggaaacgtggaaagagtactcaaaaagtgaggagagagaaggatggtataaaggtgaagggtttgagaatatgcatctccaaagcaggagatgggcgggaaagattagggttcagttcgattattccgcatatggagtgttgtataatggatcaatatacgatgcggcgtctacttttgaatcttatggcgttactcatggatcttctggtgacattctccattgattcttctttctggttatagtttatgattagacgtttgtctttgtcggaaactgtaaatataggtcaagtgatcgatcatgtaattggtgatcagtcaaataagtaatgattggatctttggttaaccaaaaatataactgaatctttctcgatttggagttttcatattctcatctctgtactagtgaaattatgaaattttataactgttttgaatctattggtattggttttgaaacttgtttgttttcttttccttgatagatttgataaaggcagtacctgagagtcacaagaaattcttgaccaatatggtttgggtacataaagaggtaagggcttttctcctaccatgtgacgtttcttaggaacaaatgttgagttgttataaagcaaatactttttgtctaagaaagcataagctaaatttgtagaaaaatgtacatgtagtaatagttatcatattgttgatactattgtaggatgatgtttgtatagaaacg

SEQ ID NO: 6164 - DNA, 1105 bp, Arabidopsis thaliana landsberg
actactctaacccatcctcagaaacctattcactactcagatttcattatagaaagcataaacgttgaacaggttgaagacatgataacaacagtgtaacagcaggatgataacagaatgaacaacagtaaacaaaatcaagaacaaaatctgaatactgaatactgaatagataaagagaaatctggattacaaaaagtctagcacacaaggtctgcggaattaaaattagataaaaaacttcctctctgcgaaaatgtgaagtacatgctacttatagccaaatattccgaaaccctaatactcaaaacgataaagtattggaacggattaagaactgtactcgacccatgtggtcgagtgggaggtcgagtgaatagctggagtcttcttttcttcttgtgctcgagtgtctggttgagtgcggaatgaagaaggctttgattcttgtcatcgagtattcagtcgagtggcgtgatggtgatactcgagttccaggtagagtgatgaggtcgagtagatgtctggcaatgggatgaagtcactcgacctgggggtcaagtgatgtgatcatgtgatggtcaaaagatggagatgaagtcactcgacctggaggtcgagtgaggtgatcgagtggtggtccagagatggagatgaagacactcgacctaggggtcgagtgatgtgatagagtggtggtgtcttctactcgacctgggggtcaagtggtctcttgagatcttgaagctcctactcgacctctgggtcgactggtttgacatgatcaggtctgcttcttccaattagctcgccaacggctccaaatcacctgaaaacaacacaaatatgcaacatgcatgcaaaactatcccaaacatgcaaagtgatgacaaatgatgagaaataatattaaacagtggtgatatgatgcaatagtgataacaaatggatgctcaaaacatgtaaaatgcacacttatcatatactttgacaaactaaaggcttttcttctactcttagcatagaggacgtttcacccttttctttaaatcaaaatgcctaaagctcgttgagttctgaacccattactagattaacacttttt

SEQ ID NO: 6165 - DNA, 618 bp, Arabidopsis thaliana landsberg
aaagattttttatcatttacaacataggcaagtatacattatctatccttctttttcatctttgtgttacttctaagtctaaaaaacatttggtaacaaaaacagtttgtgaagaacaactcatggggataccttattcaagctggtcagtggttctgttagtagctttgtgtctcgtggtgtcgttcatagttcctcgatctttaccatcgtctcttcttacaaaagatcaaggtttacgttcttctcatcgcagccatgggaaagattcttgaggtcatacatgtttcttactgctatatgtcttgtccattatctattcatcatttttatcatatctagtgttcttttgtttttaatttttaggttaagaagaaaactccaattttagtacaaactgacaaagctctagttgtctaaatctttcttttaaattcactttaaatctgtcttgctgttgatttactccgatactctgaatctgttcttgcacaatccaacattgtcttttcttcttatgtttcttttaacattcgagacttttttgccaatagcgtgtgagaaaaagtgtgactgtgttagactattgttcatgataaaaattaaagttcttttttg

SEQ ID NO: 6166 - DNA, 1132 bp, Arabidopsis thaliana landsberg
attgtttaaaaaaaatttttaaaaagttagagagaaaaattggtatttatgaatttgggacgagtgtaaatgtctcaaacgctctttattcatagtatttatgtataacgactgtgatttgggacgagtataaatgtctggcactcacttcattactatcatgcatgacaactcaccggaactaaccggtacgtgatcatgatttgtcctgcatgatagcatctatcggagccggatcatggacatcacttctcagaaccttccagcaatcggaccaatttgtccgatcatcagaaaccaactaggcaattaatggatcatagtattctatgaagggacgtctgcattggaaacatgcataacatattcttccaacgaaaacgttgtccactaaattaaagaccaaacgaattgcatgagacagtctgtacgttttaaaagtaagccatattcgtcagcccaaatccttggaaatcttgtgtttcttgtacaactagtacttgatttcattatgtcatgtaaaatagttttaattatgatttgatttaaatagacttggcctcaaaaccaaatttgacgacaaaaaaaaaaaaaaaaaaaaacagagctctatccatattgatcgctctttcaaaagtctgtttctttcgtcggacattttaaaatcgctaatgattgatgatagacttattttagtttcaatttggagttaaaacccaatgtcaatatatgtgtataatttatagaaaaccttgtttacgactaattaagctctgtacttgagagtcaattgcacaagtaaccaaaatcgtttccctcgggagaactggacaaaggaaacacgacaatattacatggtttaaaggtcttccattaccagaaaaggaaaagaagcaggcagcgatggaagagtgattagagtaacgctccagagtgaaaatgaacatttgcttattaggagacagatataaacttgactttctcatttcaacggacacactttctcaaaagcttcttgctctttccgacacaactcaaactcgttggtgtagtaatacatgcatccaacgtaagcatccatctcctttgggcatctctggtgaagatccttcagcctgcaatatcaatcatt

SEQ ID NO: 6167 - DNA, 331 bp, Arabidopsis thaliana landsberg
ttcactttcaacttcttacaaagattattttctatgtggtacactcatcttggttttgggatttgcaggaattggttcatgattctctagtgacggaggggacaagtggacttttgactgtgctgcctcgttgtttgatatcatcccttgcatctgtcgatatcgaaagcccaatcacggataaagcaacggaactgaaactggttagctacttgttggagaactcgacaactctgaagaagcttgttctacgtttgaatcagtcttgtagagataaatatgagccaggtctcttgaaacaagtcttagaatctccaaggtgctctagttt

SEQ ID NO: 6168 - DNA, 1899 bp, Arabidopsis thaliana landsberg
aactcatgcagcatgctaagctgctcagaaggaatatctctagcgttaatttttgatctcagacgactcaactggatattgcttccaggaagattcaacgccggtatgttctgctgaggccaacccatcgatgaatggggcatactaccatttccagaaggagatattggtggggtgaacgaatgttgagcagcagatggtgagcctggtaacatgttcaaaactgacgccatgtccatagtagaggcggaaacagcagacgaagcccgaggagatggcaatccagatcctgtggaagggtacaagggacgcaactcctcatttgcgtgagcaaagaagcaaacccttcggttgcaacccattccgtccttgcacaatcgtgttctgtactgagcagggtgtagccagcattcaaaaaccccatgagcatattcacacatatcaccttgcttacaggatcctttcttaaaatccgggcatggaacacacgtatagtgaaacttcctcgggtctcttctccttgcattctcacctgggtgtgcaaatggacattcagtccagtcatgggaatatgctcgagaacatgggcggatcttgaacgagaacatacgaaactcatcggttgaataaatcccgcttttgatatcaggcaatgatggatcaattgggtactctttcttctctgatgcgaaagttacatcagtaccctgtggcttagtcggagaggatactgaatctaaggagagtaacgaggaaccattatcaggggatgatgagagagaccggaaacttgatcccaagctagatgacgaggcatgcagatcttcagatataatctcgtctttcttcaagatctcttcaaggatggttctcaaaccaggagcgtgtggagacacaacaagaacatcaacaggacgattcccataagcataccggatactaggatctgctcctacactcaaaagcaacttgaaaacatccaaggaattcacagaagcaccataagcagcgcaatgaagagcagtacttttatcaggaccacaagacagattcaactcctcttccgggaaagaaagaataaacttcacaacatctaaactcccatataacgaagcaaccatcagcggggttctttgctcaagaaccattcttctaacaaacctctgccgtctgtaccaaagacccatctggttgatacaagacacatcagagagttgccgcctaaacccctccacatcgttgtctgcagcaaactcaagcaaggcagaaaacgaatgttcccattcagcagcatcattcatgggtttggccaaagattcattctcttggtctgacagtgatgtcaaagtatcctctatatccagcttcttagcaagaccacacatccttcacggcactggagaagaaaaaagatctgaaacaatcaaccaaaagataaaaaacgttacttgggtaatgaaatcaaccaataacgtatgcttcttgcaatgtagagaagaggtatatcataaaaaatattggtcaatcaaaatcagcaattaaggaaagctattgaattgataaatgattataataataaaaacttgaccagaaaataaggaaacaaagtaattagaatttgacaacgaaagtcagaagatttaccaaaagaagactcaaagaattaaacggatctaataaacttttctgaaatgaattaacacagaagaaaactaaatctaagaagcatcagattcagtatcgttcagctaaacattcttcatcaaacattcttctactcagaaaaaaattcctaccaaccaaatcagataaacaactttaagaagagacgattcaatataaccaactaaccttaaaaaccatattaattagaaacaaattgataaataaaaaagaaga

SEQ ID NO: 6169 - DNA, 2119 bp, Arabidopsis thaliana landsberg
ttaatatttttaatatatatatattatgaaatataaaaatcgaatatccgacaaatagctcagattttaacggatagctgggcaagcaggatattcggttactttcgaagcaaatacaaaacagaaaattaactattcggacgtagcaaattggaccacaaatactaccaaaatcccgaatattcgtttcgtgtccaccctggtcgaaaacctctctttctttcgccgtttataaggaataggcctgtttcagtgaaaagtaaaaccctaatcagagatataggggcaaaatactgtgttggtgcaatgccaaattaccattttgtaattaagttacatacagattgtgctaattttgaagtcaccaatcatttgcgaacgttaatatgctgggtcaaacatagatgagaagatggtaaagctgtgcaatgtttcagggagtcagatcagaagctgtgtgtcattgacacaatctaaaaacagagatggtcatgcctcgtttgagatatacattaccaaaactattagacgccaagtcacactttttgagttttgagttacataagagaagcaaactgggtttgacatggttcatcaagcgtttttttttgttaaaccagtcttggcaaaaactaaacacaaatcataaacgagagataccaagaaacctaaatattactattctcagtcgaatagaagcttagacgaagttgaagctgtaggtactgatgccaactccttgagcatatgatacttctctcccacatcagtagactctggagagaactttgctgtcctcaaacaagcagcattctttaggacatatgttgccacctctctatctcctcgcctccctttgtatccaatccactcaaatgcctctagactaaacaacaaacactcgggaacagaactcggcagcttccaaccaattggggtttctatcccacaaagacccgactcatgttgtttctaagaccaacatatcagacagagttataagtcaaattatattgggaaactaaaccagataaaagcatattatagagatcacatacatcgatgagtttgagagattggagtttgggggaatcttggagcatagaagtaagaagatcccaccaacctttaacaactgtagacaagttcagatgaacaagctgactgaagattataccagaaggacacataacctgttttttttaatatacacaacaacaacacaaagtaaatattgagaggaataataatatgtaaaacagattcaataatattacctctgagagtgataaacatagagaaagttgtcggacagaagtaagagccctcagaaacttgtgagtaactccttgagtaatgtcaacatgtgcctcgaccaactcaggcatgttctcaatttgacggacgtcgtaaactgcgtcatctgtaatgttaaggtacttcaaagaagggacatctatcacatatcgatcacattgtccataatttttgtcgatcatggataaccgtcgtaaggaaggcaccacgaaagtgacatccatttctaagtcttgatcatgtcgctccacaaacaactcttcaagatttggacaaccaaataaaagacttggaagagatgcgtcgtcttcgtaatcaacagtcttaaggtgtagaactttgagagacgggagacaaactgaagaaggaacatccaatagaacgaaattgatgagtctcaaggtctctaatgtatcagaggtatataggctactcggcaaactgaaagacgcatcgttggaagaagtacgaatattaattttcagctggcgcagacggcgagtaagagcaaaaccaatccatagtccaatatctatagcgggacagtcagggccaagattcagatgcaaatgttttataacaggtgcattgtttgatagcaaagacctgtaaacaaactgagagaagctcttataatcaccagtgtggtagctatcatcgtactcaagttccgaaactaacatccaaagagactgccaccttttggacaaaagacttgtggccacaacatcttttcccggaataaacgacaatatttgcaagagcaaatcatccgaaagttgactaatacggtccgtgtaac

SEQ ID NO: 6170 - DNA, 1220 bp, Arabidopsis thaliana landsberg
gtgcaaccggatataagcctaagaagagttgcgttgtatgcccaaccaatacacctaaggtgtagttttttgagggaagggagacagaccgctaaaggaacatccacaagatggcaatgtttaatggtgagtatgaagctctcaagcgttccacatgtatataggctactaggcaatctgaatttttcatccgaacaattaatagaaatttccagctcacgcacacgccgactaactgcaatatcaatccatcctccaatatctacggtacgacattcagcataaaggataatattcttgagatgcaagctctcgagaactggagcgttattctgtagcaaagacctgtaaacaaacttcacgaatctcatgttttgtcttgtaaaatcatattcaagttttggcacccatctccaaagagatccccatcttttggacaaaagactcgtgacgatgacatcttttgtcggaataaatgacagtattcgcaagagcaagtgatccggacattgactgatgatgtccatgtcaacactacaaaaccaaacgatgaaagacttgaggataaacaaatatccgaatcaaagacacaacaaaaggaaacagagaatcacagaaattacactgattgtttggagatatgcgtcgttccttgtttgtcaagctttctaggttttttttttctttttgtcgtcggcgactaattaaggactagaatagacgagaggaatcataattatagaaaaccctagaagaaagtaaccaggagcttaaattcgcgaactaaagattcgtgcttggcaaaatatttgttagtttcgatttgatccgttattcggttcgatttgattcgaaaaatctggatatccgtaagtgtatgaggtaaattaaatattgaaaagtaatattcgttaaaagcagagcacataacaaataataaaatttaaataggtggatatccgctccgatccattataaatatatatatgtttatagataattacatatatatattaataattttacactttttatatataaggttattttcatcaaattaaacttttagtttttaaaaattaaaaaaaaaaaatcaatgaaatattacttatttttggattaaaattaatgaacttcttttaaaattttgttaatatatatatattaacggaaatataaaaaaatcgaatatcccgacaaataggctcaaaattttaacg

SEQ ID NO: 6171 - DNA, 3187 bp, Arabidopsis thaliana landsberg
  unsure (1)..(3187): unsure at all n locations
actttttttgttttattcatttattggataactaaatacaggaaaaagcttacccacatggcgacattatttatcaaaaaaaaaagaaattaggctgttaaattctaaagttaaaaccatataatatacatttatttatacgcataacaagaacaaaaatggctagttggtttactctggatccctcccgactctctcacatctttggtcgtcgacgatgctgagattaattctctccttggtagtttggtttgtgttcatgtctggtttatttcatgtggttcgatcacagaaccgaaccactgccactactgatcctgacgaaggttctccaaacttgctaatttcgttttagatcatcatcgaccctttctttttttgttactttcattttcaaaaaaaaaaaaaaaactccttatagttcgaaagagacgatgatgatgatgacttataaatatcgggtttttttttttgagtttaaattttaacttttgattttttttgaaaaattggaaatgatttggcagctcgggcgttgaacaagatattcaagacgtggaagataacggcgacgaaagcatggaacataagcggcgaactatgcagcggagccgccatagacgacagtgtcagcatcgacaatttagctttcaatcctctcatcaaatgctactgctcttttgtcgattccactatctgccgcatcgtcgctctgtacctctctcttttctctaactgccttccacctgttcgacgctctgcctcactccaattcttgcgtctcacaggagagctcgtggcatggatgttgctggaccgattcctgatgatctctggactcttgtttacatctctaatctgtatgactcttcacttaaccaaggatttgcacttggaacacactcactcactcactcgattttccttctttttttttgcaggaacctaaatcagaatttcttgactggtcctctgtctcctggcattggaggatctcactcgaatgcagtggatgtatggcattgaacccctttaatcttcttatccccagacaagcttatatcttatgtgactttgtgagcaaatttttatttcttaggacttttggggccaatgcattgtccggaccagttcccaaagaaattggactgcttactgatttaagatcattgtaaggacttcgagacattttcaactgtctggttatttttcgcagatagattctaatgacttttcccttatttttgagctcagagcgattgatatgaataatttctccggttctctaccacctgagattggaaattgcacgaggctagtgaaaatgtaagtgtttgcaatgctttgctcatcatactcaatgtaactttgctctaaaactgtggtgacatttagtattgcttgcatcaacacttgaacagactaaatgtccatacactgaagtacttctgagatgcatcaagtttattgtttctcatattttatgacaggtacattggaagttcaggacttagtggtgaaattccttcatcgtttgctaattttgtgaacttggaagaagcgtaagagttatatctattataatctcgtgggttgttattgtatctggctattcatttagaaacacgaagcatacttctaattgttcataagttttggattgacttttttttttttcattttgtttcagttggatcaatgatatccgacttacaggtcagataccagactttataggagattggaccaaacttactaccttgtaagaagttttcatattgcagcgcttcaaaactttctttctttctttcttttacgctttcgcttatcaacgtatagagtaacggttaacaatcaacacttgatataccacactatatattgaaacatgctttaccgcaggagaattctgggcactagtttgagtggtccaattccatctacatttgcgaacttaatctcattgacagaattgtaagtgctggatatatgttcttttatccttcacttttctacttgttctttgtctcgatactgactgaaatccacaatgcaggagattaggtgaaataagtaatatcagttcttctcttcaattcatccgagaaatgaaatctataagtgtcctgtaaggaatcctgttcagcttttgcttaatcttgatgaacttctgaactcctttagctgttccctttcctctgtttttttgacattttttaaataccatgcagagtattaaggaacaataatctcacaggcacaataccttccaatattggagattacttggggctacgacaactgtaagtatgagacaagatggcacaaaattttgttccagatcttaagatgctccaaaacgttatcctatgtcttatttgttactaaactgagatgatatcctatgtcaatggctttaataattacaagcaatattctttatttgttctccagtgatttgagtttcaacaagctaactgggcaaattccagctccgcttttcaactcaagacagcttactcacttgtaagaatatatttattttttccatcacatgctcttattcaagattcgcagactaagtgaacagaattatcattaccttcattcaggtttcttggaaataacaagctgaatggttccttacccactcaaaagagtccctctcttagcaatatgtgagtaacagatatatgtaggnggaatggtttctccctctgggtaatatgcatcgaaatgttaataaaattcgaaggaatgtttctccctctgggtaatatgtattgacaaaattgtcaatataattcaaagtgctttatctgcggagatgtgtcatacaatgatttaacaggggatcttccttcttgggttcgcctaccaaacttgcacctgttagctcaagaaccatgtgcttaaatttcaaggcacataatacatagcttcttgctgataaaaactttcctcttacgtgtgtgtattattattctacagtaacctgattgccaaccactttaccgtgggaggttctaacagaaggtgacttcgagaatcttgtgctctttttggtgcctggagttctactctatttctatttcagacacatacaactgacagactacatgccatattcctcattctaacaccttttgttgactctataacgtctttacccgaaatgaacttgctc

SEQ ID NO: 6172 - DNA, 840 bp, Arabidopsis thaliana landsberg
gactatattatgatacatgaggcaggcagtactatagattatatgtccatctttgaaagaaggtatatgtttgagtttatgtttgatcaaatgtttggaaagggtagtagtaatgggatcaatgctcctttgaaatacttttctatttctaataattatcgtatccacaacttccgtgggattgagaaaaatgcctgactgggtcgaggcacgtattgcggttactggtggaagtcacaagtatctgaaagagattacttatgccaaaggcctttatgtatgcttatcagtctcagaggtaataacaaatcttgtgatttatttacatatatatatattactgttcctcagtaataatatgactgatgttgaaacaggttatgaatccttacgacatgatcttccacatgcttgttgaccttacgatatgtacatgtactcaaggttggtgggatcttcttactcatatgctccaaggttcccccaaactacggtttctcacactcaccaatgtatgtattctttttatttacttttagtttggaaaatatgattttgagaaatgataactaagtctaagttgttcttaattggtattaggaccattgccgagaacttcctagtttagagaccccggcctgctggaaacggccgagttctgttcccgcgtgtttgttgtccagtcttcaagctttcacgtggagtgggtataaagggaggcaaggagataaagaagtggtaaaatatgtcctgaggaatgctactggcttgaagaaaaggattttcatttcaaaatcaaatgattttggagagaagttttgtatgctccaggagttagca

SEQ ID NO: 6173 - DNA, 1948 bp, Arabidopsis thaliana landsberg
tgtgtcgttaagacaaaaaacctctggtctctggacaaagaagccatgatattgagcttttttcgtataaatgaaaaattgagttggtcgagagtacgtgggccttatcactattatgaaatttatgacaatataacgtattttcgtggccgtagcacaattatatttctgacattttcacgtcacatagttttaaatttttttaataaccgtgatatatacccttgaacagaaaaaatcagttacaaagtggacatccctgaccactaaaactactaaatgtcagacatgtttatagtatttcaataactcgaaattcattttagattttaaaaaggccaatagatatcagttaatattgaaaacatattattaaacttctgaccacatctagttttgtgtttttattgaataaatattgtttgacaaaggcaaaatttgtgttgattatggtccacagacacagggtcatgtctggatcagaagaaccgtgttggagctctctacaaaatcatgccaagtcagctaccaattatctgacgtggcacttatgacctcttctacgcttttgacttcctctagactggaaatattcaacctttaagtccattaagatgcaaacaaaaataagtatccgatttttttttttttttttcgtaatttatgtctctatcttataaacagtaacttcacctctaaatttttttttattaaagaaaaaaatacaacaacgtgagcaccacctagatgtatctatctcatcaaattatattaaccacaaacgagaataaattgaggtacgaaaactaaataataaaagttggaagtcgtagttaatagcgagtcttttctcacgactagaaaacttttaatcttgggtaaaccaaaccaaatcttggtaagaaacatactagaagaaacatacataaaaagatataataatcaatacaaacaaacaagtagccaaagtttaccactttttaagtaggtttactctccttccttcatttgacttttctctatccttctttaatacacacaaatcatatatatacaagtactcatgtaccctgccttttcccctaatcatcacataatcattgttcttcactaaattcatcatcacgcacacacatacacatatactattcatctcattaagtggattctatggataatagatcgccaagatcaagaggaatcttgggtccgagaccaataccattgaaagtccgtggagattcgcacaagatcatcaagaagccaccactagcgccgccacacccgcaaccacaaccaccacaaacccatcagcaagaaccgtcacaatcgcggccgccacctggtcccgtgattatatacacagtatctcccaggattatccatacacaccctaataacttcatgacattggtccaacgtctcacaggtaaaacctccacctccacaacatcctcctcctattcttcatctacgtcggcaccaaaagacgcgtcaacaatggttgatacatctcatgggttgatatctccggcggctcggtttgctgttacagagaaggctaatatctcaaacgaactagggacatttgttggaggcgaagggactatggatcaatattatcattatcatcatcatcatcatcatcaagaacaacaacatcaaaatcaagggttcgagcggccaagtttccaccatgctgggattttatcgccgggacctaattctatgccgtcggtatcaccggacttcttttacactattggaccaaccgatccacaagggttttcgtcgttctttaatgactttaactctatccttcagagtagtccatcgaagattcagtctacttcttctatggaccttttgaacaatgtgtttgattcttgattcagttattatatctaggtgaactaatttacgagtgttcggaaaaaaaagaggatat

SEQ ID NO: 6174 - DNA, 1554 bp, Arabidopsis thaliana landsberg
gggctaaagaggttttgagtgtttgaccatcattgctggaacagattatctatgctttgtagttgcagattatgtatcttgtgtacttcttttttgtgtgtcatgaggtccacaggtttatatattgccgtacctatcgatgtgtgagtttgaattgtcttatttttctctaatcatatatatacaagtacttcccctaatcatcacataatcattgttcttcactaaattcatcatcacacatacacatatacatatactattcatctcataaagtggattctatggataatagatcgccaagatcaagaggaaacatgggtccgaaaccaacaccactgaaagtccgtggagattcgcacaagatcatcaagaagccaccactagcgccgccacacccgcaaccacaaccaccacaaacccatcagcaagaaccgtcgcaatctcggcccccacctggtcccgtgaacatatacacagtaactcccagaattatccatacacaccctaataacttcatgacattggtccaacgtctcacaggtcaaacctctacctccacaacatcatcctcctcctcttcatccacgtcggaaccaaaagacacgtcaacaatggttgatacatctcatgggttgatatctccggcggctcggtttgctgttacagagaaggctaatatctcaaacgaactagggacatttgttggaggcgaagggactatggatcaatattatcatcatcatcatcaagaacaaccacatcaaaatcgagggttcgagcggccaagttttcaccatgctgggattttatcgccgggaccttattctctgccgtcggtatcaccggacttcttttccactattggaccaaccgatccacaaggtttttcgtcgttctttaatgactttaactctatccttcagagtagtccatcgaagattcagtctccttcttctatggaccttttcaacaatttctttgattcttgattcagttattatatctaggtgaaccaatttacgagtgttaggaaaaaagagaggatatgttttacgttttttcatcatttttttggagacactccgatgcagttagagggtttctacttatgcatttcgtgatgattgcgtcatttgtttacatcaatttggcaatttgatgatatgtgtattcttgtttggtgggcttcccacatatactttaaagtttatgttcaatgaatcttgtccctccttagctgctatgtgctcatcaacttatccaatagtgggcattagattaattctatttgtataatcttctaagttctaacttttgggtttgtaggtaaattggtttttgttagtatattaatattcttgaacctactatgcgtgtgatttgaaatccaaaaatagatcgattaaatcattcagtggactaaatgaaagtagtttcacatgtgtaattgacttttgtcgccaaaaaaagaaccaattcatgagagaaaatgaagagcttaactaaagcttaaggacaaaacagtgacggtgagattaatatggaaaatac

SEQ ID NO: 6175 - DNA, 2881 bp, Arabidopsis thaliana landsberg
  unsure (1)..(2881): unsure at all n locations
ttctctgtctcatcattgatcaaattaattaagtagttaattcgacaaagacgtttcaacaagcaggaaaaaacaaatagtatgtgaaaacttaaagggtgaatcacgtgggattacgagagaaagagtcacgtttatatcgagacagctaaaacacccaacacctacgaaagacttttttgcatggttggttcaatcttctttcttgctagatacgagagtatttaatatcaattaataaaatattatttaaatgtctaaaattgataaaacgctcgtctggttggtgagatattggaatgtgctaaaacatttttcacgggattcgagtctcattcgaaaaataaataacatcattttccaaattaagaaaacctatgctttcttgttattgaagaaagtgataagttctgacatgtatctcttgcgtatgacggattaagttctggccagacattcaaggtcctggcagattaatgcagtctcaactaccgcacagctctagcttgacacaccatgtgttatgaccatgttgatggagccttgtttccattctcctatgtcttatcttattatatataagcccttgaattattgattacatttaattatattcatatatataatacattgtcttatcattgtaactcgtatgcatgtatattcgagcgggatgactggaatagaaagcgtgcgtgatactataagcacaacgaaatttattacattattcagggtaacaaaaaataaaaatatgagaattaaaatatttgaagacagatatatgttggtacatttaatagtccgcttaatctatctttgggacgtcacttaactcatttatggttatgaacttgagagattcgccagcatgaagatgcttgctaagtctaatctttcttagtcctccgtcactgataggcttgtatagtcgcggatgttcagcatccacaaattcatctggagcttcaagatctctatccactggtcctaataggaacgaagcaatagtaatcctcatttttgcctctatgcattgcactctatgcttcacattgcataaccttccattgctccatatctatcataaagtttcaaaaaccaaaaaaaataaagtttaattttcatgttcaacatatttttggaactatatactaactacgggtgatatcatcccaccgtagccatgtcaccaaggttgacaagaagcgtgttcggcaatgtgtgtatggggaaaaaggatcctgaagagttgtccatggcttcaagtccaccaacatcctcatcaccttgaagaattgtcaagaaaccaggatccgtgtgtaatatcacaccgagttttccaacagaatccggtttaaaatgatatttgttcatccgaaattggcttggccatcctctcaaaaaattgggctctaccactccgtagctctccgctaatctccttgctagactcctcgcaagatcatcagtagcttttgcatactttagcaaaatctccctgcaagccaacaaccaaaaaaaaaaaagacagcatatattaataatttttgatggatccaaaactgtgattgggaccaatataattgtacaaaaaatgataacgacgtcatcaaaaacattataaaaaagataaattaacctttgatctggcgaggcgtcgagtttatcacaaaaactattgacagcttgaggagatgccatgtcaaaaagaccaaatgattcataaaaaggattgaactcacttagaggcttgtaaccattccctagtaacacatcggtgtttcgcagtttcatctcatatggacgttcatggagatctctaacagtcttcttcatctcagccatcaaagacaaagaaactccatggtttatcaccgtgaaacatccccatctctcactcgcttcacggattttctcattcagaatctgatcattaacctcttccaagtctattgttggaatgactccatttacttccgccattatcttcaatgaaaaggcttttctctagtcaagcaatttggacagctaaaaacagtcatcagagaaaaaagaattacatataagtcgaaccaaccctagcaatgatgagttttcagaaatggtttattttctttatatgatctactcaaagagttttcagaaatcagaaatanagagtaccttaatttcgtcgggatccttattaattatctctagatttctcgagaaaaacgaaggagtaaatgtattgtaagatgacttatcgaaggcgagattattatataaagaagtcgaagtattttcgaccatgcacagaagtctgccgtagtaattaataaaatactctccacgctttccacgtgaatgtgacactacgggcataatgtggttcctttgtgttaacatcatatagatacatcatacatgcaaatacgaatttgcatagggatgcaactattagagtcaaccggtaaaacaaaaatgaaagatattggttcctttgtttttgaaagatataagaagacaacgcaacgccacctcttagcggtttgagatacatgtggcgtcatgggccggatctagagccaccaaggaaggtgcatctgcctcctatgcattttagatatccaactactcttaaagctgcacgccgatggttcttgcataatttgtgccaacacatacacacaatatgcaaaaattagttcttgttgctggccaagtagatcaatctaccaatggtttggagataaggctcaggatcaagtacaagtggcgatttgggaccaaaccaggctgtttacttccggactccatctttacattaactatatagtaattttctttttcttgagagaatgtaaaattttattcgatcaaaaaatatggtacatta

SEQ ID NO: 6176 - DNA, 1333 bp, Arabidopsis thaliana landsberg
ggtgtaatgatttttcttatcgttttctcattcggaacagagcctgtaggatacaatgatgctctcatctccatccttccatccttccctgggatcaagaagcttcagtaaaaccaaattcgagctggttttgagttatgacactgtgccttgtgtatgcttttagataatgaaacttcattcatatttgtatttgtcttttgcttgtatgaaagttcttctttaagactcttttattctgtatgctttttcttatatataaaaacattatggtatttttttttaatcgtacatagatgatttatacacatacaatcccaagattttaacgataggtgattctaacagttaaagatttggacattgctgttatttgacagttgattattcctaacgttggagaagaagctgctttcggaatctttgtataaatgcctctgctctttcgttgatgtcacgttccttcaccactggcttcctcgccggaaatttctccaccgtcgccgctgctctcttaggctgttctacggccctccttggctcataggttgatgatctgtaaccagaaaatatgagatgagagaaacgttgattcatttggtggttctttatcagtaatgcttagttcttgctgtcttcttttagtactcaaatgatcatttgtgtgaacatatatatagataaaaacatgcgtatattatttgtaatgtagtatcatgtatggttaaagatgtggctctagatacattgaacttttgatagaataagcttttttggattaagataaacattagtttatagtgctaaatcattagatacgcatatgtttgtgtatttctttttgaaaattcctactattgcatcttgatttttttttgttaaaaaacttgcaaagaattttcaggtttttattttcctcattttcctgaagattatcctactttcgactattaaacattccgataatatattctgactacatatttattcatataatattttctttcacgaattagtgcatattataagatatattagtatatagtgaaatctgagtcgatgatttgaagtttcgagaaaatacaaaagacagataaagtatgtgccgtgatgaagacaagacaaccataatattaatcgtaggaaggaatacaattattgaagtatggcctaaatttgtgcctaactctcactttaattggctaagcaaatcatccttcaggagattttgtttttatccttagatatttgagatcaataattacggaaaaaggatattaatccatggccgcataatttaaagagatgacatcatctatatttaacgagaatc

SEQ ID NO: 6177 - DNA, 910 bp, Arabidopsis thaliana landsberg
  unsure (1)..(910): unsure at all n locations
gactatatgtagcaaggaacatagctgacaatagtagtctacaacctccgccaactcctgctgtgactgcttcaaatgcaactaccgagagtcctgagtcgaatggatcagcttcctctacttcactggctatctcaaaaccagcatcgtcagccgctgatcnnnnnnnnnnnnnnnnnnnnnnnncaaaagtaagagaccacacaactcaaaggcaaaatgtcatatactctgttggaaaatgctatattttatagtttcaatcagaaagttgatcccaatctaaatggtgtgtaatatgtgcaggtagggttcttcaggagatccaaaaccataaagggtaaacgcctgccttcgtcttgtaaagaggtataaccaatcttcttgaacagaagagagtgtttgatttcatgggggaaaccactgactaatctcttatttgctcttgtttaatctgacagaaagaccaagtgaaagaaggtcaaattctgtgctannnnnnnnnnnnnnnnnnncaatttccaatcgaggttagataatattccattttaattcctgatttagtaattactatcacttgcttcaaccaactcagttaaattgcttctctgtttatcgatcaatcttctagtctgatgttaccggcgaggtagtcaagatactccgagaagatggaggcaagtctctcgtcttctttaacctttcttcgtttttcttaaaacctcggtgtaatgatttttcttatcgctttctcattcggaacagagcctgtaggatacaatgatgctctcatctccatccttccatccttccctgggatcaagaagcttcagtaaaaccaaattcgagctggttttgagttatgacactgtgccttgtgtatgcttttagataatgaaacttcattcat

SEQ ID NO: 6178 - DNA, 479 bp, Arabidopsis thaliana landsberg
  unsure (1)..(479): unsure at all n locations
ctgagattaacttacgaatgcgtgagagagagaaagagatgattaatggagaaggaggagattgaaaggaaaagcgaggaagacgacgaaacggattttgcgttagactagaccgctgctctgttgtagcgtagactttttgggttatatcggaatcatatctgacgttcatttttttctttctgatttggtttcctttaaagttttattannnnnnnnnnnnnnnnnnnnnnnnnnnngaaatttaatccactagtattaattgtgtcacatttgtttctcaaaaatagaaaaaaaaaaatcaaatctatgtgatttggagtttataaaaatcatgaaatcttttctttactaaatgttcttcttcactccttattcattaagcatccacaatttcccatcatattgntttatactttatatacttcttcaagtcaatctcagtctcatttcgaacttcttcccaacaagtaacgaca

SEQ ID NO: 6179 - DNA, 3287 bp, Arabidopsis thaliana landsberg
catctctctaaaaatgacacatccgtttttagtttttttaattgtttttataattgttgcaatttatgggaatgggatttcttgtacttgcattgcttattcaagcacctcccatgctctaaaatgaaataaattaaatttctaataaagttcttaaaaaatttattttagaaacgaaatggcaaatatcgagaagctccaattttctgccttaaagattaccggggctaactacatatcgtggattaccaatgttgagctacagttaacggagactataaagagaataattcttcaacggcccaaaaaaaaaataaaatcggtgatcttccttagaagacacctggatgaaagtgtcatatatgactatgcacacatgagagatcttaaagaactaaggaattctttgaaagattgttttaatcaccaaagggacatcactctcccacttgcccggaacgaatggcaaagtctaaggttccaagactttgacaaggtaataaaatacaattccgccatgttaagaattgtggccaaactgagatattgtggtcaaaaactatttctgaatcccatatccttgaaaaaacgtacaccatgtttcacaaaaaccacattactttgtaacaacaataaaggttgcgtggatataccaaattctcagatttgattgtggcgctcttaatagctgaaaagaaagtgagctcctaatcaagaatcacatgtcccgacctaccggatcaaaggaattccctgaggtgaaatgcattggatgttaaaaatccggaaagagaaaacaaaacttttaggggacgtggttgccgaagctaacgcggaagtggaagaggctttaatccacaaaccaggaattaatagcaaaagattcgtcctgagcatgaatcgaaaggaaaagaaatccaagcaaatacttttcaaaaatgtgacagtgcttgtttcagatgtgaccctaaggcacatcggtatcaggtatgccgaactccagcacagtgctctgtacaaaaaatctgttaagggaaaaggaaaggaagtgaaccttgcggaacattctgagggtacaacccaccttgatgcttttgactttgctaatgatctcgatgaggttgtccttgtggaaaactgaaatttctatcgtgtggggctcgaattaatatgtcataaataaatcgacgcttgcttgaaatttcctaagtttgtgtgtttgtattacctatcatgtgtaattattgtgtgcttgtgttacctatcatgtataattatcgggtgttatatgcttgattaataaatttattttctacttaccttaatcgattatgtttatttcagaaatggatcacattacaaatggaatggtatccaaggcaaaccttagagatatttgtataccgaatagtggaacaacacacactattctaaaacaaaaaaaaaaattctctcatttgaaatcaacaaaagttattgttaacacaatatcagtgcccacagacttaattgaatggaccggtaaagcaaattttggattacctgttaggacaaagttctcgataaataatgcattattttctccaaattcaaaaaaacttttgttgagtttcaaaaatatataccttcatggatatccttcgtggatatgacactcagtctgcaactcagaatggaagaagtacatgtgtatcacttctgaaaaatttggggaaaaaaacacattttggagaaattaacaagactcccatcaggattgcatcatacatacattaattcaatagaatcacatcatgttatcaaaagagatcatgacgatttcacattgtgccacgatcagcttggtcacccaggcaccacgatgatgcaaaaaattatagagagctcatatggacattcaatgaaaccccaagagatttatcaagggaataaaagaacatgtgttgtgtgttctctaggaaaattgattataaggctatcgccaagtaaaattactaaacaattaccagaattccttgaacgagcccaagacgacatttgtggacctatacacccaccatgtggaccattctattatttcatggttgatgcggacatcaaccttacttcacaaaccgctgaactacatcctgtaccacatcttatactacatcctgtaccataagtcctggagggtatcatgacacgttcaaagctaaacaattgaagaaaggttcaacttagctgtgcaagatattttgagcttcctagagctaggagtaaactggatcgtagcaccccattaccgatatgatctaatagccgaagaagagcttgctgaagcattcacccaaatgagtcttgatcgaactactcccccacgtatgaaatatcgtttgacaggttcaaggacctctagaaaccaagagaagactttggagcttcaagagatggacgattcaagtgtcacatctgaaagtgatcgagagagtcaagatcaagaacaagacatcaaggacgtggaaaagctcgaggacattgatcaagctactcaagaggaactccaaaaagacccctacttcaaggaaccagccaacaaacgagcacaagacttgattccagaagtacctcaagaagtactacaggaaatgactcaggcgacatctattgggcctaaaacgcattttggtaaggtttatttagtttatactatctttgcaggtccacacagcccagaaaatggctagaatcatcaccaaccgtgctcctcaagagaacttaattagtttccttattttagcttattttctttctaaaaacaatggtttttgtgttttgattttatttgcttccttgttgcgtttttacatttaatttcggccctacggctagctgaaggactcttataaagtccgcctgcagcagttgtacgatttttcacctttgactatcaataaagaaccgcattttctcacttcttctctttaagtgttcttaagagaataagattgttctttgtcttctgtgtgcgattcaccaaggccaagtccgtgtactgtatcagagactcatcacatctctgtggtgtacttcaatccgccagcacttcccctccattcgatcccacacgagagaagcgatcaccatcgtgttagatcttcatcatcgaccatctttccttcacaagagagaagcgaccgccagctcgtgaacccaccatctctatcagatacaaaacacaccaccgagtcttgtatcaaaagacccttgagaacatcactgagcagagtggtacaaatagtcctgac

SEQ ID NO: 6180 - DNA, 630 bp, Arabidopsis thaliana landsberg
catttgttgagcgttagggcatcatcatgttaggcatcatgttattaggcatgatcatgttacccccacccatcataggtttcattttgttaggcggaggtgggtggtcgtcaaactcatcatcttccaaatcatcatcaaactggtcgtcatgttcatcaaactcatcatcgaattcatcactaaaatcttcctcatcatcatcatcaggaacattgaacttcacagccttgtgattaggattattaggcatctgaggattcttgttcataggaacagagccaggtcccggacctggaccaccctttaactgaggaggaagcttcagatcttgaaaccctttcatctgctgaagttgttgtagctgctgaagctgttgaggattcaactgctgcatctgttgtggtgttaactgtggaataaccatcttcggtggtccgccaccaccacctccgccgccgcctcctcctccaccaccgcctccaccgatcttttggcctttgttattgttagcagggcctccaccaccaccgccaccgcctttgccgccatgatcaatctgcatggctttgaactgattggccaagttgggttggttctgattgttgttagatcctcccttgggagctc

SEQ ID NO: 6181 - DNA, 3258 bp, Arabidopsis thaliana landsberg
tcgctataggcgaagcggtgtttctgagcactggttgggctgacgcgctattttgtcggcgatatttactgcactcgatcgtattggatatatctgcgaagcttcctttgaaatcctgcacaagtacagtcatgagaaaacctcagtgctactgaccattcttcacgtttttgcttacattgctggagagaaaatggtgttgcctagtgagcatggcatatcaattgcagtgatgaaatacattgtcatgtttgtagaaaacaaacattttggtactgtggagggcagttctcgattgcacccaggcaagaacaagtgtccattctcagacaggtcttcctcgctggaggctatggcatctaagctcatggaaattcttcaggaatttactgagtctaatactttgcataaaagcttgactggttcattgggttctagccacctagagaagaccgagtttaggccggcacacaaagatttccagtgtgtattgaccagggatcaaagtatcaatctctgtgacattctatcattggtggagcttattgcttgttatacggtgcgcatttaagaaagttcaagagcatttccaactttgacataacgttttgctaatttttccatgtttattgaaccaatttgattttatatctaaatgcaggcttgggattggactagtgcgaacattgttgctccactgcttaagatgctgggaatgccattgccaatgaacctctctgttgcaatcgtctcccttcttgggcaacttagcaggtaatattattaagtttgtctctttatacagaagggaccaatctgatgcaatattatccaaaatctcatctccttttctttttgtattttccagtattggagtggatgctggtggctatgaaaacgaaggaatctcaaacttgagagtgaaactgtcagcatttctacagtgtgagacgacactaaaggccggtttcgcagtgcagatagcaactgtgagctccctcctgaagacgctgcagctgaaattcccaatagactttcaagacaaaaccaccatgattccgggtagtggcgaccaaagcttatctggttcagtcaatgtggtgaccaagtggttgtcgttgttgagcaaggaacaacgagttttcgcatttgagtttctacaaaccaatgttgttagatgattcctcagttcaaaaagtcatcaaaagcagtaaattttggacatagtctcttactgtttgattcttcattgactgcctcctttggtcataggatgatgcagatatgaatgaagattgcattgaggttccaattttttctattatttaaaattggagctttgtgtttgtggtgacaatagtataaaccactacacgatttgcgtctaattcagaatgttaagcaaacccaaatgacaccactataagtaaagattgttatatatcaaaaatagaaatacaaaatgtagaattctccctatgacaaaacacaaatacatattatttctatcttgtgtatatattttctttattagaatttaaaaacccattgaacaaggaactccaaatccatcaaccaatctttgtcggaacactctgttcatgcctgaagaaattatcaggatcaaactcacccttaatcttcaccaacctctcgaaattccctttgtaatacttagcaccccactctctagcatcagtctctccttcattagtccccaaatcaagatccctgtaattcacatacgcctgtctcgggttcttcgacacatactgctccatgtaactatacatctccctaatccacttcatatgcctttcctcgctcactttcccatcttgccacgtgcttagccactgaatcttgaacaatgtcccgttcctatgagggaaaggtatctctgactcggagatcctcgacatcattcctccgtaagggttccatatcgttaacggtgaatcttcttctagaaacctttcccataatccttctaaaccttctactggaattggctctttcacaaagtctgacttggctttgaagtgattcttgaacaatgattttccggctagtaaagcttccggtgctgcactgtttggaaaacctgcaatgtacatcactgatttgatccagctcatttctgtgcagtccttcttcgtcagtcctaactcagggaaactcttctgcatcacctgttgtggttgaaatttacaaatttaaaagtttattgcttgaattgttaaaaccgaaaagataaaagagttcaaatttagacccttaagtttggatttgaacactatcatacctgcaagagccgattggagtctccgagaaactgagcttggtacgacatcgagatggttcgatttcccggtttggtggttttactggccggtgaaataatgacgcgaatgaagagatcatcgtcaagcttatcagcgatttgttcccatttgtataaaactttagttccgtcttgctcaagcgtcttcgtgactgtgaataccgtaacggtcgccggaacggggacgagcttaatcttccaggccaatatcacgccgaagctaccaccgccgccgccgcgaatcgcccagaagacgtcttctcccattgccgcgcgatcgaggatttggccgttggcgtcgacgattctggcgtcgaggacattgtcagcgccgagaccgaacttcctcatcatggaaccgtacgctccaccgactaagtggccaccgatgccaaggcttgagcataaaccggccggaaaaccatgggtttggcttttctcttggatcctgttaaccgagacacaacaaccgattaattatcggatcattaacgaaagctcaaccatgtgatcggtttgattttattttggtttgttggttaaaccggttctgattgaatcgacgaatggaatatttctacatatgccattgattatgattaacttttcaattaggtgtagaagatagtaagaatgaaatctattggtataactcactctaatgggtattaaaatttggctaatgaggggggaataactgaaagtattttatatataataaaataaatttgaccaataaaaaagaatgttagtttaaatatatattaactttaagaacaaagaaataactattaggtttttgcatttgggtaaataagttttgagttcgagatgacaaaataactatagatggaaaataaatatattaaaagtcataaaaatagaaaaaatataataatataaaataaacactg

SEQ ID NO: 6182 - DNA, 705 bp, Arabidopsis thaliana landsberg
tcaaacttagctttaatctccaccaacctttcaaaattacccttgaaatacctattcccccattctcttgcatcactccctttaccattcatccccaaatcaagatctctatagttcacgtacgcggatctcgggcttttcgatacatactgctccatgtaactatacatttccctcatccaccccatatgcttcgcctcgcttgttttcccatcttgccacaaagtcagccattgtatcttgaacaatgtcccactcctatgtgggaaaggtgtctctgtctcgggaatttttgccatcattcctccataaggattccatatagtcaatggtgagtcctcttctagaagcttctcccacaacccttctaatccctctactggaattggctcttccacatagtctgacttggctttgaagtaattcttgaacaacgatttcccatcgagtaaagcttctgatggggcagtgcttggaaaacctgcaatgtacatcaccgatttgatccagcttgtctctaaacaatctttcttcgttagtccaagctgtgggaaactcctttgcatcacctgtcaaacaaaccgcggggttgttattgtcataatcagaactttccttccttaatttatcataacgattaactttcataaattaacaaacagacccgtaatattacgagatttaaacttgacccgattaatttta

SEQ ID NO: 6183 - DNA, 1946 bp, Arabidopsis thaliana landsberg
gtttatgattaatgattttagttgtttattttaattttttatatttttgttataacactatagaaatgagaatagggcatatatttagaagttgaaaactttctaagcatttcaactatttttaacaaaagtgtagacagcactataatagtttaaaaatacaaataacaattgtttggtataaaacaaacaattgatgagttctataaatgattatcttcaatattatatagcttaattagttaagttaatatatataatttaagatggattaaaaaaacaattttgtcaaatttctaaattatattaatatagtacaaacataaccttagcaaatgtgaatggtagagcatttctgaaggcatctccatcggtggtatctctcattgtttctcataattaaaataataaaaaaatagaaaagaaaggagaaagagagagaaacgtttctctgcccagaaaccttgaggtactctgacacacttattttgccacatgtattaattgtattggtgtaatctaattagttaatttaaatttatttgaataataaaataataataaaaataatatagtttattcatcatatatcctttttcagatacttaccaatgagaatggtctgagtatccaacagcaataccttcaatttctcaaaagatacaaaatgaaacactcttgtagatattgatacattcgtaaatctgatgtttttaataaataatatttccttaataaccttaccaaatgtgaatgaatgagtatgcatttgtatgaatacatgtttaatctaaaccctttatatattaaactacgtaaggtttcttttagacttgattatatatagttttggtatatttgattatgatatttagttatatgctaatagttttaaacttgtattatttcacattgaccaaaattaatgggtgagtgcataaaatgttcaacttgttaggtgtggtgagttataatttcaacatttccatgacacacaagtatgacgccttgagaaacatgaatgaaataccagatagttttactagaatcgtagtattacgcaatgcatttttgaatggtggtgtaattctaccaacaatggcatcaattcgatggagattcctgttattaaaagaaacgttgttgcaaaacttgaaccaattcctgaattgatggttacaaaaaggcaggaacttacatgaatgattgatacatgctcataagaagtcttcggcctgagctcagcgtaagagataaagcatgtcgcagcgagcagagtaatggtcataccagtatagtaaccaagacgcaggaggtgagcaatgatatccgtatttcttagaaatgattgttttggtgtcagcgggctctctccttaggataaaaggcgacagatggtaataaagaaggcttatgaactggtatacttctctgattagttttatattggatttagcatgagagtttgttagagtatattgggtaagcatgaatgtatagcagtaactgaacttaaaagcaattgaaacaactagtcatatttcacttgtcttgggataacattcaagatgaagtaaatcgagttttttttttgttaagatgatagcttttacattcaaaatgtgttaacactccatgaataataccaagtctaatttgttggagcttaggttttatccaaggagaatgatgcgcatgacattcacctaaaaaactttccccaatctctctgtggttattagttccccacatctatggcacagtcattcttagaatggagaatttcgaaacctcagaatgatcttatcttcaacaatagaatatccctgatctcattaacaaaaggctatcgtggacctcaatgtttggaatgaagtggtatctttacaaaataaccaagaaatccaaattaaaacagaatgtgggcaaaaacaaggaggaatctc

SEQ ID NO: 6184 - DNA, 1256 bp, Arabidopsis thaliana landsberg
cgtttttaccagatcccgaatttggaggagctaaactggcaagagtccaactcatggttgtggcgtccatcgtcaggtctgtagcaatgtcgcgggatatgaacgatctccaatacttgaggggcatttctcttctacaagggctaaaaccctggttaaggtaaataaaaccgtgagagttatgcttcccttgctgtacaagtcaacaagtttcacttcttcttcttcttcttcttttttttctaggtatttggatgccaatgaacaccataagtttctcaagctggtcttgtcagatatgggagagtgtgctctctcggtaattagagaagcagagcgtttcgatgaggcttttgtgcattctttttgcatctcaacactagaggaatattctgtatcccgttgccaaaatgtcatttttataaggtgactttcccaattttacatgtccttctgtggctctgtctctgtctctctctctcgtacgccttgactgtcttgttttgtatccagttctcccgccaggtactttctttactgtttccgtccaaggaggcaaaaacatcactaaatcttaaaattatgatgtctgtgttgaaatttgtggcaggtgaattccaggtatgtgcaaaagtctcgtgtccagattagtcagtcattagatgtttctagggcattattatgtttcttgtggcactcactgctctgctatgttgaaactctcatagcttattctctctcaggttgaacctaaagcaaattggtcgaagcttcttgacttagtccaaagtttttttaggtgaatgtcatgcgcatcgttctctttagataaaacatgagctccagaaaattagatttggtattattattcatggagtattaacacattttgaatgtagatgctatcatcttaacaaaaaaaactcaatttacttcatcttgaatgttatcacaaaagttttttttattgcttttaggttcacttactgctatacattcatgcttacctaatataccctaacaaacactcatgctaaaaccaatataaaaaaaaaaaaccagagaagtgttcataaccatctgtcgcctttatttttatatcaccgtagtgttctcctagttccggaggatcttggcgcatcttaagtgcatagcctttctttttggcatcatcgttagactgtgataagactggaaaaaatttgtctctcctccctccactcctggtcctcgtcttacactagaaccagcagtct

SEQ ID NO: 6185 - DNA, 946 bp, Arabidopsis thaliana landsberg
gaaactatcctttgctcagagaaagcaaggcatgtaccaatcgttgctatatattctcctacctgttagatcattaaatctaacacgattaagaatggtttaagcaaaaagagtaactgaacttggaaaattgtactagttgcaagtaagagaattaccagcttcattttgccatctatggtcaacaccggattcaaagtatccaaaccctatgagaaccaaacaaaaccaaacttataaaacaagagaatgcaaaaagtgaaatgaaagaattggattgaactaactgataaagtataaggagcatctgctggaatgtcaatgtgccttgaaacgtcatcaagatcaatcataacatgttcatcctccatctctgtatcaatgtgtttattagggtggagaagaacacaaagatatttatgaatccaaaaactttctcactttctgaacgcgattagatccaagaaattatcattcttacatctcctaaacaacaaatttatgttgagaatggttcacctctttctttttttcctttcaatctttcgagcaaattcgaaacccttctttaagtgagggaatcgaagaacaagcctgatgaagaggaagaaacaaaaaaaaaaaaaaaagtagatcaattggtttctctgcttcttctatgtgaaaaatttgctctgttatgagatatcaaatttgggccgaatattataacgtaaaagcccaaccgaaggagtggggacattatttgggtgaaccaaaatctttcaccattatatgggcttgtgggcctaactgccttcgaatttacttagcttttgcgaatgaatgaataacattaataaaagctggtaagtggtgatcattgaccagagtttcggtcggtcggtggtaactgaattacgcaaaatcgaaccaatgttcgtctagagatcacggacgtgcttac

SEQ ID NO: 6186 - DNA, 2234 bp, Arabidopsis thaliana landsberg
ggatataagcggtcacatgtaaggctaccaaaagaacaaagaataagtgggtacggactagtgcaggacacgtccttcataattcaaaggcaaaataagagggacaagaaaagcttaatccagttactctgtttatcaactaaatagaaacaaccccttgaattattgactaatatctctcaaagaaacatcaccaaaacaataagaaagaaagaaactaagtaattcgtttaactaacctcctcttgtttccttttcttttgtcttttgggtattttttcctgaatatgaaccaagcttggaagataactgatgagaagtggccaattgaaatgagctccctttgtcctctctttataaacttctttataaagatcaactccaacaatgtagattctggtcttatcttcatcatctatgtctctatcacaacacactgccactttattctcctcgtccaacaagaagcttgtcacattattcacacttggtaagttaaatatatcataatccactgctaagaagaagttgctccatgtcaagtctttggcctcatcaatcttattggtgacccatatcctcatctcatttgaaaacgattgaatattttgatgtaacaccgcaagtttttctcccccaacaattgataaaacagcggtatcttcagaatcaaaactctgatacggaagagggagacgctcaaatctctctgtcttgaaatcaaagtacagcatgaaaaagcctgtttctttttctccagcaacaaagtaagtatttcctttcaaagacatgccatggcagaataagccccattcacgagtgcagtagtcatcaagaaccctccatgattcagagctaaagtcatagatctcaaattcactaacacaagcatcctggtcgttgtaataaaagcaatacctcaagattttgtagttgtggtaagaagacttgctgtttacgtatccaagacaatacgaatcatcactacggtaacgtttgctgggtttgatccacctggtttgaccggtacatgggttccaaacaacgagtctagtgttttccttagtggagcataatattaaaccgtcacagtgaaagattttggttattgtcaaatcttctgatatctttaggttgctaagtttattgtaaactggagagatggatcaccgctgttgagaattccatggagatcgtcggtaattttataaaccccgaaattactatgtaacatcaacctcctttctgatttaccaaagtttcttcttcacgaatctcggatctttgaataaagcgtaccatcgtttgcatgtagtatgcaactttgctagagacttggtcggaaccctagagagtatttccgattctatttcgtgtggaagatccgaaatcaccatcgtctttctcattgttactgaactggtagctcgaggaagacagcgtatgagggaatcaatgtatataaaattagggcatcagttacaaatccgaccattttattgaaagtttgatatagtttgtttacaaaaagcccattcttttttctttaaaagtccattagcttcttgaagtctctcttctttgaactagagtaggacattcagttaatcacttaaccggtttggtttcggtccgatttttgaaattggggatttttggatttttaaaaatatttccgctcgaaaagatttttagtttggtttggaagttttaggatctaggatctatattttggtttgttttttgaaaaaaaacaaaataaaataaagaatgaactgatgtttgttgagatagtagaatttaacattggagttgacaaagagtgattttcctcaaagttccaatcactggttatgtggaggttataagctgactgcaagacttcaatagagtagttggaaaatatggggatcaggagattaaccatcttaaatatatagttgcgattaaatggtttcactgaataaagattctacttacctgatgatattctccaagactacccatcaaatgatgtgaaagtggatacatataagcagaacattactgtatttgtgtaaagatcaataaaccaaccgtccgatttcaaaagtgaaagaaggacatgtgaaaaacttcatccagttccttcgtgtttctaaactacatagaaaataattgactaacctcgcttgatttcattttcttctgcttgaagggtatattttcctgaatgctgaccaaactaggaacat

SEQ ID NO: 6187 - DNA, 873 bp, Arabidopsis thaliana landsberg
aaatgagtagctacacgtgcgaaaggaactgagctcatatgatgacacatctacactatgttaatggcttaatacttacacgaataagtctaatatgcttagggagcaaacataagctatgggaccaacacgccaacaccataactctatgtattatcatgcagttgaacaagacttaaagcttcgattagatagaaaagcacatcgtccactagaaatatcagacacaggaagaatcgtggggacatgatcgaggagaacggcctaggtttgtcgaaaaaaggacaaaattggaaagaaacatgggaacctaagcattaagcccgggtgaatactaaactctttgtgggaatgatcgagtagtggaatccggagactaattcttttgacgtgaggaaaaattgtaacaactcaaatccaaaagaaatagagggtacaacccaagagcttgagacccaagtttctagtatatatgctaaaaacataaaagaagatcattgaaggtaatgggtttttcaataaatgatatgggcctattgtaacgaaaaccctaatttctatatacacttatatatacgctttctttcttcctcaagcgatcagatcagcaataacaagaaagacaatgatgatctccgatcttccgaacgatttggaatctgaaatactatctagggttccaaccaaggctctagcaaaattgcaaactacttgcaaacgatggtatgctttattcagagatccaaacttcatcaagaagaactttggtaacgcaccaagtaagttgatgttactgagtaattttggagtttattcagttagtgtcgatcaccattgcattcacaaaacgtcgatccatctatcgagttttct

SEQ ID NO: 6188 - DNA, 4779 bp, Arabidopsis thaliana landsberg
ttttgatgatgtgctaatctatagcccggatctgcaatctcatgtgaagcacttggaagcggcctacaagcttgtgagtcgcaatcagtattatgtgaatgcgaacaaatgctcttttgggctggaaaaggtatctttcttggggcatgtgatatcagaagaaggggtagcagctgatccagaaaaggtatcttccatgttgacgtggcctgtgcccaaaacagtcacggagttgagaggcttcttggggttgacagtttactacaggaagtttgtgaggaactatggtcagattgctaggccgcttactgagcttctgcagaagaatgggttcaaatggtcagatcaagcggaggcagcctttggagccttgaaatcagcagtgactagtcttcctgtgttggcgctaccagacttccacctgcccttcaccatagagactgatgcatccggagtagggataggtgcagttttgtctcaagggaagcgacccattgcattctatagtcaagctttctcatccaaagggagggtcaagtcagtgtatgagcgtgagttgttagccatagtgaaggcggtatcaaagtggaagcactacctcacaggacaacaattcatcatacggacagatcagaggagcttgaggcaccttttagagcagaaatcagtgtcaacggtacaacaaaggtgggctgctaaactgttggggttgaactataagattgagtacaaaccgggagtgcaaaacagagtcgcagatgccttgtccagaaaaccacctcttgaggaattgaaacagatcaccttaatagcaccactgtcactgaataaggaggaggtcagggagcagataaaggttgatccatgctatggaccactggttgtcaagttggaaaaaggagaagggaaccagaatgggtacaagctagagcacgggttgttatacaaagatgggaaggtcgtaatccctacaaactcaccaatgatacctaagctattggagcaattccactctagctccattggaggtcatgaaggggctctgaaaacatataagaggctgctacaagaggtttattggagaggaatgaggaaagatgtgataaggttcattactcactgccaagagtgtcaagagaacaagtatgccactacttcacccgcaggactcctgtctcctctaccaatcccacgacaggtttggtcaaatgtcagcatggattttgtagaaggattgcccccttccagagggttatcctctatcttggtagtggttgataggctaagcaaatacagccatttcattccccttaaacatcctttcactgcgaagatagtggctgaagcttatatcagagaagtagtaaggttgcatgggttcccagagacggtggtatccgatcgagacaaggtgtttctgagtcacttttggacagagctgtttaaactgcagggtgtggccttgcacaggagctcagcataccatccccagactgatgggcagacggaggtagtgaaccgctgccttgagacatatctgaggtgcttcactagcaggaaaccaaccaaatgggctcagtggctgccttgggcagaatactggtataacacctcttaccactcttctactcagcacactcccttctttgtggtttacggtagacagccacccaaactgttgagatatggtgatacacccacggcgaacgccaatgtggaggagttgttgaaggatagagacagtctcttagttgagttgagggagaacttggaggttgctcaggctaagatgcagaaagaagctaacaaacacaggagagaggtggagtttgttgtgggagataaggtgtatttgaagttgcggccgtatcgtcaagtgtcggttgctcgaagaagaaatgagaagctctcacaaaggtattttgggccttaccaagttattgctcgcattggcagggtggcgtataggctggaattgcccgtgggaagccgcatacacccagtcttccatgtgtctcagttaaaggcagctttaccaaccactgaggtagcccaggacattccgccaattctcacacagtccttggagtgggatacagaaccagaggagttgctggactaccgacagaccgaaaaaggtgagacagaggtaagggtacaatggaaggggttgccctcttgtgaatccacttgggaaccactatccgctatgttgagtcagtttccagattgtaaccttgaggacaaggttatttcactacggggaagtattgataggttggaagcacctatcacgttcatgaagaagaagaagagatcaaaagggaggaaggctcgtgtttggtcgaagaaggaagaagaagaaagtggctaagagtctgttttgaagctgaagtgtgggagagcctctatttgagagagaaggttcacttatacacaaataatctcaaaacgttgtcgttcttattacattatctgtcgaatgtacttaaggaaacaatacccatttctagggttttatcgaatgaaatcaaaatcaacttcttcctcttatctctcctcttcttccccgctctgctctctctctcttctccccatttctggttctaaatccttgttacgccttcaggcttaacaaattggtgctttcgttgagagtcatggcgagttctgagtcacgccaaaccacaccggaactcgagacgcgcgtcgttcctgacacgccgcaagcgactgagacgccggaacagagagaaatccgtcgcgacagagaaatgcagctgcttcgagagaccgttaaagccaccagcgactccgtcaaggctactaacgagtctgtaaatcacctcagccaactcgtgcagtacctcttctgcggcgacaacagaggcactcctccgccagggtttgctagtcccatcgcgctgggtaagcaacagacgccaggagcgacttcgtccagcgtagatccggcgagacaggagaggatcttgccgtttactcaccctaggacagaagaagggttgcttccagccccaaacatagctccaagagcggattatgctccaccgagggtcgagttcgcccaacagcgagttgataccacttacaaatcggtagagctgccactcttcgaaggtggaaacccggacgattggttatttcagatagagaagagttttgaacacaacaatactccggagtatgcaaagctcgaggaagctttaacctgcctcagaggctctgcgattcgatggtggaggcaggctaagtttcgagaaagaatcactaactgggtggaattccaggagcgtgttctggtaaggttcaaaccctgtagaggtgatacagccttggatctattgctgaacatcacccagacgggaactgtggatgagtatagagagcgtttcgaagagataactgttgagctaccacatgttcctgatgccgttctggagtcggcctttctgaagggcctgaagaaaaagattagagatcaggtgaagttgagtaggccgaaggatatatacgacatgatagaggtagccaggctcgtcgaatctcaagagaaggaggggttccaaaggcagttcacaaagccgtcttatagctctccctatgtgccgagctctaagccattggctccagggtttcccaagggcaacgacaccaacaccccaaggagaccagtgagtggaggaccgaatccttgtcgcttctgcggtgataaatggttccctggccataggtgcaaacagaagctgaaatgtaaggaagttgatgaagagaatgagtcggaagctataggaggggaggactctaatgagctgcaggagatggcagaggccactaatgaaaaagaagagttggtgggactggaactgcactccatggctggtctaacaggcgagaaatcaatgaaaatacggggaaggattggagatagagaggtgattgtgttggtggattctggggccactcgcaactttgtgtctacaaagatagttcaagagctgcaattaccagtgactgaggatcgagggtttggagtagtagtagctgggggtgagatcagaagaggcaggggtaagtgtgctggaattattctggaaatgcaaggggtggagatcatggaggacttccttgtgtttgatataggggaaagcacagacgttgtcatgggatattcatggttggccacattgggagatacaaaggttaactgggaattgaggaggttgagttggaaggttggagttcagtgggtcactataacgggagatccggccttaagtaagggtccaatatcactacattccatggagagagtagcaaaaaggaacggagaggtgtatttgttggagctcacttctctctttgaaaaggaaggtgaccaaattagaggagtttatgaagaagaggttcaggctgtgttgaaaaggtatgggggcgtgtttgagatgcctaaggggttaccaccagcaaggaacagggagcatgctataacactacaagaaggcaccccacctattaactgccgtccatataggtattccttcttgcagaagaatgagatagagaaattggttcaggagatgttggaggctagggtcataaggccaagcatcagtccatactccagtcctgttctgttggtgaagaaaaaggacggaggatggaggttctgtgtttacttccgagccctgaacccagttaccatacctgatcgatatcccgtcccgattatagactaattgcttgacgagctgaagggag

SEQ ID NO: 6189 - DNA, 2188 bp, Arabidopsis thaliana landsberg
cagattaagtgttttggtaacaagttgattgttgttatccttaatccttatcggttttgcccgtgttgtgaaaaacagctgtgatatttccgtcgttgttacaactagaaagaggtatcacagacctggatgatcgtaaacagaaagaagtctgcaaaatacggtacagaaataaagatgagactgaaaaggtcaagctctcggagattgacatcgagagagaagaagaatgcgggatttgtatggagatgaacaacatggtggttctccctaattgtacgcattctttatgcatcaagtgttaccgcgattggtaagtcatttctgcattattttttcgtataatatcgatgaatcagtaataaccgatgatttcttgcaggcacgggaggtcagaatcatgccctttttgccgagacagtcttaagagagtaaactcaggggacttatggatgttaatggagaaatccgatacggttaatatgtatacaattgagcgggagaataagaagaggttgtttgtgtatatagagaagctacctctagtggttccagatcaagtgtttgcttcttctccttatgattgccatgtcaagtaaataagacggagaagagctttggcaaaagccgaaacttttatctgaatgtatatgtatataatgttttagagtagtagtaagtaatatagtgtaactatttcttggggaagtccatttctacttgcttttctttttatctgcatttggcttttggttcccaaaaactcttatttctgttgtacattcatgtctgaatttaataacctcttcttcaagaaatggctttcactcacaaatctacaatctgttattgtttcagctaaaagttctcttaaagtatacaaaatctttgctcaaaccatgaatttaagctgaaaaggacttcccccactaatcgaccatgcatgatgccatcttggaacttccttaaatatactcaaaaccatgattttaagctggaaatgcttgaatattggtgcttcccaaaataaatataaagaaaaaccctaaaattcaattcaagtttctaaggacaccaagctctcataatgatatgatacactgaattgcaacgcttgcttaaacttggccatatgtagtagtccttcatacgtgacacttctcatgctatttgtcttcaaattgtaatagaagagacaaaacggatcagatatttgttctgtaactagacaaatctcgccggtataaaaggtattcatgaccttgaagtcaaggccagcagcagattggggcaaataaaaagtgttcatagaccattcctctttctcagcatcttcaacaacccacattcgaaatctaccatgttgaggtttctcaaccacaccaattttaccgttgtagttgatcagagttttatccccaataaaacaattgcaattagctgtccaaaaattatcagaagtgtccattggtagaagtttgcttggtacattggagattttgtacgtttcagacgtaacatcaaaactcataattatagatatatttggagaaccctagtccttcctcgaggccccgtagtacaggcttccattcatataaagccccattgtattagcaagatgaggacatgcaacacatggagcctctttccaagcttcttcttcttctcacaataccacaactttgtactccaatctccaaggtaaattatcaatggcgagcactttgtattgatcttcaataggatcgtacccaagaaagtacatgatgcatggaaaaatgtctggataatttttgaatttgatttggggaaacatatgcagctccctaggttccaaacacatgacatgagacgttgtagcaatttattggtgttatgaatgcccgtggatatcataaagagcactatttttgtcgtagaactagaatttattccacggtacatcgcataacaatcgtttattttttattttgcatttatatgccatcttgctaggttataaattaatcattaaactacagatgatttgaggttgttgtgtttttttagaatagagttaagggattacatgaacataattgacgctcttcgcggttgttgaatgccctaattattgtgatgtttagaagactaatggtaggtgtacatcgtcttggttggagggtgaatctatacaccatgtctt

SEQ ID NO: 6190 - DNA, 2566 bp, Arabidopsis thaliana landsberg
  unsure (1)..(2566): unsure at all n locations
atcctcttgcttctctctctcatcttcttgcactttcttgttcttatcccaagctttgagtctttcaggtacgacatcattttattggatcattactcttacttcattggtggtttttgttggtctaaagaatttaataatatcaatattctagtttgcattgataatgcaaaatcttatagcttaaagtttatttaatctccnnnnnnnnnnnnnnnnnnnnnnnnnnnnnnnnnnnnnnaatgataagaccgaggtaaattcacgagtttaacgtataatctaggaaaatggaaaacaaatgtgacataaaacgagaaagtcactagatgatgaaaacttaacggtcagaagatgaccaagcaaatagtgacatgtggcctagcattgtcaccacatttgtcaatgttggaactagatccactatgaaaaaaatccaaaaccaacagaccaaataagatctgctatgaaaaataggatacctggaggctggagtactcggaactagatccgcttttatttttacttttacaaatatatttttaacatgaccacaaaatgaagaatgattaatttacttcatcactaagtttcagttccatcaaaagttgttaccctgaacggctgaacctaagaaagtatgccccccaaaaaaatgtatatgttttgaaccaagctcgagaagaacttgcagaagaatgaaaaatagtttttgaaataaaaagacagtaattcagtaaaagaaattcaaaaataaaagtgaaagaaacttgaagtgacaacaaataacaggaaaaagagaaaactttattttcgtctccaaagtaaaatgccaatgccaagtttttctggaccaaataccttatttccgtatcacaatctaagcttgcctaaaccctttcccccttccaggtggaacttgaactaggggtcctagaaagcgtaactttgaaaggttttaagaaacaccactagatcaagagccgccacttggtaatgagaaagaaacttgtacgctaagaccacttaaaacgtgtgagcagcattgtcgagctgcatgccttacctcgctcatcatagagcggaacagcacgaattccttctattagttcagaaaccggtagacaagtctgaccacaaaatgcatctgcagtcgatacttcgtagtcataaacttcaaaactaatcaaagcaaggtcaggataggtcaagggaaatgtgaattcttctccccaagtaggtttccattcgttgtttttcactgtcgtgttcataatcttctcatcatggggtacaccggcaatactgatctgtgcatttgcgattaaagaaccaaaatcaaactcatttccatacccaagaaattaaagtatcatctcctgatttagatttttgtaccctaacgtataagtccggcttagacagtcgacctatccgcttcttgaagtccacaatccatccatctcccatgtagattttgacctgcaagatataatgtcatcacccatcctaagtgagaaatagaaccatagtataattgttgtaggatgacaaacaaacctttaatgtcttcaccaccactggattctctgttggatagaaaactccactagaacctgcattcaaaaggaaattcggcttcttgacgtaaccgcaccctccatttgctctaaacatcccttgcatcaaccaaagtttttctttgtcatcctgtagtaaaacataatgtattcatgacacggattccaataggtaagctctccacacaatgcgtacatgcttgtgcaaccactggttatgagcaagagaatccagataaagagagagagagaaagaaacgtttagaggcacacctgcctgcttagtgcaatcatttgtgcaccgtgcatccaagctctctgaggtttataaggggggttgctcaacaagttgcgtttttttggacgtgtccgcaagaatttattttgggtgaagctgtttattgtcaagaatttcctaatcagttatattttagtatttgagaggcaactactctcaacatgttgagtaagggttttggtatgtagtataaacttatttaactcaacaataccttataacatctctttcgtaccatcctggttgttggacgtcgtctgttaatgctttttgtagcatgcctcttggttccactgcatgaaagccaacaacactctggtaattcttatctgttgacccctcttgtatctcaagctcaaccccattctcaacggctttagcatataacaattttgttggtggtcttcgtgatattaatatcttattttgtagttctgctggtgaaggaaattcctccaagctttgttgggggtcttcgtggtataccatatcaccaaatgtctgatctatcatctacatatgcaacaatatatcataccaaaagaattagaatacgtaataatatgagaaaaacgaggagaaaaagaacattataaacctgagtaactttggattgaagatccggtttaaagctgtccttgatcgtaattatcacgggataactcctcgtgggggtaaaggcatgctg

SEQ ID NO: 6191 - DNA, 941 bp, Arabidopsis thaliana landsberg
  unsure (1)..(941): unsure at all n locations
gcctttaccaaatgtacatatcccttgatattttcgtttatggacggcttgaaaccggaacttgaatccagagctatttaggtttagaatcctctatcatccttgagtattctaaattttctgatcacagataaatgtgatggtattgacataggtatggacatgttgtatatgtagatgatacaacagacatttaatcatatggtatatcaccatgatcctcatagtttggaggtttttccttcgccacaacaactgcgaaataagatactaatatcaagaagacccccaaaagagttgttatatgctaatgatgatgatggaaaggttggcgtacggaatggggttgagataagacaacacccggcagatccaaattaccagagtttagtttccttccatgtagtggagccaagaggcatgctacaaaacgtattaacaggcaaggctaacaaaatccaacgaccaggatggtacgaaacagatattataaggtacgtgttgcgaaataagtgttattttatatattttccacagggtgagatcacaagtattgaaaagctaagtgattaagaaatacttgacaatcaacagcttcacccaaaagagattcttgcggacacgtccacaacggaaattgttgatctatgccccctataaaccccaaagagcgtggatgcacggtgctcaattgatnnnnnnnnnnnnnnnnnnnnnnnncttaacttttatttctctctgttttttttctggtttctcttgctcatgtagtagttccacaagcgtgtacacactatgtggaatcaaccatgtatacccttagtttttttttgggcttacctatcggactctatgtcatgagtacaacatgttttaccacataactacaggaggagaaagaaaaactttggttgatgcatgggatgtttagagcaaatgga

SEQ ID NO: 6192 - DNA, 708 bp, Arabidopsis thaliana landsberg
ttgctaactcagcttactattttacttcatcactaagtttcagtttcatcaattgttgttacccagaacggctgaacctaaagaagtatggcccaaaaaaaaaatccatatgtttgaaccaatctatcgagaagaatttgcagaagaatgaaaaacagtttttaaagtgaaaggatagtaaaagaaattcaacaataaaagtgaaagaaacttgaatggcgaataatttgttttcgttccaaaagtaaaatggcaatgcaaactagttctggaccaagaccttatttccgtatcacaatctaagcttgcctaaactctttcccccttccaaatggaacttgaactaggggtcctagaaagcgtaactttgaaaggttttaagaaacaccactagaccaagagccacttggtaatgagaaagaaacttgtaggctaagaccacttaaaacgtgtgagcagcattgtcgagctgcacgccttacctctttcatcgtagagcggaacagcacgaattccttctattagttcagaaaccggtagacaagtctgaccacaaaatgcatctgcagtcgatacttcgtagtcataaacttcaaaactaatcaaagcaaggtcaggataggtcaaagggaatgtgaattcttctccccatgtaggtggtcattcgttgtttatcaccgttgctttcataatgttctcatcatgggg

SEQ ID NO: 6193 - DNA, 4449 bp, Arabidopsis thaliana landsberg
ataattgtattttagtgtatttctctaaaaaaatcttatctacctttatttaaaaaagtttaatcaaatgtaaaaaagattgcagaatagaaataatcacaacatattaaatatgcataaattatacataatgttttttcttaatataataaaatgaaacaagaagaaagcagaaaacatctaatatattggaacataaggagtaattttctttttgtaagggtctctgttgatcttcaaattagtaaatgactaaatccatccaacaaacgtaaaggaagaaggtttaagagtaaccataaaacccctttgaaacaatttaattactttaagacgaattgatacttcattaaaccgaaccgacaagagtcctaaaaagggcaaattttgtaagaaagccagctttaatctctctatcggagggaacacgaacgttgacggagaaagaatctctcagcttctttttttttttatagatcctttcacgcgtcaaatcattttcaatctccacccaactctcaaatccgtggcaaacgtttaagggtcatcttaaagttccttgctttttccccggaaactccatcaatgtcgacccttttcgtttctcgctttatctggcaaaaaaaaatttcaggatttcgctaattgattcaatttgacgcctagaatatagctgctttccttattttggtggaggttaattatattgatgatagggttttggaaacttttttaattgattttagcttatagagaccaaaaaccctagaaaaatatgattcctacgacggcgacggttgatgatgagccgggacagattaaacgtgctctgattgatgcttctgccggagctatctctggtggtgtttctcgttctgtaacttctcctcttgatgtcattaagattagatttcaggtttggcttttgttctctatcctctgagtgataaagtctagatttttatttggcttagctaaagaatatttgagttcgttgttgctgtggatgctttggattgtattgaggaggttccagatgagaattatcattggtggacaatgggtagctattatatacttagagatggttgctgaatgtcatatgtgattgcaggttcagctagaaccgacgacttcatggagtgtggctcggagaaacttgtcaggagcttctaagtatactggaatggtacaggcgactaaagatatatttagagaagaaggttttcgggtccgtctcttgaacatttccgttttctgaaaccatttcttttttgtttatagtatgttagtagtttcaggtttgtggcattagtttttatgaggtcttgctctctgttttgatgtttgatacttgttttctttaggggttttggcggggtaatgtgccaactttgctcatggtcatgccgtatacttcaattcagtttacagtactacataagctgaaatcttttgcatctggttctactaaaacaggtaatttagtctactgagtaacattgcggtctctctagatatggtatttggtagattgccagtgctattttttgttgtagtctggtggctatcttaggggtatcatttctgtttgttgattgtgtatttctttgaatagcttttggaattgactcgtataatttagagatcaatgtggttccttacttattagctggttgtgatcttatggcaatgcagaggatcatatacatttgagcccttatctatccttcgtcagtggagcgttagcaggatgtgctgctactctaggatcttatccttttgatcttttaaggacaatattggcctcacaaggggagcctaaggttagttgcgtgacttatgaacctgtaatataatttaaattccatgtactggggattttcttgtttttcttccttattcatgcttaagtgacatatagatgactgactgatgactgtcgacaggtgtatccaacaatgaggtctgcttttgtcgatattattcagtctcgaggtataagaggattgtataatggattaacaccaactcttgttgagattgtgccttacgctggcctgcaatttggcacatatgatatgtttaagcgttggatgatggtaagagcataggaatatatagtttatgtgtgatcaatgttcatatgataatcaactcaattgattatttttaaacaggactggaatcgatacaaattatcctccaaaatcccgatcaacgtggacaccaacctttctagcttccagcttttcatttgtgggcttggggcgggcactagcgccaagctcgtctgccatccccttgatgtggtcaaaaaacgattccaggtcagttaatctttacccaatggattctctgggaagataatgtgataggatccaaactattaaactccttatttattcacttcagcaagaactacacatcatagagagacttgattaatgagaatctctactcgacctaattacacatcccaaacttccttttagccacttagctctcttgctaacttactcaactatagttgctgagttgtcaacacatctactatctactacaaaccagctagggtaattacaatgctcctacactgaactagcgcaatgacttatcgtattcatgtggtttcatgttttgggtctatccttatgtatcttagactagactttcacatttgctgccctatgatatgtgcttgctgagtctacttactgattccgggtaccccacttgttctgtcaccgtacctatagaaagaaaactccaatttgtgtgaaacatttcttaaatataaaagcttttcaaacttgccagtggatctccaacgcaatgaaaatgcaattgccttcaaacatgaaataatagaaatgccagatagattttgaaagtttcttttgttgcagattgaaggtttacagagacatccaagatatggagcccgagtggagcgacgtgcatacagaaacatgttagacggtcttagacagattatgatatcagaagggtggcatggtctgtacaaaggcattgtgccatcgactgtgaaagctgctcctgctggtgctgtaacctttgtggcctatgagtttacctccgattggttggagtcaatttcttggtagagattttactcttttgatacttatatcctactgtctctagcatttattataggctcatatgaacatcgatcatttttggaatgtaaacgtcaaagtgttgtcggcaactgcataagctttttaacaagtgtggtggattttgtaaagctcgaaatacaaaatatatgtaattgaaaagattcattgaaattttttgttaaaatacatacaaaaaaatttatgtaaaatctttcatcaagtttaatgccatttaggaacagagattctgagccgctttgctctcttcacgtttgggtttcaacctgaaggagatttttaccctttaagatcattctcaaaaacccaacaaacagaagaaccaaaaccaaaatgttgggcaaagtcagctatataactacaaatttgtcctaaccatgtctctcctctctatttctctctctctccctaatacttaagatacagctttgcaggtcttcttgttgtgtcctaaacccttgcagttgctacactggagctgacgcttgaacatgtccagcggttccacctgcttactctttggcctccctggtggtgttagtcttgtgggcggtggagtaaccgaaacaaccccttcaacgggcggctcctccaaaatcatcatcgtcattgttgtgttagggacagggttaatggactcagcatacgttaaacggtaactctctgaggtaaagtatctggagcagtattcataagggcttttccctatgcattcaaccactgcaactgcgtggctacacggtaaacccgttagtctccataccttacagtcgcaatcacactgattgatgtcaactaagttgatggtttcaccatgaacctcgaataagctattgtgaggcgctgagacctgaagtgaccttgcaagttctatttctttctgtagcttctcttcgttggttggtgttagcgttgaaacaatccattccccgggattgtacctgatgggtatatattgattgcatcaactttgctcgaagttcgtctatcatttgagttatgggcaactcatgtgcttcagaaacccagctgtagaaatctagcccaaaaatggagttcatgtggttatatctctctccttcaaacaaagcatttgcccaatggagaggctcactttcgataacccaagtataagcatcaggggaaatgctttttatattttccaaggaacggtaatatgcatcaggttgtgtcgcataagcagcagcatagaaatcattgagtataaaccgtcttgcttcatgagaaaactgagcctgcaagtccatgtttaatttctcagcga

SEQ ID NO: 6194 - DNA, 1612 bp, Arabidopsis thaliana landsberg
  unsure (1)..(1612): unsure at all n locations
catcacgtgcaacggttctgagatgatgccaagtatccttcgtagagaattttgaccagaacattactaaatgacatttgaggaatttgataaaagttcaaattcgataaaacctgagtatagcttccttcttcaaaatagagcggaacaacgagtagattccagaagccccaataaacaggcccattaacaaactgggcctataaagcgtggcccaaaacacgtgacaacgcgcgattcacgcggtttactttatttatagagaaacctatcttcctgccacttcagaatcgttttatttttcaatcgtttcaatttctgaaattctaaacgcaatcagtcaatcaccccaatccaaatttagggtttcttttctctttctgcgatcgatctctggtaactcataacttgttgttgaatcgcgaagatggcatcaaacggattctactctgctcagagaaacgcaaacgctggaacaacgatgaagagacgaaacgacaatcgcggttacggtggcggaatcggaggttatcaagaggaggggaaccgttacgcgccgccgcaaaaacgtttcagatcgcaaccgcaacagcaattccgatctggtcataatcctctgtatcatcatggtagtaataataataataacgtgtctagggtttcttctcaatcaaataacaaatacggtgttgatgtgattgcttctgattcaagttttgctttacgtaacaatgattctaacaccaacaattatcagaaaccctttgttggttatggaaaccctaatccccaaattgttcctcttccattaccttatcgtaagcttgatcctttagattcgctgcctcaatgggttccaaattcaactccgaattatcctgttaggtcatcgaattttgtaccaaacacacctgattttacgaatgttcaaaatccgatgaatcattcgaatgttgtgtctcaatcgatgcatcaaccaattgttttgagcaaagaattgactgatttgcttagtcttctaaacaatgagaaagagaagaaaacttcggaagcaagtaatagtgattcattgcctgttggattaagctttgacaatccatcatcgcttaatgttcgacatgaatctgtgattaagtctctgtattctgatatgccgaggcaatgtacttcgtgtggggtgagattcaaatgtcaagaagagcatagtaaacatatggattggcacgtaaggaagaacaggtcggtgaaaaccactacgagacttggtcagcaaccgaagaaatctaggggatggttagcgagtgcatctttatggctttgtgcaacaacgggaggagggactgtagaagtagcatcttttggaggaggagaaatgcagaagaagaaagaaacggaccaagtacaacaacaacacatggtgcctgcgaatgaagatcagaagaattgcgcgttatgcgtagagccgtttgaagagttctttagccatgaagctgatgattggatgtacaaagatgcagtctacttaaccaagaatggtcgtatagttcatgtnnagtgtatgcctgaaccccgacctgctaaggatttgagagagccgtcgagggtaatgtct

SEQ ID NO: 6195 - DNA, 527 bp, Arabidopsis thaliana landsberg
taaagtgcctttgtgcagcaacgggaggagagaccgtagaagtagcatcttttggaggagaaatgcagaagaagaaagaaaaggacgaagaaccaaaacagcacatggtgcctgcagatgaagatcagaagaattgcgcattatgcgtagagccgtttgaagagttctttagccatgaagctgatgattggatgtataaagatgcagtctacttaaccaagaatggtcgtatagttcatgttaagtgtatgcctgagccccgacctgctaaggatttgagagagccgtcgagggtaatgtctgttacagttccatcggttgcgaaagctatagcctgctgattgagatttttaagatctctgttttagtcattcgttttttaagtaatgtacattacttgaatcaagttgtaacacaaatacagttctatcaattgaatctcctattttactcttatcgcctctttactcttatgtgtcatttaatgaatattcatgcttctatatctctgttttaatcgtcgttta

SEQ ID NO: 6196 - DNA, 1980 bp, Arabidopsis thaliana landsberg
cggaagagaatctccacggcgggttgagatttattacatcgggacatcagatacataagtaccatacaacagttcaagatctgaaatcagagctatcgaaactgagaatcgaaagcaagcaacaacaggaatctccaagaagtagtagtagtaatactgcagctgcatcagaggcaaagcctatctatagacacctcagagagattcgaacagaactacagctatggctagagaacagtgcggttcttaaagacgaactccagggaaggtatgcgtcattagctaatatccaagaagaaatcgcaagagtcacggctcaatcaggtggcaataaagtaagtgattcagagattagtggttaccaagctgcaaagttccatggagagatacttaacatgaaacaggagaacaaaagggtctcgaccgaacttcactcgggtcttgaccgtgtaagagcattgaaaaccgaagtggagaggattctaagtaaactagaagaggatcttgggatctcaagtgcaacagaagcaagaacaactccaagcaagagctcatcaagtggaagaccgaggattccattacggtcattcttgttcggtgtcaagttaaagaagaatagacagcaaaagcaatcagcatcatccctcttctcttgtgtcagtccatctccaggtctgcataaacagtctagttacagtaggccacctgggaagctccctgaataatcagtcaatcatctatttgttatttgcctttctcagttccttgttttctagctttttctgtcctgtacctgtggaagaaccaaatgagatacaaaccaaagtgaatgttcttgctttcactgttttctaaactttgaaatttactttggagattccgaagtatatttaaactttgaaatttactttggagattccgaagtatatttaaactcgtattactaattagtagtaagaaccttatatttggaggtcctactgtacataatcatattattgtccgagtcctaagaaaaaacattaatggaagcacaaaaacaatgaagtaaatgaactacaactccttcagtccggtccctgtcacggttgcttcatctttgggttttgatttagtcgcagctacagctagaggtgacaccgtggtagtactttctttctcaggtggtttatccaatgaacttttatcggtgcaactgccaactacttcatttttcttaggcataaggctaggaggagtctccactttcgcagccaccgcttttgctgcgctaatcactgaatttgctgggatggttttatttggcggaagtgttgctgtaaccaaggggcttgctctgtttccctgagtttgctctttctgtacaccaaccggcttggaagtgacggtaactgctgctcccacacttggcttttgtggcgttacaacagtagctgctgatcccacacttggcttttgtggcgttacaacagtagctgctgctcccacacttggcttttgtggcgtgacaacagtagctgccgctaccacacttggcttttgtggcgtgacaacagtagccgcaggagctctctgtgtggggaccaaccttgacgatgcaaaactaggaggaactgaattactctggattgtagatcctttggagagaggagccatatataaaggcttattaaagggtgatgaaggtatcgtgtggtttgggcttccattgactgcatgccttaaattcaaaggtccaaccgatttagtgttagtggcagcagcaggaacaatctttactgggtcagcctttggtgctgatagcatacttgatgggcgaggaaaagaggctgcagaagcggcggattttacaagctcagcctttggtgaagatataatacctgatgtacgaggcaaagaggctgcagaagcggcggattttcaagctcagcctttggtgcggatataatacctgatggacgaggcatagaggcggtggtt

SEQ ID NO: 6197 - DNA, 1712 bp, Arabidopsis thaliana landsberg
aaatgctcggcaagggttttcctcatccagtagaaagaaaccgggctgaaagtgtgagcttctctcatagctctaactcttcattctccatgccaccacttcctcaaagaggagacttgaagagagcatctgaacaagaaaaggaagacgggtttaaggtgaaatttgcaggcattagtgacagcctaagaaagaaaattccaactgtggaagaaaaagtgcgtggagatattgatgcggtgctggaagagaatattgaattctggttaagatttagcacatctgttcatcagatacagaagtaccacacatcagttcaagacctgaaagcagagctatcgaaaattgaaagcaagcaacaaggtaatgctgggagcagtagtaacactgcacttgcatcagaggcaaagcctatatatagacaccttagagagattcggacagagctgcagttatggctagagaacagtgcaattctgagagacgaacttgagggtaggtatgcaacactttgcaatatcaaagatgaagtttcaagggtcacgtctcaatcgggtgcaactgaagtaagcaatacagagataagaggttaccaggctgcaaagttccatggtgagatacttaacatgaaacaggagaacaaaagggtgttcaacgaacttcaagcaggccttgatcgtgcaagagcactgagagctgaagtggaaagagttgtatgcaaactagaagagaatcttgggattctggatgggacggctacaagatctctgagcaagagaacgccatcatcagctggaaagcctaggattccactaaggtcattcttgtttggtgtcaagttaaagaagtataaacaacaaccgaagcaaacctcaacaatcttctcttgtgtcagtccatctccagctctgaacaaacagtgtagttacattatcccacctgcaaagctccctgaatatgtcaaaagaagctgaagaagtgatctcccttaactttaatagtcctgagattcaaatctaactatatgctgtagagtttgaagattgtaagtatatgagattcttattaattagtaccaatgtactgaatggcttcctttacatcatatctttctttcagtctaataaaaactacaaatgaaagctccaaaacagagtatccaacgattttgtcaaagaactaaacaccctgtccggtccctgccacagttgcaacctcaaggggttttccgcaaacactactcactttgatcaccggaccaaccttactgtttacttcacctttggctttagattgcgaaccagctcctctgataggtactacagtttgatcagatggtttatccatcaacttttggttagtggcacaatgaactgcagtccgaactactggaactttcctaggcaagagattaggggactgagcctgtgtagcctgctttccctggctaatctccaagtttcttgaggttatttgatgtggctggattgcagccgatgagcttgcttcatttccacgagcttgccctttctgtccaccatctggtttgcaagtgacaatctcagtagctgggacagagcctgcaaaaactctctgattggagacactccttgatagagaagccaaggggagcggagcagaaagcattgaagatccttctgaacgaggagctctgagaggaggtttgttggtagatgatgaagccataacag

SEQ ID NO: 6198 - DNA, 1013 bp, Arabidopsis thaliana landsberg
ttgtggaaacaggtttttgttcatctggtttctagtgtagctttaacgcaccaatttaattctttttaatgatttcctttttctgttatgtcaatactctttcagttgtttcgctaatgtggttctacaatgcctttcctggacacgccctcttgttgcttaccttctggagagaggccacaaaagagaatgtaatagtttcttcgagaaatctcaatgcttcacaactcttctaattgaatttcctgtatgcatatcaattttatttctatgttttggttaacaggtaggcgaaatgattggtgcttcttatgcgaatttgaaaatcatcttgacagagcaaactatagccggtttcctttttcaccaatgaacattatctcgcggctgcctaatattggtggaaatcttgggtatgggagacaggaggatgcccatgagttgatgaggtcagctattgttccttgttggtgtaatctagcggtggagtttctgtcattctgtcagctaatgcttttaaatttcatgtgatttaggtttgcaattgatatgatgcaatctgtttgcctcgacgaatttggtggagaaaaagtggtgcctcctcgcgcccaagagacaacacttattcaatatatatttggtggtctccttcagtcacaggtgtgttttcttatcccagtagcaggtcttgtgctgtatgtgcaaattttaataatccaatgatagaccattagaagtagtacaagaataatggaaaaagtgtgtcgagaaaacacacttctgttggctttaggtttgaatcgtagagtcaccagacactaggtaataagtttgaaacagggtagcctaggggctggactggatccttcgtttcgttcgaataggttaacctacgaactgaagtagatagttcttatcaacctactcttaagagtttttgtatgtggaagactggtttctatatcctaggtctgtgtgtaatcatgatcctatttccaaaaaaaacccgtaag

SEQ ID NO: 6199 - DNA, 1132 bp, Arabidopsis thaliana landsberg
aatttcaggacggaatccatgccatagaagaagtcatctaccatgttgagacctattatgttactactattagagccagcactccaatgtttcttatgtcgcgaaaaatcaaatcgcttggtgtaaagatggttctttctggggaaggctctgatgaaatttttggaggatatttgtacttccataaagctcccaacaagaaggaatttcatgaggaaacatgtcgaaaggtagtgccttagagtttagacaagaacttttttttttatatactgccttctgtaatcttgtttgtgggcggatgtgtttacagatcaaagctcttcatcaatatgactgcttgagggctaacaaatcaacttctgcatggggtgttgaggctcgtgtacctttcctcgataaagaatttataaatgtcgcaatgagcatcgatccagagtggaagatggtaggtgtcatctttctcatcactttcattttcatctatttattacgcacacatcaatcaaagtgattgtgagtcctttctatgatatataacactgctttcaggacattctagtttgaattgattctttcatgactttctttttatcacaagtttataatctcaagtttcaaatttggtgataatttgtactctaaacaatgatgcagattaggcctgatttgggaaggatcgagaaatgggtgttacgcaatgcctttgatgatgagaaaaatccttacctaccaaaggttttctagcaaaaactttgctccctgcaatttgacaaaactatctagctttgctaacaacttgtcatctttttggtaaatgtagcacattctatataggcagaaagaacagttcagtgatggagttggatacagctggattgatggtctaaaagatcatgcaaacaaacatgtaagaagatgtctcttttaatcgataagaaagaatattttaacgtaacagtttgattttattgcggtactctcctttctcttttggtaaggtctctgacacaatgctgatgaacgcaagctttgtcttccctgataacacacctttgacaaaagaagcttactactacagaaccatctttgaaaaggtcttccctaaggtaatgattttcatctgcataac

SEQ ID NO: 6200 - DNA, 595 bp, Arabidopsis thaliana landsberg
  unsure (1)..(595): unsure at all n locations
tgtaaaagagaaaatttacctgaactgttaagtgtaactcgtggtggcgagttcctaaggagtcggcgacttctctgccagctttaagatccggggatccctgaaaagaaaacagatgaaaattataaatcttgatgagcatagaaagcttttggtgaaaacattttgagaaattgggtcaagaccttcaaaccgatacaaaatgtgtgcaactttgaaccccactgacaagcagcttctgatttttccagatggcgtaatgctactgaagcaacaagggatgaatctaatccaccagataggaggacaccaaaaggcacatcagtcattagtcgttttataacagcctgcagttcaaagaaatgcccacattcatatttccaaaataagatcagcatttgtcagagaatatcttaaggaagataagactccagaatttaccttctcaaaagtattgcgcaccactaggggatcatatggggttgaaggaacaacctcagagaaccacggggggttgtaccaccttctaagcccacctacaagaaagttttgtcccatcaaactacacagtaaaagtcccaacacanacttacta

SEQ ID NO: 6201 - DNA, 2784 bp, Arabidopsis thaliana landsberg
  unsure (1)..(2784): unsure at all n locations
aagaattggattcattcatgaatatttgacctgcaatgaacccagcagagagtaacaggaataaaaaagaatcatcaggaagaagaatagaggctaaaaatttgacaaatgagatcaggagaaaaattgacagatgtggttaagattgtaagtttgttaacatacttgttgacagccctgagattcaccctttccttatctgaaccagtagctcgttctctcttctcattgtacaacggattgtgatcggaatccctggagagcaaggaacgcgctgccaaacctgtctgctgagagaggctatcagatctcccatatggaacagcgccattcactgccccatgcctgcacaattaattcaaccaggaactgttaccaattgaatagccatcagaagagagcgtaaaatcgcatctatccaatgttataagaatcaatctaatcatttaaaaataggaaagaaatctatttgggagtattttcctaatcaactccaaacaatggatcttttaactgattgaaccaaaaaagttatgatctaatacagtaggccataccttaacatgtttgagtcaccattcaatctcgagcgggaatcaacagctaatttcggtatgccctgtttcaagtccctataaccatcaacagctttatttgaagccaaactagaaggaccatctgttttgatgccagatcgttttttcttcattttcgacttttcccaaccatcaataccaattgaagatcgatcttcaccctgaactgcattatgatttgccagcctcattgtgtctttatccctgtctacaccggctgattgtcgaacaatagcattacttcgaacatccatctgaatcacatatagcaaaattaaaacatttgtattagtaatagcaaataatggaatagctgccagatgctttcaaaattcagaatcaaaattaaaaacaacaaccctgtagtatcaaaagaatttttaaggtcagaacacaagcatgaaagaaaagaaaaagcaattgagaaactatgtagatctaacaagagtaattctaactaatttaccctgctttgaaaacaatatttcacatgcatcacatttggaagcacaattatcttaaacgagaattttctccactactaccatttctaactttttttctagaataacagaaccaaacactgaatcaaaatatgcacctatagaagactacatcatgacacaaaaggtctgttcagtttaagtatgaaccgacctaaagcatgtgttgtcaaacaaaaatcaggacttaccatggaagtacgtgtccgcttattcaatgcaccacttttaggtcgttcgtccagcttttgctggtcaagctcaaaacaaccaggcagagtctgaccttggattcccattttacccatacctggttttaaagccaaacgatcacctgagcggtcattagaaaatccttctggacgagaccttttctttgtaggtacactaggaaaaaacttgttaaatacagaagaagcttcgttgaaaattttcaaacgctccctgcaacaacaaaaattcaattagctaaactggactcggaactccaaagaagatttcttaacttatcgtacaaaaactacctggccttcacattgttttcgcgcagaccagcctttaacctcttgatctcttctggtataggagatggaattaacttccctttcagtggtgtgcttggagattcatctccttgaatcccaagagcgatattcacatgacgcttaaagtcaccttgacgaatagacttatgatctgcggcaaccaccttaggatcaaaacgcaaacactgaaaaaagtttgttacatcggtttgtgctattggtgaagtgctcctcaacatgctcgggtgagatgacgagacaggatgttccatcgtctcacgaaagctactagatctttccatttgtgcagctaagttggacctgtataaaggcctctctggcccaccagaagaataatcaaacttcccaggtgctgacattcccttaactttaagtccactgttttatttataaacaatatacaaacagtggtacatgacaagcttgcagagttgcagcacataaatgcttaaatcctcagctgtcaaattatttcacctgcaaaagtgacaaatggaatcaaaaccttagcaacaaacattgaccacgagaatgacattgcaatagaaacaagagtatacataaaaacaaccaagataatgaaccattccatttgcactaaccaagtcttaaaaccaaaaaaaaacataaaaattttaaaatctatacataaatagaaacactagaatataagtataaatttggtttcagagtactttaggttcttcacataatcttcgcatgtatttgcttcattaagccagcaacttccggaaacatgctcagagccatatnaacanctcgcatttataattttcatctaaaacgaagcaactaaccaacccaatagaagagcttaaacaaataaggaaacaaaatgaatctacccatttagctaatgtacaaaaaaaaggagaagttctagtcaagtggcaactgaactacacaaacaagtctaacatggaactgtcctttctttctctaactaagatccaggtgaaatgtgttgaagaatcaccaatccaaacaaaatacctaaaccaaccccaacaccatattcaattcgaaaagaacgaaagataattcctttaaatgtcttcttcacagcttatctgcattgccgactaattatgaaactaa

SEQ ID NO: 6202 - DNA, 2111 bp, Arabidopsis thaliana landsberg
  unsure (1)..(2111): unsure at all n locations
gcattgttctggcagtttctgtttaaagaccataatgaattttttctttggaagccgaatatatgcaatggctgcgcgaagtaaccaaattaatctgaagctacataaagggattcctttgtttgtgtatagtctagatgttggagtttgttctttggccttttcaagtgttgggcagtgtaaatcaaatatttcacttaacgttctcgcctattttcatgtttacgttctacataaaatatctctggattttttttgttttcaagtaattttcaaatgccgttctggaaaactcttatggtgtttactaatgtattaattcccgttgttacatggcaggtgcattttaaatcaattatttgagtctgagaaatcagcatttatgtgctacagcttgtcatgctccagtgtgtattcagtgtttattataaaatataagactttcgagagctgagggaatgtcagcacctgggaagtttgattattcttctggtgggctagataggcctctatacagatctaactttgccgcacagatggaaagatcgagtagctttcgcgagtccatggaacatcctgtcccatctcatccaatcatgttgaggaccacttcaccaatagcacaaactgatgtaacaaatttctttcagtgtttgcgttttgatcctaaggtggttgccgcggatcacaagtctattcgtcaaggtgactttaagcggcatgtgagtattgctcttggaatactaggcgatgagtctcctagtggatctttaaaagggaagtttattccatctcctattccagaagagatcaaaagatttaaggctggtctgcgcgaaaacaatgtgaaggccaggtagtttttaactaccacaagttagttagttgtgtttgaggtgctcttttgactcatttactttttgtggtcgcagggagcgtgtaaaaattttcaacgaagcttcttctgtatttaacaagtttttcccaagtgtacctacaaagaaaaggtctcgacctgaagggttttctggtgaccgctctggtgatcgcttggtatcaggaccaggcctaggtaaaatgggaattcagggtcagaccctggctggtggttttgagcttgaccagcaaaagttggatgaacgacctaaaagtggtgttccaaataagcgaacacgtacttccatggtaattctgattttttttacatatggagttgttatcttggttcgtacttgaacaaatgtcttatattctataatgcagtcttctgtttgcatgtcattgcatgcttctgacactggaaggtgcatcttttgaattggtcaaaaaattggatcgtggttactagttttagatatgatatagaagcnnnnnnnnnnnnnnnnnntttttttgctacaatgtagtatttttttatatatgtcggattgcatgcaaatttaagtgtttaatcaaggagcatttgtcttcttatattttagtaggtcctcaactatttttgcttttacgcttgctatattatcacaatactgttatgacctgaatataattgatagtatgaaactaactgatgttttttaaatgttttgataaaaatttatagaaatttgcgtgtgatagtattttcatatctcaggtttcttataaatagtaagtgagtcactattgctttgggaaaccttaatctctttattttgtggtgcagatggatgttcgaaacaactgtattgttcgacagtcagcggctgtagacaaagataaagaaataatgcgggtgggaaatcataatgcagttcagggtgaagatcgaacttctactggtattgatggttgggaaacgtcaaaaatgaagaaaaaacgctcctctattaatgcggactgtcatcctaacttggcttcaaataaagtggttgatggttaccgagacttgaagcagggcatacaacagaaaccaacaggcgattcccggtcaagagtgaatggtgactcaaacatgttcaggtatgccctgttgtatgtatgtaatagatttttgtgcagacatacaaggtccaacgctgatatttataaaccttatatattgactgtcgccttgttcttcgatgtgtgtt

SEQ ID NO: 6203 - DNA, 452 bp, Arabidopsis thaliana landsberg
actccacatcgagagatagactctcttaaaagactcatggttctcaaataataatgatatggatcatattataagcaaaaacaaaatttgggtcttatagagacagtttacaagaaagggccatacctcaagacaaaaggaacagacaaattcagatatgaaaggagtataagagcaagagagaaagaatgtaacagtaccttagcttcaacatacttccacttaacaaagagtccatgcttttctccccaaccatttgctaacgggagattcattaaattatcttgtgcctgtttcagcgcacaccgacaaggaaaaggaagcattaacgaaaaatttcagatgtttccatgggaagtaggaggcggttcatacataaaagaagtctcaatgagaaacagattggataatagtaaggacttcacctgctgccaatatttcaccatttcaca

SEQ ID NO: 6204 - DNA, 579 bp, Arabidopsis thaliana landsberg
caagtgtcttcataatgtacacactcttacatgtttacttctaaccaggaaacagagatgtcaaacgtttggtatgaagttttatctgttttgcatctaatggcaatgctacaaatgtctcaagccaatttactgcttcttcctagaggttctagtgatggtcacaatcatccgaaagtatccgaaggttaggcttctctgagaaactttctcatccatcttctcatacagtctcttgaccattttttatgcactgattttttttcttaaaaaaagggtaaggtttctcagacttaacattatggttgtttggtttttcattatagaaaacagacgaacttcgattgatatcttcttaaaagcagctggatatcttgattgtgccgttaagcatgttctcccccagttttctgctgagcaaaggtttgtaggtgacaaagtttctaaagtcattcactctactcgttgactattatcagttgagcctaatggcagaacccttctctttgttttcatttttctgcaggagaagttcaccagttgacttagcagaaggaactctacgggctctttgcttgc

SEQ ID NO: 6205 - DNA, 549 bp, Arabidopsis thaliana landsberg
atcaatgagaacgacgatattgcctttgagttcatgttgtttttttaacttttgacgtaacgcaacttcggaaggatctaaggatgaaattgttcataaaataagatcatctccctccgcttttctcttgaaggttctctctgtccctttttgtttctaatggttaatttgatcactaatatgtatgttttaatggtatgatcactagttaatctgtatttctatatatgctgtactctctagtgtcttgcgtttttgatatggcgatggtgaaaaactcctatgtattattcgctcgtttatgcgtagagctttttcaagagcttccccctcttccatcagatgaatctcacggcgaaattacaactgtagagagacagtttttgcgtaattgtcaaatggagcttgaaaacttgtccctcaaaacagagctaccacttgtttatgtcgatgaatcaaaatattggagattcatcaaaactgttagggttccggctgaggtttttaacaatatgaagactactcgtacaacacggaaaagtatcattc

SEQ ID NO: 6206 - DNA, 1993 bp, Arabidopsis thaliana landsberg
gttctctctttctcgaagaatttatgaatcataatcacgcatcatcgtcttcgtcattaccaacttttttaccatcatcatgaatgttaaaacttccataaaaaatccttccttgtccccttgtatttttctatctaaatccctaaaaccactcaaaatcatccctctttctctcctccccattttccccaacgcttgattcgaattcgtctctctcgttttctgttgttctaccagttgagcaaccctagaatcattcttgtgtacctaccggaaccgagtcttctcttcttccgtggcacatctttcaaagttttaaaccccttttcccctaacttcttttcatttttctgtttttttcccgggaaattttctctctctctctctctattttttgtttctctcgtcatgatcattacttgtcaagtatgatcctttattaggtttctttggggccgatctcactttttctgtttctcaccctcttctcttcgaaggcccttgtaaaccctagaatctcctcttttcaaatttatatgttctgtttcttcatcttcaggtttaatcattcaatctatctctagggtttaccgggtcaagtcttaggatctgtctctatccatacttcatcaaagtttccgtctttggttctaatccatggcgtatcattcgattccgagctctgggtttcattacttgaattctccttttggtgacacaacctttactaaagtctttgttggtggccttgcctgggagactcaaagcgagactcttcgtcggcatttcgatcaatatggtgatatccttgaggctgtcgttattactgataagaacactggtcgatccaaaggttatggctttgtgagtatcctactttttgttcatgctttggtttctaatatctgaagttggtttattatactgcttgtaataaacattctctgcttccatggtatgcttatagattattgggtactaaatgttgctttagattggtgaatgatctgcttgacttatgatttctagttctttgaataaactcaaagaagttgaattcgaaaatacgtgttttgatgaaacttttgtctatctttgctaattagaggagtctctttcatttgtttgttctgatgtatctgttggtttatgttcatgattgtagaatgacttaccgctatgtttatgatttgtatggaggatttaggtgactttccgagatccacaggctgctaggagagcctgtgtcgatccaacacctattatagatggcagacgagcgaattgtaatctcgcttctcttgggagatctaggcctccaatgcaatatgcagtgataccccatgctcctggtcagtcttacttcagtattcatctattcttttcttcgcattacatacagagacctttataattttggtgaagtattcaatttttcaaggattatgaccgtgttaaccttgaatcactgcattgcttcttttatttggttaggacgggtaagacctccttccccatatgttggaagtgtgcagagtcctcgcggtttgcattttggaagccatccgtatcaccaaccccctacttataactaccaacaaggagtggtgtacccttatgggtgagttatgcaatttgaagctcagaacatttcgttgctattgtaaatctgctataacagacaagctttgatgagtgtatcagttctaatgttctacatgctagaccttcagtcactttgatcaagtggcatttaccaatcacatcatggacaatcatctagagattctattgcgttaggggttgtatcttctgccacttagggttcttgagtgtagcactatcatgtgacatgttgtgattggtaacttgcaggaataccaaaatataattggtgaggatatgtggccgagctcaatttgttttggacaggcaaggtcatgaatgttttttgacttgatagggcaaaattatctagatttttggatggaca

SEQ ID NO: 6207 - DNA, 1489 bp, Arabidopsis thaliana landsberg
tgtttctcttcaatgtctgatagagatgctaattgttgctttggagatacaattacaatctagtgtcatataacacttatggatcgtgtgaattaatcacagaacaaagaaagtcattaattttggggtaattctgttgcagttgttttgtgaatgattcagtgctctgtttctatttcatatggaggatttataggtgacattccgagatccagaagctgctaggagagcttgtgctgaccctactccgattatagacggtagacgtgcaaactgtaatcttgcttcccttgggagacctcggcctccattgccctatgcagtgatacctaacatgcctggtcagtcttatttagactggcttaactctggtttaatattctatgttgttgtagaatactcgtaatttagtgtattggtgggtttctttgtgtggataggacgcttaagacctgcttccccgtacattggaaatgtgcagggtcctcgaggttcacttattggaaattatccgtatcagcaaccacttccatataactaccagcaaggagttgtctatccttatgggtaaagtcttgcaattcttatatcacacagtacacactgatgtctttgcgcaagtgtctaatgtttgtttttattttctatctcagagtaaccgcttatggacccgagtacatgtactcgcaatcacaggttgacaatggctatgaacacttgctattatttctcttcgtcattaaactctcttctaactttggctatgtcttttcttgtttcatggtctagggtttatatagtccatacatgggtcagcaataccttcaggtctatggagtacctggagcagtgaattcacccgtttatcaatacgggcaactaagtcagactattcctaatggccatggttatacagcagttcaaggctattcggttccaggaagccatattctgcagcttggtggacccactgtcagtacgatgaccacttcatctatgcctgctcttcaagctccttacccttcaggtacattttactgtcttacgcaccataatgttattctctgactgttatctcaaatgtctcggctactaatggtttagatgctattagttatgtctcctttgaattatgtttgtcaggtataccaggccctgctcccgtacagtcgcatatcattgtccactcccctcaatttatgcagagtaccgcttctgaccaaacaacaaggtgagaatcaatacaacgctttctttactttgggtgtagtagtgatgaattatgcacatttgtctttgttccactgctaatatgatactaatggtttcagttattcttgaagactgaagagaaaaggaagttaagttagtgaaactgctactggaggtgttgcagaagaggcttcctgttttattaagtcttgcacgttatttatcttgcatccttaaggtatgcggttcttattcggcgttattgaaaaagcaaaac

SEQ ID NO: 6208 - DNA, 3006 bp, Arabidopsis thaliana landsberg
  unsure (1)..(3006): unsure at all n locations
aacttctctggcgggggatcttgagaggactcggggtctctatcttattcatagcctgaggggagactggaattccttccaagactatggctccttccgggagttcccaagccttcttctctcctctgatagagaccgggtgaccttcaagaatctgggggtcttcagctctcctgggttgaactgggttggatggagcgggctcttggatccgcagggctctacgttggttatgggttaccaagtaggcctccatcaacttctggacgtgctcatccttggcttgcttcagggcttcaacagcaatgacttcacgactttccaaggcagctacacgggcttgagctgtggtgagatccacatggagctgacggatgcgcttctctgcatcttctgctcgggcaatcatctgacggtggtgccgagccaagaaatcatactgtgcatccagggtgagcaggtatgcagtgaggtacacgactgtggggtcatcctcaagcagctgcttcccttccaatgcacgcatcctggccatccaaattggacggtctctctgaaagggcagaaagaatctgagcggggtgtcggccacttcttcttcatagatctgacacagggccctcaatgccttgcgggcgacgacttggcaggtgtctttgaatctgtgcccagcagcagtgacactccattccacatggtgcggactggatccaatgtatacagtcacgacacacttctctgtgccatgctcgacgaattcacgaccatcatactctggctggctcctgattccgaggcggactgtgcatgctcttagcaacttggggaaaccatcttcannnnnnnnnnnnnnnnnttggcagcgaacctccatctgacttctgagagaaggaaaggggaaaacatttttgaaatgaagggatgagagcaagaattttttttaagaaaatagttttgactcaaaaacttttgatcaggctaagggttacgtcctgcggccaacctaacagctctgataccacctgaagtgtccccaatcctctgggactcaaatgtgatacaattactagtcccaggaggctagtaaacacatttatacatcagatgattccagatctgcttaaacgagacaaacctataaaggtggcgaacaactttaagagttggtccacaactcgggacatatcatcagagtggggctgaagcagcccgatatacgcagcgaacgaaatcagcggtccaacagccacaagcaaggttgggaacagtcgtaactcttaccagatctcctttatcatgaaaaacaacaaataagcaagggtgagtacaacatactcagcagcccaccttcacccagcagaatggggaaatcagatataatgcatgnnnnnnnnnnnnnnnnnnnnnnnnnnnnnaaacaacaaatatttaatgcaagagttgttttgaaaaacattttgtatttttgcaaagcgcatcctctccaaaaggagaaggaagtttttcagtattataacaaaatcccctggactaaaccatccaggtatctcagcagttcccactggttttcattttcaaaaacagctactggacttctcgtccaccatagctcacggctcaaccgtcgaaccttttaaaaaccacttttctcaaaaccatctcttttttttggaaaacaaaacattaattgccataccataccagactcgtccattcctgtggacacagactattcgaataggtttgaactctgcgcagaggggtacactttacccactagttcggctctgcgatcccatggccaatgagacccgaatccgactctctttctttccccgcacgtcctaaccttaacggttatccggaaggagtcaggccaccaccatgtccaaaccggacaaaactttccccctccttatcctcccggtgctccccagccttcataaccctggggttggaccgtacgagttcagattgagtgactgcccacacagtctcgagtgattgtactattaaagagtacaggtagtgaagatgacaaaccggtccttatatgaggggacaatccttctcgtcacgcctaaaccagctgagccaacaccttaggccctcccctaaaccagggagtccctgattatcccactcacaaggtgataagggtgaaaacccttcatcatacacattttgaaaagcattttcttttgaaaactcacacccttttctcaaatcatttgtaacaaatatattaaggattgattgcggcaagcggcttcggtggccataataacttgtctcaaaatcatatcatgcataaaataacaggctgagggttgtggttgaaagacataggtaatttatgcatcaaagggatccagtgagcttgccgtgcttattcggcgaagggggaaggggagctcgcagaactggcttctggctccaccgtctggcgtagacttgcagatctggcctccacgagacgacacgaacgctccgataactatgcaacatgaacaagcaaacatacaaactagcaagtataccaacaaatatttagtatagtggtcagaatagcgatatatggatgggtagagtcttgagtagaatctgtgtcatgtggtgttgtgatattactggtggtggagcggaggtgcttaccaggagggtggactggaggcgaaacgacactatgcgtgtagccagcagagcagagtaactaagtgggtggggtgtttgccttggctgagggtgttgagtgtgtggagtgggagagggtagctgggggtatttatagctgggtgtatgtggtgtagcacagtgaagttcactattggtgagaatagtgacaaatgaatcgtctgacttagtatgaacaagagagttataggcagaatatgggacaagagtattttgggagtcttttggaacatgaaccatgcttaagggatgacatggttggatagggaataatttgataagaatttagaaccaagaattattgggggtacg

SEQ ID NO: 6209 - DNA, 564 bp, Arabidopsis thaliana landsberg
ctagataactcttagtagactctctcgacttgatgctgctcttaccactaaaactctggaagttcgagaagacccagagagaaacattgctatggcatcacgctcttcttcattaagatcaacccaacggagaggctttttcccattttcactataagcttcttgcagagaagtttctacgcgatgaatctggttttcaatagcggtaacaaactgtttatgccgtgtggatgaagaatcattatccccacaccgtttatgactcaatctcactgccttctcaaactcctccaactgattcaacacagtttcaaaacttttcaagaactagacaagaacaagaacacaactaaaccagaaatgtttcaagaaacattattgtacctgccatttagctgtacctaaagctgcttgaagttccttacaaatctcatctttcttctctctaatccacaatctataagcagactccattctaaaatccaagtaaagaacaatagcaaattaaacacatctcaatctttttatttatgccagatcaaaagctaagctcaaagaagagat

SEQ ID NO: 6210 - DNA, 4186 bp, Arabidopsis thaliana landsberg
gttcagctttcttgtaaaaaaagggctgttttaaaactattaccgtcttttctgcaaaccggataccaaaccaatatcaaaacgatggcatgaggtgatgtaagaaaaagtggtgtacaagattgaaaacatgaataactagtgagtgataaatgaagatttcgccgtaccaagtacttcaaattgtttgacacgatctttaatctctgtaactgtaagcgatggtttgtctgcattcagagcagatatttcaaaacatggataccctccggcctcagaaacactgcatcaacaaatctgcttgtgagatttgattacattttgttatcagatttgttgtttggagatcataaaaacgtcaaaatgccagagaattctccaaaatacaacaaggaaatcaagtcatataacacaactagagaaaataatcaaattactaattaccttgcataatatagcatatcagtattaactaagaacatagaataaacaaagagtcaaagacgataatgaagacatgctagcttacctcatagcaacttctaacagcttgagatgaccttcatgtaatgggttaaaagagccaggtagtataatctttctgtcttcatcagacccgtgtgcttctgccacaaagttagaactacatcattagtggcaacaaatgccagatgaagtttgaaaaaaaaaattctaaagtttcattgggacaaatgaccaaaatcttacccccagaaaatggataaatcttacagcacaagtgcccatttataagctgctctagttcttgttcttcagtaaagtgggtttcagactcataaggcacctcagactcggtcaagccagagtcaagtgtcccagaaacttggcatgccttggccatagcctaagataatgaccagaaaaggttttaacaactcagtccatgatgaacctcagaaaacaatgcgtttggagaatgtggaaattttggattaaaactggcctagaagaatatatagtctaaataatacaaaattatgaaaaagaaatgtctgcaggtacttgtttgtaataccagtaaccaaactaacttgtcactattcctaacaaaactagagaaaggaaaatcagatagcaatggcctaggcagattagtaccaggttgtaattagcttagtaacacacctggatcagtgcacagcttgacaccttatcttcttcttctcggctccgtaagttctaaagttttccacaataagaataacatacattgagtagttgatagaaaagagtaaagcaatatgggagagagaaggttgcagcaatcaccttagttagagtgactgaagattccaaaatccggtcggatgctctcatagacaaaaagaacctatactctcgcgcaacaaacaaaaactatgagtgacagaaagaataaagggccatgctagagaactagcttattgtgatagctttcatttcaagcaaacaagtatattactataaagagcaggaaacaaaattgcataacctgtgatctccacgcttaggacgagaagttaccaatgatcccgtaaacccgacaccgagaaccggatatcctatccacaagattaaggaagttacaccaatccacattactatattccaggacttcttgctaacaaaggatggtgaagtgaagaaagagagcaagtacctggtttagagagcttaagcgcccgattgtaggctaacaaggccatctccttggccaatgcttggctacagtgttggctcggaacctaaaagagagcgaacgaaaatcagctgattaatggagagaagagaaacatcgattgctataatgaaattgagaggtttatgaacaaaccctgccgagtaattgaaccatagatactctcgaataaggaaccacggactcgagaagcgtgttcgacgctccaggaaccgacatcaaccaacctaaagcctgaaagagaattcaatttcgatcactcaaaagcacagagcaatcacatacttgtgtatatacgaatcaatcataaagagagagagtgaaaccagagaggcaccgccgcaaagatagacgacggcctgcgtcggagatgagtgaatggcttcgacgacggtacggatcgcagcgtctcccattgtttctctcggtttcgtctcctcccattgccgtgccggcaaaaagccaaattaagccccccaaagtttccgtaatttcaatttatccccaacagtttccgtaataacaattcatgcccaaacgtttccataattacaatttatgcccaatagtttccgtaattacaatttatgcccaaaataattttatattgcactaaaacccaagttgtttgatttactagtatgtagcctcggagtcgtcgccgttagtccgtgaggagaaaataggcccactctggcacactctctctgggtttaggtttaggtttttttggggctctctatcctaagaaactaggagacatcacacttcaccaagtctacttatcgacaattttatcgtatcaccataacgacaataagggccggactaatgtttgtacacatgtcctctccttttacccttttaaggctttagctaaatctaaaccacatttataatcgtttattatatgaatcttcttcttgcgaaaaaacatgtcaagctactattctaagtaaaataagaaagatgagctgtgatttatatggtaaagtaagatataaaagaggtagtactagtactgtaaaagcagactcgaggaataaagaaagcaggaagagcgtggtggtatcttgtggcacctttcttctctagtaaactccactgttatgtttgctctctcccaatcgtcaactagtatgttcaatgctcatttgaaactacactcgttactacttgttactacacttgctacactctattaatatgcatcacttggtattttatggagtttcgtgctagagcaacatcatctaagaaataaaaaatgaatgatactactgtagtagtaatatattgacaagatagattaatagaaaaggacaaacactgtaaatgttacctacattgacacttgacagatcaatcaaaggaccccaatatattacttttcggaataaaacaacaatcatgacaaaaggtattaaaagatgtaactatttgaataaagatatctgcatttgtaacattttgtatataggagagattacagagacaagttgttttttacgagctattagctttatcggaatagtgcaaaactgttagaagaaactgtattaaaaaagctctacaaaaaagctaaaagtaaaaccttttgtaacatttttgataaagtttttatgattgataactgtcaaagttgtacaaagctatactgttattattatggttaccattcaaacccatgaatcttccatgcatctaaacaattggtatagttatagaatattatcattactttgttttttttcatagaaaaacaaaatattatgcttcatgtattatttttacttttatgtatttttcagtttttaattctgaatccacttagcaaagttcgataactttttcaataaaaatattacaacaaaagaaacatgttttttttttctttcaaaaaccatctaagaatactgagaccttcgtttagtgttttatccccatcaatctaaagaatcttcacatcttcattatcaattctttcgttctgtttctagagtttgagacatacatccgctttctccatgcacgtaatcaatttttagtttcttgttcttttgtcaagctatcaatttagtttaaataataataaaaaacttaagcaacaacaaattaaactatcgcattaatttgtaacaaaaaaaaaaaaaatgattgaaatattcattttaactatggaaaattacaaaaatcaacattttcttgcaatttacgttaaaataatgaaaataccaatttcccacatttcatggatgttgatcttgatttccgttcaaatcttcggtttagaaaataaaaattatggaaacaaatatagaaagttctgttttgaggctgtcaacaaaaaaactatattaaggtcatggtcacatgaacgcatgtgactaccgacaatgtgaaatttgaccccttcgtgcgagagagcccaacctaagtttctaagaagtggcccatttcatcacc

SEQ ID NO: 6211 - DNA, 3950 bp, Arabidopsis thaliana landsberg
tatgccgtctggggatgaaggtatgtctggaagtgaaggaggtttgtccggaggtgaaggaggtaaatccaaaagtggggaaggtggactcaaagctaaactcgaaaagaaaaaaggtatgtccggagggtccgagagtgaagaaggtatgtctggaagtgaaggaagtctgtctggggggggagggaagtaaatccaaaagtaaaaaaagtaaactcaaagctaaattgggaaagaaaaaaggtatgtccggaggcatgtcaggaagtgaagaaggtatgtctggaagtgaaggaggtatgtccagtggtggaggaagtaaatccaaaagtaaaaaaagtaaactcaaagctaaattgggaaagaaaaaaggtatgtccggaggcatgtcaggaagtgaagaaggtatgtctggaagtgaaggaggtatgtccggaggtggaggaggtaaatccaaaagtagaaaaagtaaactcaaagctaaattgggaaagaacaaatgtatgtccggaggcatgtcaggaagtgaaggaggtgtgtctggaagtgaaggaagtatgtccggaggtggtatgtctgggggtagcggaagtaaacacaaaattggaggaggtaaacacggaggtcttagaggtaaattcggaaagaaaagaggtatgtcaggaagtgaaggaggtatgtctggaagtgaaggaggtatgtcggaaagtggtatgtccgggagtggagggggtaaacacaaaatcggaggaggtaaacacaaatttggaggaggtaaacacggaggtggaggtggccacatggcggagtaaagaacaatggtcaagttgttccaacattaagcagatcattgtgcattagttcaagattgtatgattgggaaagtaaaagaaagaaaaaatattttctaataagttttatgtttatatgtaatgttgaatctgattattatgataaaaagacataaatgtgatacaatgtttattttaagaacaataataatgtggcaacagttttagtccattctgtagtagaattgcttctgttattcaattgtacgtaagcatagttttatagttaaaatgaatataaagaggaggtttccctagttattttctatcttgtaatagattttctggttcaaaataaaaattcaactaacaaagcagtttgggtttgttgacaacaaaaataagctacagaagaacttagagacgcatggtatgaatatttatttgaggtttgaagtaattttttgtgaccgcaaattagttgttaaaggtttctaagaatcatgtgttaagtttatatgaatagttttcaatacatagtttctcacgttccaagacttttttctatcatatatctcaccaatgtaagccttaggactcgaattgggggctaatactaaaacagcatccctttttctttcatatgtgatatgtatcataagagccctctaatatagtcgtgtggttgagtggttttggtgaaccttcaacaacattttttccgtctcaaaccttctctctctctccatccaacggaagaataggtgaacggttctcgggtttccggttatttagttgcattcttaagcgccccttagtgtgttgagaaatagcttggaccaaaccattcaccaaagatcctctatgtagttttgttacgcatgattgtatttaacagccaagtggtagaatcttgttatcacctttttaaaaatgtttcatatatctccccaaaatatatatattcctgaaaaaagtcgaatgtatatgctcggccttctcatgtttcgacaatattttattttcgaatctaatacaaatttattttacgagatttgaaaattaaacagcatattgcaatatcatcaagccgaatagagatttactgcaaccatcatccgtaaaatcaagcaaactagtattcatcaaacttccacaaaatctcgcctccttgaatttctttcgaagcccctatattaggttgttccaaccgtaaacatgaattgcaacacgacaattaatgtttgagctttttagaagaaagaaaagatggctcaaaaacatgacaacctaaaaaaaaggaaaaaaaaacaagaaagcaaaggtgacgtgacgtaaatctctatttacgatcccatcgttttgcatgtagacccctaacaaccatcagataacaaagtatgagccgaagaactccatcaaatcaaatctcactcatcaaactttaacatttaactatcacaatatgttttcttttcttatcttcttgttggaggcttttcaggtggttattgctaccgtggtctccatagtcttcttagtgttcgcgggtctaacactggtaggttcagccacggcattaaccataacaacaccgctttttattatattcagtccgattcttgtaccagccacgatagccactgctgtcataaccacaggattcaccacgggtggcgcactcggagcgatggccgttgctctcatcaggtggttcattaagtgaaattttgtaaaactatagtcatttttgttttatgaaaaacttgttcaattctcttttttttttctctattctatctttgattcttttcacatattctaattcatttattttaaagaattagtgtaccctgtgtacacttaatggtcttattaattctttaatgttttgtcttctaacttcgttgtctattccatcacaacccatgtttaccttttcttgaaacatcattagaaaaactgtcaacgtgattaataagaagtggtacaattttgtttttaatacataagtaacctttgtacgcacttgtgagtatatatgtagacgtaggatgggagctaagccgactgcggaaggaacttcgtcagcccaacctcttctcaaattgccagtttatggtggatatggaggattttggggaggaaagaaattttctggaacattcggaaataaaccagggggtggaaatccgtttggagacatctcaaaatggctcggaccaggggccgcaggtggaggtgcacctggaggattaggagggggcggaaatccgtttggaaacatctcaaaatggttcggaccaggggccgcagatggagatgcatctgctgctggtggtgcacctggcgctgaagctgcaccagccgctggagctgcgtctgccgctggagctgcgcctgctactggagctgcgcctgccgctggagctgcgcctgctgctggagctgctcctgccgctggtggaagtacaccacccacatggtaaaggaaataagtcaagttgttccaacatgtatattgtgcattgattcataaggaaacaaaagctttttaaaacgtcttatgctcatatgtattctccaaggtcaaagctgcttacacaagactatgctacaatgttcattaatttatagtataaatcatatagctcgatgaacaaatgggaacgtataatgtataatgtacggtcgactcttagaccatgtacattgcacatttagtcggcattgtagtctgtaaatcatactatatcaattctgaaggtttttatatactaagtaattttaaattgaaaattgatttcattattttcaaatttgttatctataacaaagcaaattgattattgaatatttgaagagaaaaaataataattgaactgagaataaattatatatttctaattaaaaattacgttacatttgtaactaaattttctttcaacagctacattttaaaatatcgtatatatagtcaatcaaattgctgttttttttttctggtcaacgatcaacaacccaaactttttatggtatatactgacaagcgagaagtttattatctatgtaacggttgcatgactagtcactagtacaaacttagccaataaactctgttatatcataagctctgtttttttaacatttgtgcatacg

SEQ ID NO: 6212 - DNA, 1029 bp, Arabidopsis thaliana landsberg
aaaacttacaagttaagaagttcacatttttcaatcgataatggctcattatctatgtcgacaattatggttagtctatccaatttccttctctaactctttttttcttagcctgtaaatgtgactagtgcatgaattctgattggaagtaatcaaatcccaccaaaaagcttaccactttcctaaatcttcaagcaaacccatgattttacttttgtcagtttacctcctttttgtttattgaagacctactccttccttttttcaggtttttatatgtgtactcctcttgcttgttcctcatgctttctttcagctagatttttcatgtgcctgacgaatctgcttttctttaaaggatgattttggtttgggtttgggttttggcatctctgccactcatttcttgacaatccttgttctctatgtttgaggtaagggtttaatcctcgtgacactttttcagttctggttaaagtcactttctttgcttatcttccttattctttttgtttcattagaagtttctagctttctcttcctatgttactctttttaaaaaaatcccattttgatttggtgaagtggctcacaatctctcattttgtgattcttaaagtttttgggaattttatctaattgttgtttgtttatcaaacttggtgtttcaggaactgattaagccaaagctatgttttgggttttggttctgttgagcttcattgttcttattggtgatgggatgatttcagagggagctggtttaaggcctcgttatgttgatgttggagcaatattcagtttagggactttacagggtaaagttacaaatattgctatgaaagctgcagaggaagatgtgaattctgatcctagcttccttggtggatcaaaattgcgtataacgacgtatgatgcaaagcgtaatggattcctcaccatcatgggaggtgaaaaaaagatatgatcttgtttcgttgattaatgttttggaactaaacttttacttatcctttgtgttggttttag

SEQ ID NO: 6213 - DNA, 3325 bp, Arabidopsis thaliana landsberg
atcacattgtgaatgagctctgacgttactagtctatttgtagagttgatgaagctagtctcattgcaaaggtggagggactcatgaaaaaccacccgaatcttcttcttggtttcagcgtctacctttcagctgggactaagctaaccatgcctcccgaggctgagcaacatactgcgccatctgataataacaaacgaaaacgtgctaagtgtgatgatccatcgatgatcaagattacgtctgaaaataacaaaagaaaacgtgcaacgtgtgatgatcgatcgatgatcacgattacgtctgataataacaaaagaaaacgtgctagtgtgatgatccagattatggtccggattatgtgaagaagcttgaggtatataaatgctcaaattataaactaatccaaagaaaataccattttggtcattcttgttttgataacttgttgtgagtctccatcgaagaagcgaaagaggaaagggaagaatgtgtctccacctaagaaaaaggtgaaacttagcaagcgcacaatacattgtaataaatgtggtcaagcagggcacaattctcgttcatgtagtaagagagctctttaggttagtctcttttcatcttgagttcagtaatgttacactgttgctgtggttgtgttttcttgatagtaaatggttgtgttttcagacttgtgttagtagtggatcgcaaaagaaagcaactcaatctcagcgaaatactcaacaagtagaagattagaagcaagtctgtggattgtttcctttggcttcttagtagggtttttgttgccttcttagtaatttttgtggctcatagtttagtggtgttttgcactaaagataggttaaggttttggtgagaagtatctgttagaagcagaactctcgcgtcgatctatgatacttataagttccaatgttgaattaacacattgtcttcctagtttttggattcattttacaacattcttaaagctttgattcaaatgatatcaagcaacctgagtgatcattgttatatctccatctcctcatgcaagcgcttatccagagttagcttagtcgtaacgtaaaatttcattcgcatgtagcatcaatgttggtttctaatcaataagttagctcatgcttgatcacccaaactcaaagtagttgtgtccatagttgtatatgttgtgtatcgaataagatggttttatacatcaccacggtctattatgatcatcattggaatctatacacagttcaatactaacaatcaacagaaaaatatttcttataacttttgcattgatcaaggaactcagttctagagcacactagatgtaaaaatctaccggagaagtcactacaaagtagttcaacatttcagaatagtttacagttccaggcgataaataaaccaagacctggtaaaaagtggacaagacaagacctcactgttcttgtcaataaccagggtgaaattagtccaaatttcaatccctgtaaggctgtaactcaagaaatctctaatctgcttttacaaggacaagcagattctaagtaaagacaacaacatgcgaaaagcaaacatatccgcttttcgctggtcgatcagatctatagacgcctttcgggttagtagcaacgaaccctttctcgctatttcactgaccgactcttttcactagcctcatgtgccaaagagttgcaaccttcgtctttccagctcaagctgccataaaagcaaaattgcattactatcacacccaaggcttgatcaacgttacacgattgaatgcaagtgactaatataacaccagaggcttaattggcattacacaatgaactgaaagtgacgcttaccactttcttgactcggttgttggcagcatcagttcctccaaagacacaatctgaaagatacgggctacgaacgcgtacctctttcatcaccagaatgtctgagttttcccattgcacaggaagcctaaaaggaaaataattcacatgtgattcattcgaaagagaaaaagcaaattcaaacaaagaaagtttaaggatttatgtagtctaaaactatgtatctagacagcttcttaactgtatcagtatcacaaagaagactaaagatacttgacactagagcgcacaacatatgtaatctacaacaaccacaaacatagaaactttacatatatatagttgcaaagctagcatcaccggaaaccaagagcaaaacaacactaaatcatgtccagatcctaacaatttatctttgggaataacacattagacgcacaaaacaaaatcctccaacccaagcaattgtttacaaagaactaatagttcaactaaacaacattagattacgatctcgtcccacctctctaccgtatactctaagctgtgtttccttcttagagattagcttatttttcgatccgaaaacgtataaaaagagaagatccttacgtcttagacaacgcgtcgaagatgctctgagcctcagcggtaacaccaactcccattctttcagcatctgcttccgcttgcctgtgctcaatacgttttcccaagtaagctcaaaacaagcaaatagcaataaaaattgcattttgaaaggattcaacaacaaaatatcttatcacctgatagcaagtgcctctttagctcggagaccattaagatcaacagaaaagttgtctgaatcaagtggatcttcagttttgcctaaatacgaaagccctgtaataaaactcgcattcaccatccgagtgttcttcaaatgcccaggtctaggttttgtaccctcttgtaataaccaataactcgtcaaggataacacaattcaggtcaagacattgaaaatacctaaatctcaaattttgatgaaacaaacaattaaagaaattaaggatatcaaaaaagacgaagttggggatggggtcgtaagccatgacgatccctctgaactcatctccggtgatcaccttcactgaataaatattccccaccgcgaatttctctccttctcctccgattgcgctggccaccgatgctcctgctggatccatggcggccgtcctcgctcctcctccgtcttctgaaatcgccgaacttcggaaaaattaaaactatatatatcgcaatatgggccttaagcccaaatacctactggcttataacagtttcctcattttatatcagtatatgggccttaagggcccaataactattgagcttcatgattagttcacaacgcggcgttttatagattagtgtatgactgttactttatccattttatttcgttataacattag

SEQ ID NO: 6214 - DNA, 2544 bp, Arabidopsis thaliana landsberg
gtatgaatttttaactaaaattttatagtgtctactatcctttctagtgttactgattgtctagaaatgttttttatttgatttgtcttttctttcttctttttgtgtagccatccttcgccaagtcagtgtgatctctattatgtcaaccgagacacactcttttcttatcacaaagatagtgaattgtttctacaggtaaatgtagttgattgagatccgtacattattttgacaatagactgatataagtgcatcctacagagaatgatggcgctatgtgtctcgtctcactacaagaattctcctaatgatcttcaactgctggctgatgctcctgctcatcatttgtttgtgttacttggtatgctgcttgtccttttcccacacctaatttaattttcagaactattcctaactgcttttaaacgcaggtcctgttgatgagtcccaaaacaagattcttgatatactctgtgttatccaggtatatttttgcttatcctgtgctcacattgacctagaacagcgattcatcagtcttcatcaaatggactaataaagattaaagtatcagctatcagtctgttataactgcttttttccagtttttgtcgaaaatcatagtttctctagcttgtgtccttatttatatgtgtgattttaagcatcattgtagctgttatattcaggtctgtctcgaaggaaagatatctgagaactcagcccttcaaagtttaagggatggccattcaccatacggagaccaaattccatggaaattctgtgaacaattccgggacactgaatttccaggtttctctggtgctcggatagttcgcatagcagtccaccctaacgccatgaaggtatttatttagttctgctcatatttttaattgtccagttaggttctgtgtgaaattaacaagcttctgattaccctctttgtagatgggatatggttctgctgcagttgaactcttgaccaggtaaatgcaatgattacgacttagatgattaatacatgcgaatattttaattgattgatacgtgcagatactttgagggtcagctagcttcaatatcagaaggtgatgatgaactggaagtggagccttcaccagtcagagttaccgaggctgctgcaaaggttcttgattattttaatctacccttgtagggttttgcatcatgcattctagttcttacttgaattttttcccttaggtttctttgcttgaggaacagataaagcctcgtgccaatcttccacctttgctggttcctcttcgtgatcgacgacctgagagactccactacattggtgtctcttttgggcttactttggacctcttccgtttctggagaaaacataaatttgctccattctacatcagtcaaataccagttgagaatccctctttccctcttctcctgaattactaattctagtgttgtctagcagttcataacacaatttctaaaatatggttggatcagagtgctgtgactggtgagcacacatgtatgcttctgaaaccattaaccttaagcaacgatgaattcgaagttgatgagtcggatgaactgggcttctttgctcccttctataaaggtttgtaaattcttaacaggaaaaatgtttctgtagcttttaaggatgacaggttttgttttaatgtctgggcaaattcttctactctgttcagatttcaggataaggttctctaaactgttgagtgatagattcaagaagatggattataaacttgcaatgaggttagcactaatcatattctctccccaggcagatttagactttttctgcaacactattttcagatgattagacttttcttggtgcggtatgattgtgttcataatatactcgtttcacaatttggtcagtgttttgaaccctaagatcagcttcccagaggttgatttgactgtaaattcaccagctggattcttgaagaaactcgacggagttctttcaccttatgatatggagagattcagagcatacactgccaatctcgttgacttcaatctggttagattcactctctgagagtcacttattttagggaaatatgtactatagtcagatatgtaatctgcttaaataactacacaatcataagattctggtacagactcagacaaataatactaaccgcatgttcaagcttgatactctgtcttttcgtttggtttggtaactatttttactttgttatcttttcaaaggtttatgacatctgcaaaactctagctcatcattattttcaagagaagctcccagtctcgctgtcgtatgttcaagcttctgtactcctgtgtttgggcttgcaggagtcagatttctcgagcatcgaggtataacatatctactctttaaaataaatcgatgatctggaccagctgaattatgtttcaccacacatgtggagataaatttcttgacacatcaggttgttctaaattggatcatgacgttgacttacagagacaaatgcaggggagagggaccaaata

SEQ ID NO: 6215 - DNA, 1431 bp, Arabidopsis thaliana landsberg
tagaagtggacctgaaatctctcttagggtcacgctccatgtaatgtggaaaatttttgatctctagatcgggcgggagatcaaccttagcccccttttttggtgcatcaagagcatcatagtatatatcaatcaacttaagaatattcttcttcctttcatatttttccttagcactctcatctcctaaggtatatgttaaccgtgagaacaaggcatatgttaactaaacgtctctgtaaaccgtgaaaacaaggcatatgttaactaaacgaactattgtgagcttgaaagtaagccgacagttaaattatgtacctcttacaaaatcttgcttttaagaacattttgaatagctcttcttccaactcttcttctgatagttcacttggctttcttccacagcaaattttactaggtttagaagaactcacccatggttcacttggcttgaagtgttccagtagctaaatagacgaattccggttcacaggtcaggtctcagcaatgaagagtttattttcaaatgtgatggatatagcagagtaccttgggatttctggatatgaaatacatatcgccatcaaagtcaccaccagcaatctcatcgcccaaggatcttggacctttctgagggaagaacacagcaaacttggcatttccaacatagtcttctaaggccttaacataggtagccttaagtacatgtatgtctccaaaatgtaatccaggatttctgtaaactaacacatccccggaaatttggccagaatggctacaaaaccatgaaaagaaagcagtgaaaatgagcagctacttgtagggaagaactcataattccaaggaagctaatcactgttttttgatgattacatgcaaaactcaaagcgaaagagaaagagaagaatttgctagcctacaggatgacacagatttcattttccttaagctccccggtgggatccactgtgcccatgatatagtatgattcgtcaataggaaaccttcctgctttgagagcattcctctctgtctttaagagataagaaagacgatccttcaagtatggttcatcaagagggataccaaccaagatcatatctgcagtgtactggtcgtccccataattaatggcagctgcacagacaaatgaacttaataaaaagacccattgagtgtctcctcaaacttccgagcatattttaactcagtagcttcaggagtagtaagaaactgcaaacaaacaagaaagctttaagattcttagcacctttaaacgcagcacgttcactgtagaatatggttttggactcttccaacgtgttgcgcaatatattcaaaaagaagtcattagggactcctgcataactaagtagcgccaccaaatttcttgatagcctcgcctttcttggtggattactagaagatgca

SEQ ID NO: 6216 - DNA, 4148 bp, Arabidopsis thaliana landsberg
aaacagcgtggactgttcggggaagcttttgagaagacttgtcaagggaattattgatgaggtgaagatccgatggagaaatgctttggcacatgtcgctaccattgctggggaacactctcttaattggtatgtctcaatgaatttagtgctttttatttttctcaagcaatttgttttcgtaaatttagaccaaccagatctatttggttttgcttttgttagggataatgaagcaaagatgatccaaaagattgttacagatgtttcagacaaactgaatctcacaccgtcgagggattttgaggggatggtagggatggaagctcacttgaaaagattgaactctttgttatgcctggaaagtgatgaagtcaagatgattggaatttggggtcctgcagggattggtaagactaccattgctagaactttattcaacaaactctctagtattcttccgtttaaatgttttatggagaacctcagggaagtattaagggtggtgctgaacattattccaagttgagcttgcaaaagcaacttctgtctgagattttgaagcaagagaatatgaagatacatcatttaggcacaatcaaacaatggctacacgatcaaaaagtgctcatcattcttgacgatgtagatgatcttgagcaattagaggtattggctgaagatccttcttggtttggttctggcagtcggatcatcgttaccacagaagataagaatattttgaaggcacataggattcaggatatctaccatgtggattttccatccgaggaagaagctcttgagatcttatgtctctctgcattcaaacaaagctctataccagatggttttgaagagcttgccaataaagtagctgagctttgcggcaatcttccattaggcctttgtgtcgtgggtgcatctttgcgtcggaagagcaagaacgagtgggaacgtctattatctaggatcgaatctagtcttgataaaaatattgataacatattacgaatcggatatgacagattgtcaacggaagatcaatctctattccttcacattgcatgcttcttcaacaatcaagaggtcgattatgtgacagccttgctagctgacaggaagttggatgttgtaaatggtttcaatatcctagccgatagatctctcgtgcgtatatctaccgatgggcgtatagtgatgcaccactatctactacaaaaattgggtagacggatagttcatgaacagtcgcctaacgagcccgggaaacgtcaatttttaattgaggcagaagagattcgtgatgtactaacaaatgaaacagtatgttcttacctatatatatactcccttgatattccctactttctgtttgtgataacagtttcatcggttttgttttgcaatatttggtagggtactggatctatcattggtatatcatttgatatgtccaagatcggggagttctctataaggaaacgagtctttgaagggatgcataatctcaaattcttaaaattctacaatggaaatgttagcttgttagaggacatgaaatatctacctcgtctaaggttacttcattgggattcatacccgagaaaaaggcttcctctgacatttcagccagaatgtctcgtcgaactctatttggtatccagcaagttggagaagctatggggaggaatccaggttggtatttggtacttgtgattgtgaatacgtttgtttactaatgataattaaacttagtatgatattcgtcatctttgtgacatgcagcccctcacaaatctaaagaaaataaatttggaatactcctctaatttgaaagaaatcccaaatctttcgaaagccactaatctcgagacgttgagacttaccggttgtgagagtttgatggagattccgtcctctatttcgaatctacacaaattggaagtactggatgcgtcagggtgctctaagctacatgttattcccaccaagatcaacttatcatctctaaaaatggtcggcatggatgattgctcacgactgagaagttttccagatatttcgactaacatcaagatactcagtataagaggcacaaagattaaagaatttcctgcgtccattgttggaggtcttggtattcttctgataggcagcagaagcctcaagagattaacacatgtcccagagagtgtatcgtatttagacctaagccattctgatataaagatgattccagattacgtcataggtctcccgcatctacaacatctgaccatcggaaactgcagaaaactggtgtctattgagggtcattccccttcgctggagtccatagttgcataccgctgtatatcactcgagagcatgtgttgctctttccacaggccattcttgaaagtggagttctacaactgtctgaaagtggataatgaatcaaaaagacgaatcatactacactcgggtcacagaattatttttttgacaggtaatgaagtccctgcacagttcactcaccaaactagagggaactcgataaccatctctctgtctccaggtggtgaggagtctttctctgtgtcctcaagatttagggcttgccttgtgctttcgccaagcaagaattccccatattctgacataaattgttttctaagaaccaaacaaggtgtcgaaattaacagcactacaaagtccatatattcaagtccccctaacagatctctatcagaatatctgttaattttttttggcgacatatttcctgaagcaaacagatgccttatggacgtgaccccgaacgaaattgtgtttgaattcagctcctctagtgctaagattatggaatgtggtgtacagatcttggcagaaggaggacagaattgtagtgtcgtcgaaatgggccactctgaaactggaggcaacagaaaccacctcacagatgttttaaaggtatctcaagtcgaaaccatcaaaaacagtaataatacaggtcactggagttggcttctagggaagaagaagacagagcttagttcgacattagtctcaggatccagtgatgataccttgatgaggcatcatgagcctgaagctgttcagctcagtaatgatgaaaacaccagaaatctttcgcgtttgctatgtattgtttcccttgtgatctctgttttgttacttttccattgcttttttcttcaaatgcaatgacctgatgcattacactacagatcctgttgtggttagacgtaatagttgttgttgtattgtttggtgtttttcttgctgttactagttgttgtatgattgtgtgaaaaaaaaagggtttagttttcttagatattgatgggctgactttagcataagcccataaggccttttaagcccacttcccggacgagaagagcgaaccgacttatatacgaggatttatagctcgtcttccttaaattttcgtttgtgacggaagaagaatcaaaacaattaatcgcgaggcttgagaatcaatcaatggatatgcagaatgaaaacgagagattgatggtcttcgaacatgctcgcaaagtagcagaagcaacctacgtcaaaaaccctttagatgccgaggttagtcttttgatttatcgttttttggataatttaccctaaattcgattacgaattttgttattcgaattttgtttctttgtttctgtagaatttgacgagatgggcaggagctttacttgaactatcacagtttcagacagagccaaagcagatgattctaggttctttgttatttcttctcgttttagttttgtatcgaattcagattaaattcgtttgattgagtctgccttgaaattgaatttttatagacttagattagtcgtttatgtatgtatgttaagatgtatgttttgttattgaaatctgtaactaatacttaaaagatggaattttacgtagaggctattttgaagctgggagaggccttggtcatcgatccaaagaagcatgatgctctttggttaattgggaatgctcatctttcatttgggtttttgagttctgatcagacagaagctagagataactttgagaaagcttctcagttctttcaacttgctgtggaggaggtaattagtctcgttcgttcgtaa

SEQ ID NO: 6217 - DNA, 427 bp, Arabidopsis thaliana landsberg
cttaattttactgattaatgtggtggattacctcagggtttcttgatatgaaatacatatcaccatcaaagtcaccacctgcaatctcgtcccccaaggatcttggacctttctgagggaagaacacagcaaacttggaatttccaacatactcttccaaggccttgacatatgtggccttaagaatatgtatgtctccaaaatgtaatccaggatttctatacactaaaacttctcccgaaatttgcccagactcactaaaaaaccatgaaaagaagcagtggcgaaatgaacaactaactcacaattccaaaaaactaaaccactgttttttttttccatgcaattaaaactcaaaatgaaaaggtaaaagaagagttgagtagcatacagaattacacagacttcatcttttctttatcgctcc

SEQ ID NO: 6218 - DNA, 527 bp, Arabidopsis thaliana landsberg
ggatccactgctcccataagatagtatgattcggtcacaggaagttttcctgctttgagatcatttttctctgtctttaaaagtatagacagataattcttcaagtgtggttcgtcaagggggataccaaccaatatcatctgtgcggcgttctggtcgtccatttccccataattaagagcagctgcaccgaaaatttgacttcttaaaaataaatagctctaggcaccagaaacaaaatgcaaaagaaccagaaacgttaggaattttaagcaccattaagtgcagcacgtttgttgtagaatatgcttttagactcttccaacgtgttgagcaatatatccaaaaagaattcattagggattcctccatagctaagcagcgcaaccaaattttttgatagctttgttctttttggtggattactggatgatggaaacaactagatgttactcggataacttcactccacaataagaacatttgagggagagaacttcagtattaaaacaacaagtagtcagcga

SEQ ID NO: 6219 - DNA, 4403 bp, Arabidopsis thaliana landsberg
aactttgggagtccgcgcacatctttggaatataaacgaacccactttcaatttctcgaaaataaacttgggggtgaaatagcgttaatcaatgttcagacttcagtgcaatactagtagcttttgcttttggaaacatttgtttagataacatgtcttaaattaatcattaggaaaaaagaaaaaaacagttagggtaaatccgcctatatatgtgtggcgggactgggatctcgtattaaaggcacgtctcaatcaaatctattttatgagatttatttatgttttataaatgaaattatgaattaggttcagctagtacaagtgtacaacagacaaattgattaacattttcagaatagttagatgatattgacatttgtcatgattgatttgatgctgatcgttttgttgctaactattttctttacgtgtgaatgcctaatttttgtgcatcgactaaatttttctatgtaataagcatcaatcttttttttataatgttttatgaagaatgtaatactatactaatattttcgtgagttaatgaccaacgctaaaaatttacattctttatttatgtataagtgaaaaaaatagtaaaagaaaaaagaaaaagagactaatttaacggttgctgtgaagatcaacagaagtaaagccttcttcaacagagaaacgagggtgcactcttggatccccaaccctatgaggtgaagctggcaatttatagctattatccatcgctagagaatctccttcttgttgatgaatcactagcaccgagaaatgaaaatccgacgacgcaaacatgtctccgatcacacctagctcagggcactcgctccagtctgtaagtccgtataacaccgacgactcaaggtcatggtcacgacccacaaccaccagatcgaatgaatcccctagtgaactaatcacttgcgtggtttccacgccatctctcactatctcttctctgtaactgattttcggtttgctcattgcgaaattcttgaaatcgtttataaggtaggactctgctaattcggattccacatctactacgtggttctgctggagggagctcttatggcggaaatggatcatcgtgacgcttacttccgggtgctctgcgattctcatggagaaagctagggcttctgcgtcatctcggccttcgatgaagatcactgcgacgtttcgccatgtgtagctcatgaggaccgagcggcggccttctgtttctcctcgatcgatgaatattccgacagaacaaggtgccttttctagcacgttaaggtttatgttacggattgatgggttcacgtggtctaccgtcccgtctatcgcgtactgtttgtggaaagggatgacgatgagcgtcgctttcttgtcgagggcgagagtgcaaatgtcatcgttgatgctggagaatggagctgcagctgtgaaatgctgagccattagggttccttggttctgctgttcgaatcgttggaaaccgttgacgatgtgagtggattgaactgtgttgggatcgagtttgttcatctgatgatgcggcacgagcacggcgtgcgctcgacctttaagctcgacaaggtggagtgtgaagacagagatcgggctgaacctactcgggtaagaagcttctagaagattaaccatggaaggtacattttcaacgttgtagacacagagcatgagccggaactgaaggttccgttgtctcgtatcgaggatcgatcgcttactcttgctcttgtggcggctagactggtcatagaggcaaactacgaggaaccgcgaaatacctgtcacgagcaagagagtgatgataaggagattgaagcattctgtgtttagaacctgcaaaatatgaatgaaaaagtttgataatgtgttcatggaccgatcttatgtttagagaaatctgatcacacaaatgcaaacaaaacaatataccttttcgtctttccacatgacacatgtgtaaatctcaatgactccttggcaacacatcaagagggccaaagaaaatgcgtctccgatttgtatgttgcaataagcggaagctgctgctgttcctaggaatttgcagccgtaggtgatgagtataacggcctcaatgatcttcacgtggctttctccgataatgaagaaattggtctgcaatccactaatggagatgaaacaagggagcataaggctcgttgcaaacatttcgagctttgtggtgagcccggtccctaaaggaggtccatccgggagcgatactccgagccagaacgctccaaacgccgcatggaccccgagaacttcggaggtcaagcttatcgtcagcaggaccattatgatcggcaagaatgggatctcgcctgctttatcgatcgaaatgcttcttctctctgtcaaccagatgatagccggtctgcagacgaagaaaatcacgaggataagagcagtcacccaaacgaaagaccaaacgctagctagtgtcccatcccgcaagaacattctgaaaacaagtgcaactatccagctaaaggcctcacagacaatggagcagtttgtggctaaccgtccaagatcagagttaaggatgttaagctcagctaagacggttgtggtgaccgggaatgaggtcattgcattgagggagatcactgtgcttatgcagtggacaacgtctggcgggaggttgtaagtgtttttcaaaaagaggacagtgaggttaccgagggagaatggcaaggcgtaggaagctgtgccaatgagtatggctttggaaccagctttacgaatgatgctagcgtcgattcttagtccaagtaagaagagatggatgaagaacccgaggtttgagagcgtttgtaaagtgattttgccgcttatggggaggaacatctgcatatatgcgctgctttggccaaagagagacggtcctaggatgatcccagcctgcgtttaaaaatttcgcaaaaagagagaaatgaaaagagctccagactccatagactagtctaagttttgttctgagattcctcgattacagaaaaagaaagaaatatagacaacttattaccaagacttgggcagagatcatgccttgcttcaagggcttgaggaggcggtagagaagccttgaggtgatgatgatgacggacatttgcagcaacataagtggcattgcgtatttgagagggtcactgcccaagaaaacaccctttgaggtcaacatgtggtttttctggcacaccatgttttccaccaagaatggcccatgaactttgcctctctgcatcgagttcacctcctccaggtctagctttgacatcgctctgttctttttgtgcgtaccaaagacagtgagaagaacgtggaggaagagagatttctctctaaatatgcagaacctacttgatgccgacagatgagaatctcttagtgagagatgaagaacaaaacagaggactctgtttttattttggggaattgttgattatcttgctatcatcagatctagaatggtatctaagttttgtttaaaggtcagagacaaaaagggaagtgagagaaaaagagagagagagagatgaagcatatttgttgcctctatttatcgaatgcgactattttttggctggttgatgtcagtaaccccataatcttctcatttctaaattcgtggttttagttcccccaaagtcctaataataataaggcatttaaaatgagattttctccaaccaaatcactctcaattcttcgatcccattacattctggtctaaagcttcggggtcattcacaccactaatcggaaacgaaccaaataaaataagacagtttgcttttaaacagctactaattagtatatcattaccattcatccgcatatcaaaactatggttttcacttcttggcaaaagagacgaccattggattctgcggagtgatcttgaaaccctgaagagcctgcatggccatggaagactgaacatcgtcttcatactccacaaacgcaattccgggttttgcttcgatcattcttatctctttgaatcctgggtattgctcaaagagcagctgaagcatcatactattcgtctcaatgggaagattatgaatgaagagtatgttgtttggtggcatcgtgtcttgcccactcggctggaaaggaggctgtgaaattacagagacgggtattaggaaacaagaatttacagactaagttgcgataatgacgtctgtcagaagataatattgtattgttggaatgatgcgagaaagagaaattgccacaggcattccgttctgagtagttgcgccattaggcaagcttggttgaaagtttcttcagcatgtcgcttcctttcaactgaaagtgatgtgcagttttgt

SEQ ID NO: 6220 - DNA, 2752 bp, Arabidopsis thaliana landsberg
  unsure (1)..(2752): unsure at all n locations
tcttttcctctacttttcttattatcgatgatatcttttagtttatcagctactgcagatacccactcatcctatctcattgttgatgtttgatttcaggtgttgtttttaatnnnnnnnnnnnnnnnnnnnnnnagcctgataatattttagggcgaattgctcaacaggcaagtattgtgttttgcttactataactagaagtttctcgttgttggtttaacctgatcttgggttttgaccttattaatcaactaaatgatatagccatcatgaaagagtcgtttggacacttggaacaaaaaccttgttagataatctgagacatatttgaatttccttgatatagtggttctgatgaaatcagctactactgttttcacttttattaggccttatccccagaaaatacatatggtgttgacagtggaggtgatccaaaagatattcctaatctgacatttgaggaattcaaggtttgttagaagtcaaattaatatgctagtatatttcttgtaatgtgtaacttctgatgcatactaagtatatttcttgttttgggacaattttaggagttccaccgtcaatattatcacccaagcaacgccaggatctggttctatggagatgatgatcccgttcaccgcctccgtgtcttgagtggtaaagattgatatctcctttgtcttactagaaagaatcctcatattttttgtgtttgtcgtctatgtcgatttgaaatacatcttatccctgcgtttcttatatgtgcagaatacttggatatgtttgaagcaagtccatctcccaatagttcaaagattaaatttcaaaagctattctctgagcctgtcagactggttgagaaatatcctgctggtcgagatggtgaccttaaaaagaagcatatgttgtgcgttaactggctattgtctgagaagcccttggacttgcaaactcaacttgcacttggcttcttggatcatcttatgctggggactcctgcttcaccactaagaaagatcttattggaaagcggtttaggagaagctcttgtcagtagtgggttgtcagacgaactcttgcagccccagttcggtattggtttgaaaggtgtgtccgaagagaatgttcaaaaggttgaagagttgatcatggatactctgaaaaagttggcagaagaagggtttgacaatgatgctgtggaggcatccatgaatacaattgagttttctttgagggaaaacaacacaggatctttccctcgtggtttatcacttatgctccaatctattgtaagttaatatgcattttatgcttacgtgtatgtctattcaggtatcactccttatttgattattgttttttttagtcaaaatggatatacgatatggatccttttgagccattaaagtatacggaaccattgaaggccctgaaaaccagaatagctgaggagggatccaaggctgtcttttccccactgatagagaagcttatcttgaacaactcgcatcgtgttaccatagagatgcaggtgatcttttacaagtttctcgttgctatataatgtttctttgcttttgggctaacactagttttgccagcctgatcctgaaaaagctactcaagaggaagtggaagagaaaaatatcctggaaaaagttaaagcagctatgacagaagaagatcttgcagagctagcacgtgctacagaggagctgaaattgaaacaagaaactcctgaccctcctgaagcattgagatgtgtcccaagtttgaacttgggtgacattccaaaagaacctacttatgttcccaccgaggttgcttttgtttttgttgtatttccttatttcccgagcttgcgaagtttactgatatgttttaaacaataggttggagatattaatggtgtgaaggttttgcggcatgaccttttcaccaatgatattatctatactgaagtagtctttgatattggttcgctgaaacatgagcttcttccactagtaccacttttctggtatgattaaagatttcttatgatttctttatgagtttcttaccaactttttccagaaatgtgtatggtgggaatgctaaatgaagaatgttgttagattctctgccatgcattttcaaaagcatgggaatttttttatattttagggtgtacgttgacagctgtaataacgaatgttttacttctgttcatactgtattgatatactaactctgataataaatgtattttgacagtcaatcattactggagatgggcacaaaagatttgacttttgttcaacttaatcagttgattggaaggaaaacgggagggatatcagtttatccccttacatcatcagtgaggggtaaggatgaaccatgcagcaaaattatcgtacgcggaaaatccatggctgggcgtgctgacgacctttttaacctggtactttgtcatttaaaaatcccttgctttagcttatcgcatttttctctaattttatgtatgttggcttatgggatatatagtgctgcctacgtgatcacgatcatgttttcttcggtctccatggccctgtagttagtttgctaaatgtagtttaccaatttgcttgtgtttagatttgtgtatgttaggttatgggatgtgtagagctgtctacctgatagatttttcttttgcttgggtctccatgagatacagtgcagctgttactgtgagtctgtgacactgtgtagatcttta

SEQ ID NO: 6221 - DNA, 1255 bp, Arabidopsis thaliana landsberg
agctttcagggacttcaatggatcctcatacattaatggctcaaaaggatccatatcgtatatccatttcgcctaaacatccaacactaaaataagaaactatacaaatatattacataagacaaacaaaagaaaaaggcagataaactcacaattgattgaagcataagtgataaaccacgaggggacgaccctgtattgttttctctcagagaaaactcaatggtattcatggatgcttcaacagcatcagtgtcaaacccctcatctgccaactttctcagagtattcatgaccaactcttcaactttttggacattatcatcggaaacacctttcaaacctatactgaattggggctggagaagttcatcttccatcccactattaacaagagcttctcctaaaccgctttccaataagatttttctcaatggggaagcaggagtcccaagcattagatgatccaaaaacccaagtgcgagttgagtttgtaagtccagtggcttgtcagagagaagccagttaaggcacaccatatgcttcttcttaaggtcaccatcttcaccagcagggtatttttcaacaattctacgaggtctagagaaaagcttttgtggttcaacctttgaactatctcgagctggacttgcatcaaacatgtccaagtattctgcacaaattagtaaagtagagacaaaatctgtaaaacaataacataatggcgaacatagatcaagaaaaggaaatgccccaacagaaagtacaatttaagatatggctctttaccactcaagacgcggaggcggtgaactggatcgtcatctccatagaaccatatcctggcattgctcgggtgataatactgacggtggaactcctggaatttttcacatgaagaacaataaatatgcatcggaggtcataacatacagagcattacgcttttgtcacaagataatatcatattatttcaacgtttaattatatcacatgacgtacttaacaaaccttaaatttctcgaacgtaagcttggggatatcttttggatcacctccactgtcaacaccgtatgtattttctggacataaggcctattaaaagaaaatacaagagaaaaaaagtgtaatccataagcaccacactgtaccaaagaataatcaaagcagattatctaacaaagaattcaggagcagattttgaagtattgttttgtgagaaactttaattattattacgaaaccaacaaactat

SEQ ID NO: 6222 - DNA, 2596 bp, Arabidopsis thaliana landsberg
gtgtcatcatgggttttttcccccttatcagtttaacgtccatatccatatctttttctttttttaacggcaaagttcatatccatatcttatgatgtgcctaaaagagggagaagatgcgaagacagaattttcatatttgaaagggttcgatatcgatattgggaaacgaatcaaggtcaaaaaactcagtctaatagttgaaatttaaaaaaattattaattcaatccgattggtttcgttttgttatggttcggttctatatcatcaaaccaatcggtttggtcctaaagataattataaatattcaccaacaccagtgttaaacacatatcaacaaacctaaagttagataaacaaagagaaaatggcaaaggctatcgtttccatcttcgttgtctttttcatcttcttcttagtcatttccggtaagcaaacttactctccgtttcttgacatatttgtttataacttaaaatttacccttatgttctggctacaaatctctttgaccatagcaaaatcatgatatgatcattctatcttttcttaattttgtttataacagatgtgccggagatagaagcgcaaggtaacgagtgcttgaaagaatacggaggtgatgttggtttcggcttttgtgcgcctcggatatttccgacgatttgttacacaagatgccgtgagaacaagggagctaaaggtggaagatgccgttggggacagggcagtaacgtcaaatgcttatgcgacttctgcgacgatactccacagtaaaatctaaagcaatcgctaatcaatgcactaaggctgccatagacgcaattattatacacgttgtctttacgtacattcacaagttttagtcatggtttgtgtaataaatgaatgtgaatggtctatccaagtgatgtaatgtgaaatcagaaataatgaaagtgtgacttttgctactacaatcatgttttggtaatacaatttgactaagaaagaagaaacgtacgagtttggttgcctcattgttgttgtgaatttggtatccacatattcttatctgtttactatgtggagagcgttccgactgttttgcggctaatctagccggtcaaagacgaagtctgaatgtgatgaaatgtcaacataagattttaaatgagctctgaatgtgacgtgtttaatattttcacatgtacggttattagagtaaattatgatagttttaaaatttggaagcataaaattatgatgcttaagaaaatcattatctggtattctatttctttattatataatttattttaaataatattaaaatgaaaaaataataatagttttacaatatgattttaacaaaaatatacaattaataagtcctttttggtaaggactcacataagttttttggtactgctcatatacattggaaagtaggatttagtataaaaactttctcatgcaattatatagaaatgtatattaaaaaaaaaacaattatttcaggtttttcatgaatcatgatttattttaccaccgtgctattatatcagggatataaagaggcaagtggttacttttcttatcaatactgatctcaactcgtgacccgtggttgtcatgataatttctagacccaacgataaagataaaatagtagcatcgcaccacaacaagtgttgagcatgagtctatatatatacacatacgttaactccaaagtgaaacaaagagattagaaactacggagagaaagagagaagatatatagccatggcaatgaagtcagtttctaccttggccgtttttgccatcctctttttggttatcgttggtaaattaactaacttcatagatatttctcacgtagtttttaaagtttgcgtttgtgtttgaagcatccggggactatttttctcggtgatcgcagtcaagtttcattatgtttgatttctgtttgcttaattcgttttatatgataaacacagaaatgccagagataaaagcgcaaggtagcaagtgtctgaaagaatatggcggtaatgtgggtttcagctattgtgcgcctaggatatttccgtcattctgttatcggaactgccgtaagaataagggcgcgaagggaggtagatgccgttcgggaggggcaggagctggtagtatgatatgtttatgcgactactgcagcgacaaaccttaaatcagatcgttaaacgttttaacctcaaacgcatgagtagttgctatcttgtactatgtgtcatggtttgtaactttgtgtagtaataaaggtgaatggtccaccaagtaataatgaataagtgaaatattaaataaagaaacgtacgactttgtgtgtgtaatttaaatttggcatacttcaattagatgagggtaagggtgtgcgacttatctcctttagtcacgagtggaaaatttggtccatttcagtttcctttatctccaactctagcatgtattgggatttaaaaacaaagacgctggattgttggactatgcttttatgcaattttaaaaagaaataactatatacgtatttccgaaaacaatttgtcacactttttatgatctctaacgaga

SEQ ID NO: 6223 - DNA, 2440 bp, Arabidopsis thaliana landsberg
gaagctgtagctaaaattggctaagatagttcataagttttttgtacttttacttaatcgtgttgcatccttctgcttgcatacctgagcatgcatgtatgtgtgctagattggtttcattgaagaaagctgtggtgacacaaaatattcgggtgtagtgatcaattttgtatgatgtttagcttatacattcaattctgtgttgcagaaaaaattggacttcacccttaaggttgttggaggtgatatttcagcaattcctggactttctgaagctattgaggtttggcatactatttagtttcttgataccaaatatttatgtcattctagagtcttagagaaaggaaatatcaaagtggttacaagtctttatttagctatgaagtacatgtggtcgagaatcaacagggtgttctggttattgcattttcctattaagcatcttttcttgtttacaatgataggtggaatcatatgtgtttatcttagaacttgctagacaggttggcaatttgagtagacagcttaagttctacacatgaaaccttgttcatatgctatttttgtaaaatcacagtatacattcctagttttcttacccaacgctccatatgatgcaaggttgtaatctcttagatggtcctttatgctctggtgcatatgacacttaccagtaagttgatatgtctcaggaaacaattcgggatgccgtggaagattctatcacatggcctgttcggaaggtcatcccaattatacctggtgattataggtacacctcagattaaatagatgaagttgaactgttgacgttcttcagtggaggatatgctcaacttttttttcttttcgttttgactttcttactattgtgttatagcactttcgaatagtcaatgcaaatgatggtgcttgtctttctggttttggacttttattttagatttttttgtgtttctattcccagcgatctggagctaaagcctgttggaatgttagaggtgaagcttgtgcaagcaaagaacttgaccaacaaagatctagttggaaaatcagacccctttgctaaaatgtttatacgccctttgcgtgaaaagactaaaagaagcaagacaattgtaagtagtccatctaatcctctttttgtgctaaacctaccagaatgatctgatttatatttattctcatcagaacaatgacctgaatcccatctggaatgagcattttgaatttgttgtggaagacgcgtcaactcaacatttagtggtcagaatatatgatgacgagggtgtacaagcatctgagcttattggttgtgcccaaatccggctttgtgaacttgaacctggtaaagtgaaagacgtctggttgaagctggtcaaagatttggagatccagagagatactaagaaccgtggagaggttagatcggctataaatttcccctaattaaataaaccctgtgattttgtatctgtacatggctaatgaatggacgttattgttgattctctgtaatttaggttcaccttgagctcctttacatcccttatggttcgggaaacggcattgtaaatccctttgtcacttcatcgatgacgtccttagagagggtgctcaagaatgatacaacagatgaagaaaatgcatcaagccgtaaaagaaaagatgtcattgtaagaggagttctctctgtgacagtgatatctgcagaagagataccaatacaagatctgatggggaaagctgatccatatgttgttctctcgatgaagaaatcaggtgccaagagcaaaactcgggtaagtcctctcatttaaagcatcaaagagttatccatgttatagatgtttcatcctcctcattaactaatggcaattttgcttcaccaggtcgtcaatgacagcttgaacccggtatggaaccagacttttgattttgtagttgaagacgggttacatgatatgctagtccttgaagtctgggaccacgacacctttggaaaggtaaaaccaaaccgcaacaacactgttatttgatggttattattctgcgtcattgcaccaaatggatgtttttctcgtttggtttattatttattgtgttggcattgggcattggaaaaatgaaacattgtggctttacttttgtggacaggactacattgggagatgtatcctcacgttgacaagggttataatggaagaggagtacaaagactggtacccattagacgaatccaaaacgggcaagcttcagctgcatctgaagtggatggctcaatcaatttatcgtgattcctaagcttaatcggtagaatcaatttatcgtgattcctaagcttaatcggaagattcacaacttcgaatgtacatgttgtctagtagcgtcaaacggatgtgttttgtcaaacaaagacgagtctgcatgtagccca

SEQ ID NO: 6224 - DNA, 2328 bp, Arabidopsis thaliana landsberg
atttctcccagacgtatttgtcaatgctagcatgttattatcacttgacgttagctacaaccggttggagggaaaacttccaaaatccctgatcaattgcactggtatggaacttctgaatgtgggaagcaacataatcaaggacacttttccatcctggctggtttctttgccatcattacgtgtcctcatcctcagatctaatgcattctatgggtcgttatattatgaccacatatcttttgggtttcaacatttgagactcattgatatatcacagaatggcttcagtggaactttgtcacctttatatttctccaattggcgtgagatggtgacatctgtcttagaagaaaacggctctaatataggtacagaggattggtacatgggcgagaaagggcccgagttcagccatagtaattcgatgactatgatatataaaggagtagaaacggacttcttgcggatcccatattccttcagagccattgacttttctggaaacagattttttgggaatatacctgaatccgttggtttgttgaaggaattgcgtcttctcaatttgtcaggtaactcattcacaagcaatatccctcagtcattggcaaatttgacaaatcttgagacattggacctatcccggaatcagctatcaggtcacatccctcgagatcttggtagcctctcttttctgtcgaccatgaatttctcccataaccttctcgaaggtccagttccactaggcactcagtttcaaagccaacattgttctacattcatggacaacctcagactctacggtcttgagaaaatctgtggaaaagctcatgccccgagttctacaccactagaatccgaggaattttcggaacccgaagaacaagtgattaactggttagcagcggcaatagcctacggacctggtgtgttttgtggattagttattggacatatcttctttactgcacacaaacacgagtggttcatggaaaaattccatcgaaacaagcgcagagtagtcaccataagtgctcgttgaacaccatcacctctcacaatttctctgagtgattgtgaaacgtatatgtttgttatgatatctgtcagttgtgttatgcataaactctttgtctttgtaattttctactttatggtattgtaagaaacggctttggtggtatctgatcttctatatgttgggttgaaaatgcattcagatttttcttcctagtcaaatctcaacttgtcataagaggatgtttcaattgtagagccaaatggaagttcttcttcttctaaatcacagtatgaaattctccaactcgtgttttatttcattctccccaaagtttcttgctccgctcacacgtcaatcttgctgtccctgagtataccaaattcgatttcgagattcgagataaaaaataaatatgatttggaccagtgcgggggttgttatgcatctatgcaattgtttttgccattttgatatgggtaatgtgttgtttcggtgaattttacatactaggagcttaagatctactttcataactgatgttgcctgtaatatatttctgtgccattaggaaagtcacaaatttatgttttacttctaaatgtatccataaactgcctgagtttttcatggcttgagtgtgatttttctccatattttgtactagagcgagttcatcgcagagtgctatgccaggagggcttatatatcaggatttactggaagtgctggtaccgctgttgtcaccaaggataaggcagctctatggacagatggccgctattttcttcaggttttgatcattatcgtcctttaaaattatttgattgccatctcatattgaaaggaaatgtggagtttcttatctacattctctgcaattattctatcaaaggcggagaagcaattaaactctagttggattctcatgcgggctggtaatccgggagtccccacggcgagtgaatggatagctgatgttttggcgcctggtggaagagttggtattgaccctgtaagctattattaaaccttctaaattgtgtctccttttgtccttaaatattgtagtttgtggtttgttatttacaagactttggaattcatgaagggagcagttccttttttccgccgatgctgctgaggaattgaaggaggttatagcaaagaagaatcatgagttggtttacttgtacaatgtaaatcttgtggatgagatatggaaggactcaaggccaaagcctccaagcagacaaataaggatacatgacttgaagtatgctggtttagatgtggcctcgaaattg

SEQ ID NO: 6225 - DNA, 2889 bp, Arabidopsis thaliana landsberg
agcagctagatgcaagaaaagcagaaaccaacatcaatctagaatctgtcagcagttagatagaagattttagattctaagccatagaaaggtagatacttctattcttttatgtctttctttttgcctgtagcacaaagtgtcgacagagcgaatataatctcactttacaagagcatctcacgggttcatcaaagttcttttagcaaagttatttgtaatggtggcatgtcaactatgcattcatatccaaaaacattaagaattatctataaccaagactgataagtgctaatcatattcttatgtgtcacaatctctacacagaaccaaaaagtcattagacagaacaaatggtgtctaatcatattcttctgtgtcacaatctctacacagaaccaaaaagtaatgatgctaaggtttgtgtaaagcagcagtgtctagtctatgaagtgcatgcatttacgatgcagacctcatcttgtgtatgcttgatattgaaaaaatgtatctatctacttgacacgacccacttcataaactacctatataccgcaaaaccaataaacacacatcgagatagcaaataacacatgtcagatgatccttccccccaatgataaagaaataaactatgccataggaatatggacccaaccaataatagagaaaaacaaccaacataagtttcaagttagacctgaagctactttggggaatgcatagccttgtaagaatctaaaccgccagtcagtgataaacgcatcttatgagatctaactttgacaccagacatatccaagccaaaatacactgtaaaaacatagagttgatctgtagataccatccccaaaattcatacaccaaaatccaagtgatggtgtgaagcaagataagtgagaaatcattcaccattattaaaccaaatacggttaaacttccaaggattcttatcacaagcatctcctactctactctgagggttgataccagttaccgtattgatgcctcaacttacccaccctttatcttatcaaattggtactaaagtttgtatcaaatcgtggtgtctagatctaatatacttgctctattgttcttcttttccccacaacaggcacacatcttgggtattgtacactagctactgcaagatattttcatgaaaattgaacgaacaaaaggcttagtgtaacgattcagatcttggaagtcctatctcctagtatgaaaacagaagaaaactacaaagttggcctaatgataaaaaaaaaaaaaaaagttatgctaatataaaagaatgcatggagtgttcactagatatagtgatataccacttgatatcttagtcgttttcatagattctccaaataccaaactcagaatcttgatcactgggtgattcaaaacagccaaacaagttgcaatccacaacctattgtataaaaaataactaactacgagattttggagatcctgcaatttaaaatgaagcaacatgtcataaaaatatgatggttcaaatagggcttaagatcctaggcatttcttattggatgagatataactaaagtgttgaaaagttcaattaataagcacagccccacttaacaaagagagttcaatagagtaattgagcttttccacaaaaaagaagggttattggttaacaacagaagactgtggtttacaggtagcatatgtccattacacgcatcttagatggtatcaaatcatatctggtaatatgttattgagcttgtgaaaactgcaacgaagtatttgtaagtacaaaaactgcaacaaagttttcctaagcacatcttttgctgtgataaattgcaggtttagcttaagtaatgcccttacttcaacatgcaatggtctaaaattgttcaactctctcaacaatctataaattttacttcagttaactactggaacaactgtaggatatcaatagatcatagctgtaatttataacaaagatgttcaaatttctgctactatcgcaattattataatgttcttttggtgggggagaactatcctattatattaatacgcgttaaaagtatgtaaatacagaagcactagagaacaatgatagctttagaagataatgtttcaaaatactatcttagtgctttaagaaaatcttggccacttattggcctaaagaccttgatcagtaagatagattcatgtctaacctttttgtaatataacatatattgtaactatgctaatagtattataaagaaagtttcgtcgacataccgttataaagcaaaagagctgctacacaataggctctgcctattcatcctagcacataccgaagttctctacattatcatgacaagaaaagatatttagtaaatagatattcagtacgaacgttgaataaatagatatttactcaacagatatttagcaggaacgatgaacaactagatatttacttaacagatatttagtaggaaaagtacttaaaagtacaccgagagacaaacactgagaataggcgttcaagagtaaatgattaaagaataggttccaccaaagaaattcatagattgaaaatcaataatggtacatgcataactaaaaaaacaggattaaagctctgtgtttcagtatttccagtttcttgcaaaagtgagctctacttataacgttcctgaaatttttttaatgacactttaaaacccattggatccaaactcttacttgagtattccagaaatattccaattctcatgttatttcacctcaagagaaccatatacatgcagacatttagatacttgggaattatcagaataaaatttgcaaatactacccagacttaaacatataataacgttaatcaaatagaatctagct

SEQ ID NO: 6226 - DNA, 934 bp, Arabidopsis thaliana landsberg
  unsure (1)..(934): unsure at all n locations
tttatattagcctagttttgaattatagctagtatatgtattataatacaaaaaagtgtagaaatgaatcttatcatattgattgaggtctttagtccaacaagtggccaggattttcttaaagcactaagatagtattttgaaacattatctcccaaagctaccagtgtcctctagtgcttctgtatttacattgttttacttataactctgtgaatagcagagtagatagttctcaccaacctaaagaacgttacaataattgcaatggcagttaactagtagcagaaatttgaacatctttattatattgatggcaattttgtagaaagtctcaattgttgagagagttgaacaattttagactactagctatttttgtaagggcattacttaagctaaatctgcaatttatcacggataaagttgtacttacaaaatactttatagcagtttttacactctcaatggcatatcattggatatgatctgatatccctcagatgcttaatggacaaatgttacctgttaaccacagtgttctattataaccaataacacttctttttggtgcacggcctcaatcactattaaattcccattttgttagtcgggtattacttattaattgaacttttgaacactttatttgtatctcatccaatcagaaatgcctaggatcttaagccttatttgaaccatcattgtttatgacatgtcttttgttttgataaccttgtttatgacttgttgcttccttttatattacaggatctccaaaatctcgtagttagaagatgtggtccttaactaaaccagtttagtaggtttgcttacaatgggttatggaatgctcaattataagatntgatatctngaaatatatgaaatgacaaagatatcagtggatattcatgtgatcactcaatcttct

SEQ ID NO: 6227 - DNA, 322 bp, Arabidopsis thaliana landsberg
  unsure (1)..(322): unsure at all n locations
ggggggggcaattaaaaaggagagcgcgtttgcccaannaaaacngngaataagacaaaacccaaaacaggaaaaaaatggacacgcataagggccaagctcataagagataaacaaaatagaagaaaataaacccaaacttgcagagacaaacaaaataaaacaaaagaatgaggaaacacatcatatctcttatccgataggaaacagaccctagacatggataaggtctaacccacactcaagaaacagggaacaggaccccaaacaaaaagaaacccaaggccgcaaagctacacgaaacacaacaaaaagaaaacaa

SEQ ID NO: 6228 - DNA, 806 bp, Arabidopsis thaliana landsberg
  unsure (1)..(806): unsure at all n locations
caacgcccaaacctcgaaacgaatgctgacatcattcacatcaagatgttgaggaacaacacttttgtcacggttacagattccaaaggaaacgtcaaatgcaaagctacatccggtagtttacccgatctgaaaggtggaaggaagatgacgaattacaccgctgatgcaactgctgaaaacattgggagaagagctaaggctatggggctgaaatctgtggttgttaaggtgaacggatttacgcatttcgggaagaagaagaaagctattatcgcgtttagagacggtttcaccaactcgaggtctgatcagaatccgatagtctacatcgaggacactactaggaaagctcataatggttgcagattaccaaggaaacgtcgggtgtgaaaagaaaacgtcccatgtcgtcgtctcttgttattctatggtcactatagaaaccatttgttttggcaagttatatcttttcttggttatgttttctccttcaaatcccgaggaaaatcgggtttagataattggaccaaagcgatttgattaataaaccggaattgttttcctgttttgacccaatagaaaatttgacattttaatcccagaccatataagcctgtcaaatatagaagcaataaagttattcaaaaatagttattttggtttggaaataaatcgctctcttggtctcaggaagtgagtcgatagattgaggaaaatatggtttagataattggaccaaagggatttgattcataaacccgaatcttaagccttgtcaaattcntgtcacatatataaagcat

SEQ ID NO: 6229 - DNA, 1100 bp, Arabidopsis thaliana landsberg
aaatatcattaaaaaattttggatattcgaatcttaagatattcagtatttttcggatcaaaccaaatcataaaattaatcattcggttaaaacaaatcgaataccaaatattactaatttttaggatatttgctttgtgccgactcctactaaacgccctcacatattgcttttccttttcttttctttttgacaaaaacattattcccgtttttgacaaaagaccaaacatatataaaaaatacgtggagtactgaaacttaaatctaaacccaaaaagttagggcacagttttctccacttccaaacttcgtttatacacttcaagtaatatcgtttgctgaagagagggacgaaggcgtacgaacaaatacaaatcgcctataattgttacacaatccgctgtcgggctttgaacccggaatgtgcaaggatcaaatagattgttagagcatatagccattgtgctacagcagagtttttgttattatataagcttacactaatgatatagatttttgtaaagatttttataataaatttatttgtttaacaaattttaggggtaaatttgcatatatatttttgaatataattgtatttttccaataatctattaaattattaggatacaattttagataaaaagctcatacaaacaatatctgattaaataggatttctacacctcttgtcgttgtcacacacaacatagtaggcaagaagagatttaatcagctcagaggaaaagccattgccttacactcataggtttcttaagaactagttagagaagcaaagtccataagttttgtggaaatgtatttttgttctctcaggtgatcactgacttttgtaaatcgattggttttctcagtcacataggtacatgttaagtgatatttttaacatattatggagtgttttttaattgttttattgagtcttttattaaggaacaaatcattcctcgtgtaaataaggttttttttaggatttcggacttgtggaactaaagtgagcattatgaagacgaaatggaccaatatacagcttaagaagagaagatccaattactggctcttttcatgaagaaacc

SEQ ID NO: 6230 - DNA, 537 bp, Arabidopsis thaliana landsberg
tgctgtacagaggagctccaagctctcagctcactaagattgtttctacagttcctaaactcttgggaaagagagggcacaaaactctcagcttatactatgatttcgttaaagagagtttagaagcagataagagttctaagtatgaaactttatgtcagtcttttccacagggtaatctggagaacaagaagagaaatgtatcggttttaagagaattgggaatgcctcacaagttgttattccccttgcttatatccgttggtcaacctgtatgtggaaaagatagatttaatacgtctctcaagaaggtagttgagatgggttttgatccgaccaccgcaaagtttgtcaaagctctccacgtatcttacgaaatgaacgacaaaacaatagaagaaaaagtcaatgtctacaaaatgttaggctttgctgtggaagatgtatgggtaatcttcaagaagtggccatactctttgaaatactcagaggaaaagattactcagacgattgaaaccttgaagatgtgcggtctac

SEQ ID NO: 6231 - DNA, 1810 bp, Arabidopsis thaliana landsberg
aagaacctgaactagcattctttcccttggccagtcaagcatacacacagctccaatagattgttggtaaacctgcaagtgccacaaaccaaaatcaacgagatgagataacagaaccggaactgcaaggattttaatacgaataagcaggcagatcaaagtaaacatatttaaaactatcaataagtttcagatatgaaaccgcataagaaacacttagagattacgagtcaacatagcaacaaatcctacctagagatgcttgattcccaaatcaacttcaaacagctagatacaactaaggattagagacctacatacatgttcttacctccttttcattgcacattggaatctgaacaatcaccattggataatcttccaatctaactccctctccaaccaatttagtcgggtactccatagatgcaacaggcttaatacggcggagcttgatccagaagcatccaagcacaagcaccagacggtcaaccgattgaatcaagaagagaactatacatacattggtcaagctctgaagcggcggcgcaaggtaagacgccctgatctccaaccaccaagcgtaaaccacctccacagcgacctcggcggaggcaacagagggaggtgtgaagtgccatcccttgaaataagcggcgagctcgaaacagagaagaagcacaacaacgacgagaaatcccttgattagacggtacaatctagcggaggaagacacggatggaggattatcgttggcaatgcggcgattggcggtgcgaacaaggtaaaggaaagagttaccgatccagaggaaggaagatgcgagttgcttgaacttgaggaggtagagacgagagagctgacgaacggtacgagtccggatccgatccttatcagggtcaacggtggccggagtacggatttcaacggtgaggaatgcttcatcgtcgccggcgtaaagaacgtcgtgattgttcctatctcgttgcttgttccaccattgttgaaactcctcgttctgggagcgagacattcaacgaagaacaaaagaaggatctctctcgaagctgatgaaatcaggaatcgtcgatctgattagatctgagaatttgggagacaagcgcagagagaacacgattgggctaaacttactaacaatagatgacgtcgtctttcgtcccagtgtcttcctcccatttcttttcttttttctctttttaaaaatatacatctataaaattaatatttataagtgatttaattttttttgtcctcttgatttaattaatatcaattaggggatataattagagttaaatggttgtgtagacgaatcatgtgttagatgcttaagagggtcttccattgacaaagagagtagttatgtgttttaagtttcttactcacccgctgattgcggtattaatctcaaatgatcctttaagcatatatgataataaacatagcatcgcgatctgcacgatgattttacttgcttacattttcatcaactctccaatcatacataccactacaatagagacagaaaaaatagtattttctaattatttaatctaatttgatgaatagaaaatgggaacaatctaatatcctccatgaaattaaaatatatgatataagactaccatgccgtaacatttatttttttaattattaaaaaaaacaaaatgtgagaggaaaaaaaaaagaattgttagcgtgtgtgtttagttgggccgacaaataaagcaccacacaaagagcccactaaaattctacagattaaacagttttcgaactagcccatagc

SEQ ID NO: 6232 - DNA, 1420 bp, Arabidopsis thaliana landsberg
agatttttgaagtaaattcgaaagaaccacaagagccgaggattatttagacaagtcaaacgttatgtagacagtaaactacctataatcaaagcaagattaaaaaaagcgagagaagtagcttacgttctgtacagccaaagacataaaccttcttcccatagagctttcctccttcctccaatgcttcctgacatacaaatgaagaaaatattagactctcgtccaccccggaaaacatgtcaactaaacaatagagaacgtaatccaaacaacttacttcaagattttggaaatcccaattgaattcataaagtgcatctaattgatcccactgccatcacaatgtaacaaacataagcaaggactatcaatggaaacagtagctctgatgttgaagccaaattccacaaaaacaatatacctcagttcccactggaaatgcaaccttccacaaatcctcctgaaacacacaaaacaagcgcacatgttaatttgcaacatacacagaagaaataagaccagaaaaacaacctcttttattagaacttaaaaatactgaagtattgaagatatttttgataatgagataacaccacaccactcatttggaatgacatactatatttgacacaataagtataatggcgcacaattgctctcatagataaagccaccaacaaagttatatcttgtgtatcgttcttgcaaccaagaacactaaacagatccacattataagttaagctataagatgaacatacaggtccaaaaacgtatctcattgttgttttcacagagaatttcgagtcatcaaattagcataactaaccccatattgcataagtgctgaatcctaattataattacataatatctcaagctaaggttaacaaaagcataccagactacgcttctcctcgaagtagacaggctcttcccttactttggccgctctcggtttcttagctttcggaacaggtttcttctcatctttaatctcagtatccttcttcgtagccctctttcgtttaccaccacgacgagcaacaggtttcttctcaacttcttcctttacttcctcagctttgacctcatcttcctgattctcctcatcctcctctaaggaatcaggtttcgcatcctcttcttcctcttgatctcccttagcctcctcttcttccccattctccttcacctcgtcgacgacttcttcctcatgctgttgactctcctcctgcgtcgtcttcgtcgtctcctctatcacctcatcgttctgagtctccgcaacagcagctttgcgacctgctttcgaaacaccctttctcttcgctcctttcttcattgccacagtactctaccaacgaattgagcaaccctactggtttcgccggcgaagatagagaaagagagagaaagc

SEQ ID NO: 6233 - DNA, 1798 bp, Arabidopsis thaliana landsberg
gaatccttttataaattaaatctaaactttttaatatcggtttgaatttataaacgggattataactaaaaaaaattctgttatgtttttagtcataaaatgttaatttgtttatgattatttttgcaaccatttgttttgtgtttataattgttttcaaccgaatgaaaatgaatttccaccagacttataccggacgaaaagagtcttttaatttcaattttttaattggagatgcaaaatcctcgttttctcatgtcagttgtcgacgggaacaaaaactgaactccgcttctaagatccttcgacggagagaaagatatttcagatctgatcggagagaatcattctcaaaatttctccattctaatttctctttctcgagagagtgaagagagacaacaaggaaggaagaggaaaaatggaggaattcttagataagttgccgcagatggatctgatgcgttcggagaagatgacgcttgttcagcttatcatccctgttgaatccgctcatcgttccatcacttatctcggcgagctcggactcttgcagtttcgcgacgtgagtgtgttttaaactcagatccgtcttcttctctttacgaatctaacgaatctcttcgtaactatcggtttaggttgattagaatttagtgagaagtgagatgtttgatctcacaatgttgatccgtctctattgatgtgttacttcgaccacgagtggacattgtagtgatgatctttttgaaattggttgaactggaacgaaattggttggatttagcattagcggatttcaattggtgttgcaaattcggttttagattagcttatgattgagatattgtaagtttgaagaatctgacacactctatctttgtttccttaacagttaaatgctgataagagtccctttcaacggacatttgcaaatcaggtatcaacgcaatgttctctgtaattctactacacttgagctctgttgtatgtgattcaatgcagatagtttttactctattgatgtggtggggcaatttgttttggtatagatgtgtgtgtatatatattaggctcagtacaaactttgtagtaatatggtgattgtttgagtgtcactaatttgtgtgatggtggttctttaactttgtttcaatttttttttacaagatctcttcttaagaattcatttatttttgaagtataatcgtagatttcttttctagtttatattacattaactcccatgcaggcagaacttgtttaccaggccatgcttaaccacaatgagaaactggacgtattgctcagctgtgaaatgtttcttttacactttggtttgaaggttctaggattttgatgtagcttagagacttggagtggatatatatgggctgggctatgcatgtacttaattgctgcactgatttatgttttccaaaatataactttgacatcatgatagaaatccttattaaccacatttattttcgatatcaagtagtatgtggtgaaatttttctcatgcatagagcttttttgcttatgcaaattcttgggggcttttaacaggtaaaacgatgtggtgagatgtcaagaaagctgcggttttttaaagatcaaattgacaaagctggtctaagatgttcaccacgccttgaaatagaaccagatattgcccttggagatttagaggtcagaattcaattttttaattctgttttggcttgaaaagcctttaatttaaatcccctcttttattttggggatcagggcttgctttttttatggaaattta

SEQ ID NO: 6234 - DNA, 575 bp, Arabidopsis thaliana landsberg
  unsure (1)..(575): unsure at all n locations
tggatcacggtacttgattaaaccaaccgtgtaagcatttctgtgttaaaaagtaatatgcatatcagcaacggatagggtaataataatcacaataaataaagatatgactccttactaaagacatcagagattcaaacataatacatacctacaagttgtatctctgcatttgtaagctgaaccaccaaagatgtggaaaggaacagagaagaactcattgtagataagcccacaatatattgaaaaaagtgccattagtaagattacatagcggcctccaaaaagcatctccataaagcttccaagtttctggtaaagaaagataagacacagaaaaatcataccacataggtcgaaattttacaaagggccaatgatattcacaccataacagttattttttaaccctcatgttaacctatatcctacagtgaaaaggtaaaactaagtgcaattgccatatattttatactgactctaaataattgacattcaccatctctcatctgaaaatcctctaagagcacaagacatngcacactagctgagagcacgagaatgcnnacatacta

SEQ ID NO: 6235 - DNA, 506 bp, Arabidopsis thaliana landsberg
ggggttcttccaaccttctacaacgaaactactaaactttttgcttttcacatatatttaatacttactcggggagggtttaattatacaatctctaatctaaaaaccctataatagcacaataaaatgctacactagccttagatctcgaaaatgcaacatatctattgctgcaggtcactctaaaaccaaaggtacaaaaaatttatcactccacaaaacaaaactctatgctatggtgatatggatgttttatgctcaaagccatctactgtcactgcgttctccgtcaactaatacaaaaacattaggatgacaaccatacctgcgtactcaactgtgttttaccagccataagatacaacgctcctagcaacaagcatagaccatgaccccaatcaccaaacataacagttaacaaaaacggatatgtgacaactgaataaacaccactgttcgcctcttgatatctaggaacactgccaaagagtatcatgtcatacata

SEQ ID NO: 6236 - DNA, 1389 bp, Arabidopsis thaliana landsberg
ttagagatggctggtctggcagtattgaatcctcgacgtcgtattcctgcatagtcatacccaaggaatcatctcgcttgtagagttgaatacatcagatatacaacagtcaaataatatttcaagtttaataaacgcacagaatagtggaacgattgcatgttatccaaattcccagcctgtgctgctgaaatagcaaaaccaaacccggcaagcttccaagaaccagctgaagtaataagaacattctgcacggaaatcacaactccacatgttaataaaacatataaacacaacctctaagaagagaagtaagactaaagaaacctctggagaaatggctcgatggatgagatttgcgttattgtgtaagaagttcagtgtctcagaaatctggagcagaccatgcttcacctccaacaagctcatctcctgatcaaattttaaacaatcaatttaataaatccaaggtcaaccttaaattgagttttaatcacagcaacaacattatatatgttaccattgatttcagatctttcggcacattagccacattctcaacattaccaagcgcattagccacagaagcaaaaagcggctccgtaactaaagccatagcattcttattctcatcaagcgcttgcaccacatgaaccacaccaggatgcctcaacctcaccagcttccccgcatcagctcgaatcagatcaagaaacgcatcttcagctgccttagacaaattcgctcgtacacgagcctccgacaaagcacgcttatcaagcatccatacacagaccgtcgggtactgctgtggcctcgtggaatcacgcgccttagctgcgtatagcttccaagctagaccaggaccagcggaaccgatctgatcaagtagctcgtaatcctgaagagcctttggtcccgtaacttcctgtactgtggtatggaccgtcttctcaatcacagcagccgttctagctagagcttgagtaaacgttttcatgtttatcgacatttctgctggatccaattactcctaaatgttgtcggcgatgacgtggaaaccggtgatccgacgagagatctcacaaatcagagaagagaaatgcgtaattaaccgagatcgaggaagaagaagacgatgacggaagagaagcacaagtctggatcgaagatcgtcttcttcccccacctctctctctctttctgcaacttgtttttttcctgtttttcttttttttcccttaattaacacattttcttatatttttatttatttgccaaatcagtccttgtctttgtcttgtgatgaaagtaacatagaaaattaccagtagtcattacaggagcaagaagaatctttgaaatggtgaaaccgattcgagtctctca

SEQ ID NO: 6237 - DNA, 589 bp, Arabidopsis thaliana landsberg
  unsure (1)..(589): unsure at all n locations
gataaggttatcagaaatttgataaactaatagatgatgcaatattgcaaatgtatcagatttgngtgtttttgagcaggcaaccaacccacctttaattcttcactataaccaactaaagaaagtgccaattccgcattaccctttccaacctggagaaattagcagaaaatcagcaaggaacaaagaaagagttgaatttgacagtagaacaaaaaagatccacatactaatctaacagtggcttgctgcactctaggtggaactaggtgagactgaattttgttaagaggaataattgtaactcttctccgaagatcacccttttgaaggagctgttttccagtatcttctgtgtctacaataacattaaataacttcccaccagcagtaacctgaaaaaatagtcaccttagagaactcaaacaatctgacaaagtataataatataacaacaatataataacttacttacttccaaagctgtcattgaggacctatcattcacttttatcagttttgcaaccacacctttcacctttgatcgatcaaagtttttcacaggatcgccgtatgtaaactgaacatt

SEQ ID NO: 6238 - DNA, 1361 bp, Arabidopsis thaliana landsberg
ttttctccgagggtctcctttgttgttcctcttccttcttctcagtgttaccgacgtctgggtgtatcaaagtcagtaacaggccgcgacgtcaaacgagatgttctgataaaacccggttggttagttaaccggtagcagaagaagcccatcttgttccgcatcaattggctttttttcacttgacctctaaccctcacaaacacagagttggtacagtacatacagcagctcacgcagtttcccttgctacaaataatgaagaacataaggatctccgttcgatcgccatagcttcatcaagctcgtctctagacttgtgtagagagattcgaatcggcaacatttcaaaagttcttcatcttactgtaaatggtggaaggcatcgtgtagttctataggcattttcgcctttgagacagttaaacatggacaaatgtaactatgggttcctctaataccttgttgtagtctcactttagcttatttacgtaatactttcttctcaagacgaaggactcgtttcgctaataattaaaaataataaattataaaaaccagaaaaacgagtaaaaaaagcagagaagaaaaatcaaacatacatacacataagtctcgctaagagaaggtcttgggaagaagacgattcgtcgattcaggtttctgctatcatcttcctcttcgggacacagtttcccttttccttttttcgtcggaatcgcttctcgtcgatcaccggttggagaaacagttaaattctgacaaaaaaaaatgtcgattaatatgagaacgctaacgcaagcactagccaaaacggctgcagtgattgagaagacggttcaaaccacagtccaggaggttacaggtcccaaacctctacaagactacgagcttctcgatcagatcggttccggtggtcctggtctcgcttggaagctttactccgccaaggcacgtgactccacgcggcctcagcagtatccaacagtttgcgtctgggtgcttgataagcgcgctttatctgaggctcgtgctagggcgggattatctaaagctgctgaagatgcgtttctcgatttgattcgtgctgattcggggaagcttgtgcggttgagacatcccggtgtggttcatgttgttcaggcgcttgatgagaataagaatgctatggctatggttacggagccgctcttcgcatccgtggctaatgcgcttgggaatgtggaaaatgttgataacgttcccaaagatcttaagtccatggtgcgttagaatttgagcaattgagtgagcaaatggaagatagtatactgtttcttataattgttgtaggagatgagcttgtggaggtaagcaggtct

SEQ ID NO: 6239 - DNA, 1063 bp, Arabidopsis thaliana landsberg
aagatagtgcaggatccatcactggactggagataatcattaatcacaatctccttttacacgtgatcactctactagtcactaaaacctgaatccatttactaatgagagtaatggcttagtcaatatggttactacctctagagaatttgaaattttaatcacttgaattgaacataagatcatttattcttgtaatatcaatgtcagagattggatctataggcctgtcttcaccttcctccatcccagcagcaaattcaccaggttctctactgtactcatctgccataccaaacaaacaaacataactagaattatcatcctaagcaaactcccaaaaccacgccctgcagatccaacatttcgaagcattctagctctagctattgtaatgacacagcgagcacttacttgagaaaacagatttttaggaaacaatttctcatatctccaataacatcagatgagaggaaattaaagagcggtgcgggcactcaccaaacaaggtattgagagaggttgggggtggagtggcgatgaagttgagaccaatgtaaaaagccaaagctaacatcagagtcaccatcaaatacgttggcatagccaatacccaatacctactagggtagtaatggattcctatagactccaacaacttatctggaacatatgcccataccaagaagatgactgtggcaacaacagtcgatatcgatcctacgaaaccgtacacctctgagggtttaggtccatgcacttctgatgctctaaatgaagatgaccttctactgtctgtatcttggaaaccaggcttttgcttatttctcttcgagaagcttaaaactcgtcttggactactcactgaatgagcttcttcaatgttttggtcaaaggaagagactgagaaatgaaagaaagataatcagttgttggcttttctctccttgtctgctgtaactagatatcaattatgaagattgtaaatagattctgtacagatcaagatagaccaatttgaaggactacatataaacgaataaaaatgaatactttattaacc

SEQ ID NO: 6240 - DNA, 677 bp, Arabidopsis thaliana landsberg
tgaggctcccaaattaaccggtttggatgtctcgaggaccgacattggacccaccgcagtttctaggttcttgacatcatcacagagcttgaaagtattgtgtgctttaaactgtcatgtcctcgaagaggatgaaagtttaatcagctataaccgattcaaaggaaaagtcttacttgctctgtttactaatgtttttgatggacttgcttctatattcgccgataatacaaagaaaccaaaggatatctttgcctattggagagaattgatgaaaacaaccaaggataaaacaattaatgactttatacattggatcgaatggattatctctcatacgcttctacgaactgcagagtgtaatccagaaggattggatgatttctggctgaatgaaggagccgcattgctgcttaatttaatgcaaagctcacaggaagatgtccaggagagatcagctactgggcttgcaacttttgtagttgttgatgatgagaatgctagtatagactgtggaagagctgaagcagttatgaaagatggaggtattcgccttcttctagaacttgcgaaatcatggcgagaagggcttcagtcagaagctgcaaaggttacttcttcttctttttttaataacttgtcatttttcatagtggacttttgatacttttgactgg

SEQ ID NO: 6241 - DNA, 1496 bp, Arabidopsis thaliana landsberg
agtgggttgtattaacatgcaacccaatgactagaatatgtacatcatggtctacttggtgctattgttgttgactacacgccttcaatcctaaagtgcctaatttcataggttattgagtttcttagaaacacaagcaatgataagaaaatgaagaggattactccaatgcattgatagttggtgatcgcaggagataaggatcttgatccattcatcaaaggaacaattggtggataaagagtagtgtctcacatcctcatgtctctcatcaacaaaaccacgaagaagtgttttgtttatttagtcaaatgatatgatgatgttattttctagttaagtagcttattgtgtttgtgttttttttttgtcttatacaagatccaaaaaccctaaaaatatcctaaaacagaattactccatgaaaaaggaatgtagtttcggtatgtgctactggaacttcaactaaaccagcgacccattacaatacaaagccattattgacactcatgtttcatgtattgacattctggtgaaacatgaatgtttaagcattagttaagatattttagtcattcctgaatatgaagatggtccattagttatgcgaatccatagtttattgtttcaaggagccacatagattgtaaagtcattgtgaactgttagcactctacttttatgagcaaaagacttctcttatcataccacctctccctccaccacaatcatccgaacattttcaaaagcactcatcctcgtcgacacatcttttagtatattcgtgttgcactccatgaaacataaaatgagaccgtttcaaaaacatttaccgtgtaaaatcatgtcagtttttaatatcaagaatgtgtatgctattttaaggaagaggctttctagatttggaaaattcttgagtagatttggaaatgattcccttctatacatggcaaaatagttaattgcatcaggttgttgaatatcggtattgtttcacttcaatcattaagtacgtgaaataaaaaccaagttaactatatcatcactaactaattgtcaattgtaaactttaacaaaaaagatgggactgaccttaaagtgtcacagagacaagtaaatgatcttaacattgcatattctcatgagaaaggttttcaaactattcatgtctttgggttcaaaataaattcttcttcacatgttacatgtatgaacatatcaagtgtcatttgaagtctgagactagcttcaacaagcgaatcaaaactcgcttgttgatacttatcagtcttaatatcgaagtattctaggttgaccatatttgagttatcaatgaccagtgacacattttcattagccaacatccttaaccacatacaaagtttcagaacgaaaaaactttatgctcttgactgatgagatacacatacatacacctaccttgggagaggtatacaaaacttccaacttctacctcaacttgattgatactaact

SEQ ID NO: 6242 - DNA, 944 bp, Arabidopsis thaliana landsberg
aaagcacatggcaaaatagttaactgaatcaggttgttgaatacatgtattgtttcacttcagtcattaagtacgtgaaacaaaaaccaagttaactatatcatcactaactaattgtcaattgtaaactttaacaaaaaagatgggactgacctatagagtgtcataagacaagtaaaagatcttaacattgcatattctcatgagaaaggttttcaaactattcatgtctttgggttccaaaataagttcttcttcacatgttacatgtatgaacatatcaagtgtcatttgaagtccgagactagcttcaacaagcaaatcaaaacttcgcttgttgatacttatcagtcttattatcaaagtattctaggttgaccatatttgaattatcaaatgacagtgacacattctcatgagataatccaaatatggtatacatatagaatattttgataatatgggtgatgagtatcaacaaacaagttttgattcgcttgttgaatttagtctcgaactttgatcgacacataatcatattatacatataacatgttaagaagaacttactttaaaactcaaagacaaaaatattttgaaaaaccttctcatgggaatatggaatgttaatatcatctctttgtcttgtgacaatcttaaggtcggtcccatcttttttgacaaaagttaacaattgaaaattagttagttatgatatagctaactcggttttaacttcaggcgcttaatgactgtagtgaaacaatatttgtattcaactacctgatgctgttaactattgtatcgtgtgtagagtggaaatctaccatatctactcaagaattatccaatctagaaactctcgtctttaaagtagcatacacattattcacaataacaattaatatgcttatacacataaataaattttcaaagattgtctt

SEQ ID NO: 6243 - DNA, 569 bp, Arabidopsis thaliana landsberg
cgaccatgtttatttcaatcctcaagaggctaaagttttttcgttttaaaactttttttattaggttctagatgttaatgaggctaatgagaatgtgtcactgtcatttgataatccaaatatggtatacatagaatattttgatagtatgggtgatgagtatcaacaagcaagttttgattcgcttgttgaatttagtctcgaacttcgaacgacacatgatcatatcatacatgtaacatgttaagaagaacttactttgaaactcaacgacaaaaatattttgaaaaaccttctcatgggaatatggaatgttaatatcctttacttgtcttgtgacaatcttaaggtcggtcccatctttttgacaaaagttaacaattgaaaattatttagttatgatatagctaactcggttttaatttcaggtgtttaatgactgtagtgaaacaatatatgtattcaacaacctgatgttcttaactattgtatcgtgtgtagagtggaaatctaccatatctattcaagattatccaatctagaaactctcgtctttaaagtagcataca

SEQ ID NO: 6244 - DNA, 3256 bp, Arabidopsis thaliana landsberg
tctaaatggcaaaactcctcatcactgtatcgaccacaaagtacctgttcaagcctcaaaaactcagacttggcaaagagttatacaaacagaacaaatgtcattaagaacaaagacttgtttaaactagacgaaccgcagaattggtgtaaggtttgccttccaatgtttcaggaacaacctatgtgtgagggagggaaagtatgagcagtgtgacacaaagtaaagcatatcttcaaactaggggaaaaagaggaactagtgactcacagcgagaaaccggaactcaagctcccttccaataaaagccggaatctgtattttgatgtatcaaaaccgtcaaagagtatacataaacttctatcaaaagattatagcagtttccagagatatgttttggtgtacctctgagcttttgatctcgaagacagtaaccacaaggctctctccttcacatggctcaacactcaagcttgagatctcctgtttcattcatcacactcagagtatatctacattacctaagaagtagagtctttgtatatctaattccaaatcacaatatctataatctctaagcctttgacattattcattcacagaagtttcataatcagtttccaaaaactccaagctcgaatcagaccttagtttcaggattcgcgatgccacgctcgaagaagatcggagcagaatgagcgaaaactcttctgaatccttgcaatttcgcgattctgaaattctccaaatctgggaatgtactcctcgcgcttctctctattataagaacaaaagcaatcaatcattctcgaggatcaattatacacaaacgaaggagaaggagctgaaatgtgtacgaaccggagagaagagaaccgaatccagtgatcgagatccgattatccgatgagagaagcttctcgaaatcggattcatcttccaattccatcacctgagacatagcctcaattgatcgccggcgatcttgtcgtctcctggaagaactcaacgagacggtgctacgtggaggagaggcgcgtgatttgcacggagtcgatgaaagcgcgaaggagaatggtaatgatgtgagtgagactgagagtgagagagcaatcattggagacgaagacgaaaatgtgaatttggtaacgtaaatacgaatatatataattccaacaaaattctaaattccaaaagttatcatttttgcagagaagaatgtacgtaaaagccatttttatgacacaaagcttttgtctttgataagagaagacgctgcaaatagagatgatatagcttaagaagaaactagaggttttttggtgtgaagtcttgtgagtttccattgtttaatctttgccaaagtgttctctaccttcaacattcgtgcttccgtcttcaaagctagttcctttattgcaagctttctctgtttcaatctctcatcatcttcttccttctcagcagctactccattagaagacttgttttcattattcttttgctctgtttcttcttgtgttgttgctactgtctcatctccataagcaagcttttgaggaaggcctgaaacattgttatccgccgcaagtctacttctttctccttcagtattctctatgtcatcagacttctttctagaattgatcctctgagcaatggtcatgttatcatcatcttctgtctcagcactctcatcatcttccgtgtcagcactctcatcatcttccgtgtcagcactctcgtcatcttctgtctcagcagcactctcatcatcctcacgagctcgcttgcgtctcttgtttgtcgaatgcttggctttcttcatttcatcgtccaacttctgatagacttggctcaatggtactatcttaaggggtatatcatcatcactatcatcataatgatcaactgtactgcttacattaaaagtttccattgattctttccgcatttctgaaactgatttagcccaccagtctctgtatctcgtagtaaccgaagctgtggcgacgcgagaaggaaaatatagctttaaaccaacaagcggtttgttgtaatcatcccatgcttcttcttctgtgaagtttcttctatgattagtacccaaaacaggaacatcttgcgccaatccgaattgcatcgccactcggtttggatagtagttctctactacaccaatacctacaagcttagaaactctcacacatctagcaaacgacacaaactcatcatcatcatcataatcaccatcaagactctcatcaatcctcacccacttagcttcttcaacataaaaccgaggtgggttccaattctccaaaggttcactataaggacgccaatcaaaattaccatgaaaaataatcagtcccacattcttaaatctctgtttcagaccactccattgagcaattctaggttgaccccttggtatcaccttagcttctggtcttatactcttgaacctctcccaaatccatacttggacaagcttaaacagagaactagctaaaacattttgtatagaggctaaaacacagatatgacccaaatcattgtataggtttgctagaaccgcaggagcaaaagcaatcctttcacctctagctagacgaacagctaaggggaaaacatcactggaaatcgaactgcaaaacttgtctggaaacacaaatttcgaaagccacaacactagaaacgcttcatgctccatttcatcatctacaaagcttgaaatccatgattcctgcttcatgctcccttgacatcgtttctgaagtttctccactgcttctttcatctctgagctttgaagagaagcaaaaacagaagaaccagagatagaaaaacccagaagcacattcacatcctcaagagttatggtagcttcaccccaagggaacacaaatgtattagtttcaggacaccaattctgagcgagagagagaatcaaagacggatttttgtggattctgtaagtcgatgctttgattgcttcaaaaatcccagattttaaccaagtgggtttgtgtaaagctaccattttcttaacccaaaactgaaactttttgttaggtaacctccacccacgaaaggaaacacttaaagacgaagcttttaactcaggagaaggagatggacgaagcataccttgaaacccatcaatggaggaggtgacaaagagttttaaaaagtgagcttttttcatgataggtcgactgttattctcactgtaagacaccatgtgtagtca

SEQ ID NO: 6245 - DNA, 2183 bp, Arabidopsis thaliana landsberg
  unsure (1)..(2183): unsure at all n locations
catgtcgagtatttaatctctcgctgccctgttcttgagtcctacattatataatgttgatgtacaaatattataggcaaatggagccatcataattttggaggaatattttaggtaaaaaaaaaattaagctttttataataataaaaaaagactagaggtttctcttacaagttacaaggtaatttttgttggaactttttcaaccatgcttgtggatttttaacttaactaagtatgctattaatttttttatgtggattgaatcaattaagttccacacttttggcagcnnnnnnnnnnnnnnnnnntttgaatctctgggattcactagctaaattgtcaagacagatgatgatattcacgtcatcttagtatcaatatcatgtgtgtatgtatattcattcatgtatgtagagtttaaactataattaaaataacgtaaaattttctaaaccaattaaaatgacgacatgatttcttttgccaaatcgttttttctacgtaatattgattcattttatctatttttcttgactattatagtcttatagactaataaaaatctaggtgagcgaccaatagtaactaagcaagtttaataaaattcatttataaaaagacgaagattaataaattaaaactccaaaaagtgtattttgttggcgagaatctatcgcaaccaaaataaaagtgtctagataaaacattggaattatctgctatatttaaagaagagatttgcttttgtgaaaggatttttgaagattggtgtattggaaactaaccaaaagttcatttactatttgttccaatataaacgctagtttattaggtttgaatcaatagtattaatattacacaaattcagtacataattttgatgataaactagtatgatttctgtatcaaacacaatttaatcacttgaatgtgtgagtggtagtttttgagataatagaattgcaaacctcatagagtttgcatggtattaattatacggtcatcacttggtattaattctaattttcacatgataactgtaaacggcacaatggacaaacatgattgttagcagaccactcaaggggtacatagtaggattcttaaggacggtatcataactaatgtgcggaaggatactagctcttattggaaacaaaggtatgtctatcttttgattacgtcttgtcgatgtcttttgattaaaaaaaatcaaaaagatgatgtgttgttgataccataattctatgtggtgtccacttgtcaatataggtcatatgggattgcccacctgctgcggaggaggaaaattgttgggaagtttcgccacttttttcctcgatcccacaacagaagagggactatgagaattggtatgtataaatgtggtttttagatactgtttaaagggtgtaatatacaattttcactaacagtgaaataacataagatttattggtaatgaagaagacatgccaccactatatctgggtgttcttatcctctactaagcttttcattattttaattaaaggttttcagtttttctaatacaatacatagaagatacttcaacctttcgagatccccatatctgaataaacaacgattacattaagttatctataacctcacgcaactgtatcagctcttgttctaaacctggaaatttggtgtctgaattattatcatcttcatccgttctagctgtacagaagacaaataaaagatccaatgacgaatctttctactaaccaacatgtagatagtgtaattcagaattatcatccaatccaaactacgtcactgatattaacatttcctattattttaactaaaaaattttaacccttaaaccagtattacctcattatttaggtgatccatgctagaccttaaggtctctgccctgaaattatcattgattaaagctaggctttcttcacttttgtctagcggcattgcttctcggaaggtaattggtctctgtttccatttatactactcgattgaatatcaccctgatgaataataaacatacattaaaaggtgtaaatataacaagcatgaataggaattcattatagcacctttttcccgntgagtcacaagaaagaatatgcttaatatctaactagagaattatctactggtaagatcgaaatacgtagaaatttatt

SEQ ID NO: 6246 - DNA, 1330 bp, Arabidopsis thaliana landsberg
  unsure (1)..(1330): unsure at all n locations
gttcagcttatgtttacaaagatccagtctgaaatctgtatcaatgaccttgcagaacaactttactgctgctctaatagccaccttgtacacagttgtggaatctttccttaagcattttctagtcaacgaaacttgaagtcttaaagnnnnnnnnnnnnnnnnnnnnnnnnnnnggtagagctcttggtgatagaaatgatgaaatgtcagttgaaatcgaagagcacgcaactagggatgagaatgcagaaagaagttactctaagagaagcttatgtgctcctgaggtcgagcaattgaaatattttctgtgtgggtatgacgaagaaatatttgacggtgttaaaagctgaggcggaaattacagttgagaaactaaaagataaactaaccgcgctatatgggcaaggtgccagtgagcttgaaacacggaaaaataggtgcagtgatctcactcagaagctctctgagcagattttgaaaacaaaagagttcaaaagcctgtccaatcatttgaaagagcttaaggacaatgctgaagctgaatggaatcgtgctcgtgagaaggccgactataaagccccgctaactccacagcaagagtcgttgagaatcattttcatcaaggaacagtatgacaccaagctgcaggaacttcaatatcaactgaccatgtccaagaagcatggtgaggaacttctgatgaaattacaagatgccattgatgagagtgaagcaaggaaaaaggcacaatccagccaattaaagagaactaaagagcttgaagatcaaatattggaattggaggctgatcgacaatctgttatctatgataaacgtgagacaaccacggcttatgacatgatgaaggcagagctggattgttcattattaagcctcgagtgctggaaagaagaaaaacagaaccttgaagctattctgcagcaatgcacatgggagagtttgaaaatgtccaaagagctagaatcaaggagagaattagtacaacgttgcagctcgcataaaaatattgagatggaaaatgatagattgaacatgtacgatcnnnnnnnnnnnnnnnnnnnnnnnnnnnnnnnnnnnnnnnnttcaggcaaaccataagcaaagggaagttacttgttttgatcatcagtcccaggtcagtaattcaggtaaccctcagttggatcccgtttggtagttaagacatntcaagtncatggtatcatagaccttctgttaaattagttatgctccaaccgtcatgttaaaattctgctgcatcttctttatgaaaattctacgtatttcgatcttaccagtagat

SEQ ID NO: 6247 - DNA, 2271 bp, Arabidopsis thaliana landsberg
gcctcctgtgtattaaaggagaaggtggcgaagaaaaggcattgctgcttagtggaactgacgcgggaggatggactgcaatcgttaagcctgcactctggcagaaagaaatcatggatccttggcttcctggcatgcccaaacttgaaacacacaggtaaattctgataatactacctgatccttgcaatcaaatttttattagtttagattcttgtgtatctgtaagacacttggcttgtcattttaattatattcctcatctcctgcaatcaaattattatttagggtccgcgttacgggatatgacacttgtgttcctaagattgatatccagatggccttgtgtgaacatttctcttcatgtggagaggtcacgcaagttgtggttctgcctaggtttgtcgcttctttcttcctccaatttgtcccagctctcaagttgttgattctaactaaagactctttgtttctgttgaattcggcagcggttcaggttcaatttatcttcaaggagaaagatgtgaggacaaggcgcttaaaataaatggatgtataatgggaggaatgaatcttgtagttgaatctgttttgatgaaacccgaagacctaaaaaaaagaaaggggcgcgccatcatcacgcctactggccctactggctatacgtccttaagtacgtaaaaatatttgatttcttattcttggtaacaaactcaaacctggatctcatcatccgtgtccttgtttatatttgatatttaggttgtttatgcaaggcgtatgagcttaagaagaagaagatggagatggagatggagatggagatgggtgagaagaagaagaagaagaagatgaagattgagctgatgaaggtagagaaagtgcttaagaagcatatggagaataagaagaagatggatatgagcacgaaaaagaggatggagatggagagtttggagatggctctcttttaggagaagacgaacctctttaaatgttatttacctttgtttttttatgttaacagtaagtaagctaagttatcatcatctaccttgattctcacccatgcatgtatgatatgtctttctctggatgttaaaaaaataatagtaagctcaataatcgttatctgctagttattcaaagcaacctttgttttctaattttttctagctacttcagtttttccttgagatcacacactcttcaacataccctatgatattaaaacacaagaccagcaaaagcatcttcacgcaacatgtaatgttaaaggtatttccttgaaattgacaataactactactcaaggatacaagaatatcaatatagtaagtgtgtatttattacttaaataaagtatgtataccatccaacctaccatcgaagtcctatgtatgttggtgagtcgtaaaagctttttttttactagattaataacgaaagagatcattggtacatacatttgcaaaatccccactaaaaatattgcacacgtgattagttaattacatcaaatgaaattaacttttagactttttcaaattctttgacaagtctttgtacattttcaacggagcttccatttgcctccgtcacggcagcctcggtcttccgccgtatctcctcagcccgagcagccacctcgcgtcctccctcacccatcgtttccgctatgacccgacccaactcatccgagtcaggcacagtttcaccaccttcgcaaaccctaaccgcaacacccaaatgctccacaagcaacctcgcgttcacaaactggtccgcctccatgggccagcccaagatcacagccccactcgttatcccttcaagcactgagttccatccacaatggctcaaaaatccaccaaccgccacgtgtcgcaacaccgccagctgggagacccatcctcttaccaccaatccccttccggaaacccgatcctcaaacccgtcgggtatcggatctttcttaaccacccaaacaaaccgggtcatgcttttctctaagcctagagccaaagcatcacactggtctttagtcaacgccttttgacttccgaaacaaacgtatagaactgacccgtttggggatccgtctaaccaactcagcaaactcgggtctacagaaccccgattcgatttaagacccgacccgattgaacaaagcgggccaataacatatacccgatcatgacccatcctctgtttcacgtacttgagataatcatcttccagaatctcagaagaattgaaacagatccgagc

SEQ ID NO: 6248 - DNA, 593 bp, Arabidopsis thaliana landsberg
tgtaatcaagtcactaactttcagattaggataaactgaagctcctggaccgttagctgggcgagagggatttaatggtaaccaattgtctttcgagactttaatattgtgaccattccctactaaatattttaatccatgagaaagaagcttagcaccttgaaggatactcttccacgcataacttgagtggtttgtggcttcagtttccaagagactttgtttagggaagtactttgttttaaaaattcttgccataagcgaatgcgggttttgcaagatcctccaaccctgtttcgttaacaaggctatattgaagtccttaagatccctgattgctaaaccgccaagcttcttaggctcattgagttttgtccaggctatccatggaattttatgcttatctttagtgcttgaccaccagaaccgccgtatagcgcttgtaatctgataaataagccgcatgggaaggaggaagcatgacatactgtaagttggaatgacagtaatgattgactcgagaagcacttcctttcttgcaggtgaaagaagcttaatgtaccattatccaactcttgttccattctgtgagc

SEQ ID NO: 6249 - DNA, 962 bp, Arabidopsis thaliana landsberg
ctaacccaacatgaactcccaggtaaattattttgtgatcatacaataatatataaactcgatcgtgtaataaatcaaaattgttgcattagccctatcacgacgatctccgttaagggatatgacacttcgcttcaaaagtatcttctcgagctcatcttggaaaaacatttcgattcatgcggagagattagacatgtttatgttcccacagactatgaaaggggtgtcctcaagaggtacttactctctggcttcttcactcccagctaagtgctaactctcaaattaataccactttgttttttgtatcgttggtgttacagtgttgccttcttgaggatcgagggagaaggtgccgaagacaaggcattgcaacttagtggaactgacgttgtaggatggactgttatcgttaagccatccgaaatattctatgataattcttcgcgtgctcctgcaactactcctgaggcatccaaaatacacaggtaatttttgataatattatcattctgtttattatttagcatattctgtaacatgtgttgtagcttgtcatgttaataatatttatcaagttattgtttaggttccgtgttacgggatatgacgcttcgcttcctgagattgatatccagatggctctgtgtaaacatttctcttcatgtggagagatctggcaagttacagttctctctaggtttgcgctttctttcttgttccaatttgtgaatatttttttcccaaggctcagaagttattgaattatataactaaagagactctctttaatttcgctgttgaattttacagtacagctttcgtttctcttagaggagaaagatgtgtagacaaggcgctggaactaagtggatgtaacatgggagaaaggactcttgtagttaatgaacctgttgtgccgcaacccgaactctaaaaagaaaaagggtacgccaccg

SEQ ID NO: 6250 - DNA, 617 bp, Arabidopsis thaliana landsberg
agatgattttaaagttactaactcagaagattatgccacttgttgatttgatcgttcttagattgtgacacgtgttagaagaaaaatcctaatgatattgtctaaaaattcagtttattttaataaaataaataagtcaattatattgtaaaataatatgtataaaaatggaatataatttaaaaatatttagataaaatgaataagtatgaattactaaaagaattcaaaaattattaaaaattctatttatttgtcaaatccgcctatttaggagagtcttatctagtatatatatgcatgtttcctgtaaactttttaaggaaaatgtttttcgccaaagtggtgttgaaattccttgatgtataggtgagatcattaagaagggtattatcaaagtttgattatctggatagtgatattgtcttgtgtctggataaaagacaatctacctttcccaaattgtcttgtgtttggactatggataaaagtttggttatcggtgacagtgatattaccattgacactaaatcgatcattgtagtaatatatcgtgtacaatggtttgcttaaaaatataatcatgttctgcaacccaccgtgttaaaggaaaaaaa

SEQ ID NO: 6251 - DNA, 136 bp, Arabidopsis thaliana landsberg
catctcctagacatttgttattttccctgttcacaacagcgcgtatactacattcgaggatgatcgaacgaagagtgtatatggcatgcattgcagcatccatgatgccaaataaactcagaataaccaactctct

SEQ ID NO: 6252 - DNA, 694 bp, Arabidopsis thaliana landsberg
ccatacctttcgtgacagcacaagtttccgtggaccaaaacactaacaccggtgacctctccacatgaagagaaatgtttacacagcccgatctggagatcaatcttagacaacgtagaaggtgtatcatataccttaactatgagcctaacatatcaattaattgtatgagagaatattatatggcaatgatcacaagaacaggtactaagaaaattgatttgcaggattaaacaacttacgtgcgttctcctttgaagcggtcgactcccccaggatctctgtacatttgctgcccgggtagagacttcacgactacattccatcctcccacgtcagtcccactaagttccaatgccttgtctacgggactttctccttctttcgcatgaaaaataatgaagagaggactgtgaaaaaagagagaaaaacttgttttagagtgttgaattttaacaaaaatgagagagaccaaattgaaatccccaaaacctcttaaggatacgctttttaaagtctctgggaacatcaatatctacaatctttccgcatgaagcgaaatgctttgccaacgcgagcttgagaggaaactcatgaaccgaagtgtcgtatccctcgacggaaatcttgctaaagctacaggcgatagtatatgatcaaaactgcaaattctaagtaccccgataccattcag

SEQ ID NO: 6253 - DNA, 591 bp, Arabidopsis thaliana landsberg
  unsure (1)..(591): unsure at all n locations
ccacaaaagttacatatagaagccgtattaagaagaaaacatcggtttaatttcagaccatctttctccatgatgtatcccatatgatcagggtcaagctcttccattatcattgctgcatattcatctgccttgttctggatgcatgacagatgattggcagaagaactaagcttgatgatctgccaaacacaaaaatacagagtagagttcaaaaactcttctaacacgtaaacatttttcaaaatttattattcattttttgttttcttataggaacttgcaacctttagcaaaatttcgtttgtgtttaaaatttacacacataaacaatgaaatcttttatttgttaaaaatgtgaaaaattttctgcatgtaaacgcagaaatcaacatttgaaataatcaagaccttattggtaaactttttacctctctaacttcgtcttccgtaagtctaccatccgagtctttatccatcctgcatttgaaacaaaccctttggctcanactttacattcattttacaaaacttgtaaagacccaaagacatgaaacgaatgaccaaaatgtgtgatgattagaaaaaatt

SEQ ID NO: 6254 - DNA, 3057 bp, Arabidopsis thaliana landsberg
  unsure (1)..(3057): unsure at all n locations
atcaacaccatcgggaatagtttcctcctcctctgcaaaattatcgattccactcgacaaatgaaaacagagtcgtcaagagtaattgtgtcgatcgacaccctggtgtattgatcaacactgattcgttttctgcaattggaaatgatgaaggcagagctgatcgtttgcgctgaagtattgggttgacctgctttccgctgcgtagtgtgactacattgatagaagctgaagtaggtgagagattggagaattgggagcgtagagtgtcaatcttgctattgagatctatggagagagaatcatatttggtatcaagctttgtttggcctgcaagaatttgcgcaagcatagactacattctggtctctgatgagggtagaggggggggggcttggataggagcgaaaattgttgaaacaggagtctctttgctcgcggtggctatcttagctgaaattcttcgttctttgtcaaatccctgcgtcgaaaacaaggtaaagcattggtgatgaggagtaatgcttcactagtagttcttgtcatgaagttacagtagctcgctgcatcaagttgattccggtatggcttgtctattcctttgtagaataggttgatgagttggcctctcttggaagccatgttggggacattcacgctgataagacctgaaacggagccaagatgctataagggactcggctggagcctgagtgaacgaagagatttgcaaatgaattgcctctgtcacggatttatcgacgaagtgattcatgaatgcattctttgtatcagtccaattggttaatgaacctggttctagttgacgcaaccatgatgttcctctgcttgcgagagagtgggggaagagtttgcaaagaaggtaatcagctggtacaccttccgctttgatagaggacactatgccttcgaagacttccaaatgatctaatggtgattcatcgggagctcctctaaactcttgatacaagatcataataggcagggtgtatagcaaagtcttctctttcaaatggaggtagcttgaatgatgatcggttggtgtagaagagatcagttctgttgaagtcgcctattgtagccgtctggttttgcagagggtgtcgatcgacaccaggatggtgtcggtatacactatcgtgaaaatctgccattgaaacgtgattctcaatctgaaggtacctgaaacacaagagaccagaagacaaagaaacacgtaagtaggtgatagaaaagaagtatctagacctaaaatgacacctagtctaatggtgaactaaaagagaacttcggcaacagcaccaaatttgatatagctcaaattgccttaagcttactccctcaaataagagatcgtcgttagcacttaagggtcgaattccactgagctctcgatgtgcacacaatagacttatgatgttgtttgataagctaaatgaagtaattgaatattaaagacaactaagcaagtaaatgagttgtagattcaagtgattaaggcgtcaggtctaaggaattgtctcgagagatagataaattgtagatctagctaatatcaggattgttattgcaccgttctcaaactcaaactataattctagagtaaccggtggcgttccgcgaaactctcgatacttacaactaagataaccggagaagccgagagatcttatactaaagcatgcattattaataagcttgattagttcacctagtatctaaacaagagcccttctatgagcctacctgttctttcttagatgcctaggctcatctatgatggttctagtaacaaatacctatggtgggaatacctattatctaatatcaagttctaagtgatcaatctaaaactagcattaaggataatcaagatgaagaactctaagaataatcctaaggggttttcgatctactaatccatctaaatccctattgagactccctggacccaataaggtgattactcagacttgacaataaaaacacaaatcataatctgaatagttttcattgatgaattaagaataatagcaaagcagttcagatcctctctttagggattggattctgtttctctaaagtgtaacaaaagtctaagaacaaaaactaggtctaataatgacaaaacaattaggtatttaactctaaaaacgtgcagggactattttgcaaataagaaaaacttcagggcttctcaaagacttggtagaaaacgagaattcccttggcagcaataagagtgtcgattgacacaggtgtggtgtcgatcgacaccagcttctgaaaaacgttcttcaagatcttgattgctgaaaagcttctaaaattccttattgtgctctgtagttcccagatgtgtaagtgcacctgaaatgactcaaaaaccattctgaaaaagactagaaagactctaaaaaccattctgaaactatgttagaaatctgtaaaaaccaggacatatcaactcccccagactggcaagcaaaacaaaaggttgaatctgtgaaagaggtttgaaaaacatagaaactcccaatctctctagtttattaccttgatcatacaaactaaatccatgcactaaacacttctaatcaaatcctgaccaccatgtaattctccgttagcccacgcaacattctagattccataccaaagctctcaactatatccactaggctatcatcgctgggtctcatcaatcacgtanatgcttaagaaccttttagactcattcatgttatataccatgataaatcgaccattctttatattactttttttggtattatttctctcccctcaacttattctttttagagaggaaacaaaggggaactcgcatagtggattggcatcctcaacatatttccaaccttcgtaattgatcattcctaataatatataataatgggatcatgggaaacattcctacccctatacactaccaaaaatcatataaatctcatgctttcttctttttttttaataaggggagaggaatacttttttttttcacgtaggtctcagcat

SEQ ID NO: 6255 - DNA, 693 bp, Arabidopsis thaliana landsberg
aaataatttagaaaatatctttatcctttatagaaaaaaataacaacattgtttggtaaaacacttcaatattttatgttcacaaataggaactcttgattaaaagagaaaaacgggtaacttttatctttgatcaacttaaataaaagctataactatattatatttaaagattattaaccaaaataccaaataatttacttatcttttagaaaatgtgagaacgtacctcagaatcaagacgacatttctcaacgacggtggtttcgtatgcattcttgagtttagtgtattcatcctcgactcgtttgttcttccaccgtgcacggcggttttggaaccagacggcgacttgacgaggatcaagccctaactcagaagcaagccgatctttcctctcggattcaagcttatgatcgtcttcaaagctaatctccaacattcttacttgctcatcactcaattttctctttctaaaccacccattgcctccgttttcaccctcctctgccaccacaacactcttgctcttccttttcctccgccgtgttggttttgcttctcctcctggtcaaagaaacccatcaaaaccaatggtacaacaaaacataaactctttaaatgtttagctcttttaagtcttctctagtatcatgtacgtatatgaaaatgaaaagactacataagacaaac

SEQ ID NO: 6256 - DNA, 1810 bp, Arabidopsis thaliana landsberg
gatcctgttccttcttgcattcctgggattctgattacagatgtctctaagtcaatggtaatatagttttgttgcgttcactatacagttatttcctccctcgtcttttccttaacttggaatgccattttttcttctctaggatttgattgattactacaatgtcacaacgtcaagagactggatgggaagggtaaaggactttaaagctgaaggaagcattggagacggtttggaacccattcttcacaaatccgcacctgaagttgctctgttctcagctcgaggacccaacaccaaagatttcagctttcaggatgctgatcttctcaaaccagatattcttgctccaggctctttaatatggtctgcctggtctgcaaatggaacagacgaggctaactatatcggtaagcatttccaaaaatcttgtcagaattatccataagtactctagaccaagaaccaaaatgtttagtttttgactattgagcaggcgaaggatttgcactaatttctggcacaagcatggctgcaccacacattgcgggtattgctgctctggtgaaacagaagcatcctcaatggagtccagctgccattaaatcagctttgatgacgacttcaacagtcatagatagagcaggaagacctctccaagcacaacaatattctgaaacagagacagtaacacttgttaaagcaactccgtttgattatggaagcggtcatgtcaatccaagcgctgctctagaccctggtctcatctttgatgcaggtaaatactcttactccattgacataaacctcagttttcgtcactccctcttcaatctctggtcactaggacactcattggtattattcttgtatggccatacactttgtgattgattgagttttcttgaaggttatgaggattatatagggttcttgtgcaccacacccggtatcgatgctcacgagataaaaaacttcacaaacactccatgcaatttcaaaatggttcatccttcaaacttcaacacgccatccatagccatctctcatcttgtcagaacacaaaccgtaaccagaagagtgacgaatgttgcagaagaggaagaaacatacacaatcacatcgaggatggagccagcaatagccatcgaagtgagtcctcctgcaatgacagtaagagcgggcgcttctagaaccttttcggtgattctaacagtgagatcagtgactggagcttatagcttcggacaggttacattgaaaggaagccgagggcataaagtgactctccctgtggttgctatgggacaaaggcgataaacaaaacgtatgagattttgaaacattattattgctattattgttgaaatatgcagtaataataagaaggtagttctgagtcttgagtaagaaaagaataatacaggtagtataattagcttataactttggaatctttaaactccattataagggataatagtaatatgattaaatgatatacatatatatgctttagctttgttaattactgatttcataacagaacatatgttccaaacaaaaaaagcctctgtcttagctctgttattactctaaccaccaatcttgtttttttccgaaagattttttttggagaaaatgtgatttaaacgttctttgcatggttctaactctatttattctaatcttgaacttaattacatataaagactctaatgagatcttgcgcagaacgaacacagaaataaaaagtttttgaactgttaagaatcaataatctcacaatcagttctctggaaataaacct

SEQ ID NO: 6257 - DNA, 6211 bp, Arabidopsis thaliana landsberg
cggaatctattttgaagatactggatgaattggatgggttattgagagaagccgggtataatcctgattgcagctatgcattgcacgatgtagacgaggaagagaaagtcaatagcctgaaatatcatagcgagagactagcggtagcttatgctcttttaaagctatctgaaggaatacccatccgagtcatgaagaaccttagagtttgtagtgattgccacacagcaataaaaataatctctaaggtgaaagagagggagatcattctaagagatgcaaacagattccatcacttcagaaacggagagtgttcctgtaaagattactggtgagattcaataaatgccaagcagaatgtttttttttaatcttaggcttagctatcaatcctcgttggagcgttggcaaaatggagtaattctcgcaaaccataggaacttgctcagccattgatgagagttctctctaagttcttctgctaatatatatatatttttttactgatcttgttatcaatgtgcatttgtagcattttcttcaatatggttaataagaagtgatgaacaatcttcaagcaaaactagaattccatgacacatttgtttttggtacgtagttactaacattctttgttgcttatacagaaactgaagagctctttgtctcttgtatgtatgctacagagaaagattcaagtctaaacaaacgttagtctcagatccttcttgcttttccttagagccatcatactcgttggatgctgaagagctctcattagctgctttttcaatgttgttggcctctgctttattcatgaaaatgaaatcttctggctgaaacgaagggaatctacgaacccttgctctttcttcttcttcctgtctcttcttctccatggagctgttgacatatttccgcatttcccttgcgtttttaagcactgtgtacaacttttccatctcttcttcttcgtcatcttccttctccattttcaccctctttctgtctctgtccattgaaccgctctctcttccttcccctatgaaaatgtttctctttagttacatcattttcatcctactttgatcatcaacacatgatacatctggaagaattttctggaggaattggtggagaagatataattattgcctctagtgggaagactaacaacatgaccttatctaaaagtctctcagactttcttctttcctttgggtggctttggagacttttcaacactattatggaccccaccatgatggacattcatatagcaacatgacatacatgtgtacatatgtacagtctacagggaatggcacagcttcaagctaaacaaacacacttcacaataaccattcagaatcactctcatttgtttgttgctgcatctatgtttcttcttcagtcatctgcccatggggcaccgtgcttggcccaaagatagtatgccgcaactggtcctcgtccaccaaattcatacaactccggagctgtgtgatgcttgtctatctcttctagaaccggactaagaatgttccatgctgctgcaacctcatcgcttctcatgaacagatgattgtctccgtcaattacatcatgaattaggtgttcatatgagtctggtacttcggttttatacctacaggtttgatccaacaattcaaccaacctaaggcgcaaaagttcgatttttaaaatgtgtaggcacaaagatgagaatgcaaaacttgcctgtctttatagagcaagttaagttcagaagcgtctagctgaagacctaaaccaggaaccttgttgttgattttcaccaggatggcctcatcaggttcgtcacgtagaataagctcatttgtccccaaatctatgtttattccaatattttctcggtataggtttccaggaacatgccggaattgcacatgaatctccactctttcaacattaaggcacaccaatcaattgttatgacagttggatatgtctatgagtaggaataattattcttacctgtgtttaatgaggccagtgccaactcttacaaggaaaggtacaccatcccaacgtgcattatcaatatacaaggctgctgcacaatatgtagggtctacaccgttcaagatcacaccgttcttgtctcgggaactggatttatactggccaaggatgacatcacgcgggtctatcttgcgaattgatcttaaaaccttcacctgcagaagcaggtttgtcaccaagtcacttgacagaacaagagtacacaacttacatatataccataagacgattttgttctttacagtacaggttgaccttttcatttcggatatcttcaccatcgagacttatcggaggttccatggcaagtaatgcgattgtctgaagtatatggctgtgcactatgtcccgtattattccatatccatcagaaaaccttttaaaaagcagtaggaaattagaaaataacattactgatttgtctaagaatgctgaaacaacacaatttactctcacatgcaaagaaatggtgaaaatagaactattgtgccttacttttctgtttgcgcaattgattctgatacaataacctggaaacatcatttatacacaaagtgaacaaaccagaatgtggaagaggaaagttcaggcactatacacaactacaaacaatcagaaggaaacactacctgtatattgcgtatgtatgctctgttccatagtggttcaaaaactagatttgaaaaccttagcactgtcagattttcaatgaggtttcttcctatcatgtgatctatcctgtaacaggcacagaagtgtgaagaaatatgaacttggagagctgtgcatgcagaaagcaactagatttaaaagaaggacctgtagatttgcttctcttcaaacttagagagaagtgactttgttaactgatgagacgaatgtgagttaaaaccaaaaggtttctcaactattattcgagtccagcctcgtggtgcctgagcgttatctccaatggtgcatgccacatccaccagagcttcttgaggtactgagaggtaaaagatcctatttgcttctgattctccctgaagaagaaaagctgttaatgtcttattctatcttgcttgtctgttcaaaatgttgtaaactcagaaagaggactacttctgggacaaaatgtaatcattgaaagaaagaaaaaaaggtacttaggaacctcaatctgtttcattctctcggcaagtcgggacatcccatccctgttattataacctccattgatatagtatgttctactctgaaatgcatccatcttgcccccacaattctccctgaacatttagcatcattctttagctagcgcggccgtatatcagagataccaaatttaaggtagtaccaagaattatacatactgatgatcaacacggcaagtcagcgttgatgcaatgatggatctgaggtcttcatctgtcagattctttcttgaaaccccaaatatagcaacatcctgtgacaatgaagaccaatcaagaagacaaccgaaaaaaactatccaactgttttgctgcttactttgtaattgttcatgagcacaaaagtcatacctcaggaaggtagccgctataatacaacgcaaacaatgccgggaaaatcttccctcttgctagctcaccagtggctcctacaacagcaatgcaaagtgaggcccttcttcgaacatctgaaagatcatccgagagttgttttgacacaggtggtaagtctccaactttgtgaaacccatcattcaaatccgttcccagaatattctcttctggtcgtaaatcttcagctctagtttcttcagcaaaacctgcatcacattctacctcaggaagtgctaaagaatgatcaagtgaagacatgagatgtaaattgactcatatcttagaactagacctcgttcatcatcgctgaggaaagtgtgctttgagtgtgttgtaagctcgtttacaggctgatgttttctgttgttgccttgtctacgattcaagctcttaagtatccacagtttcaaaccacagaatctccggcagagattcgagcctcctccgttgagaacaaggcttccacttctcgagaaactatagtgtcttgacgaaacctattcacacaaaatagagaattcgaatttcaacaactagaaatcaagttgatttcgaaggtcaataatatactaaagcttagattcagagggcatgtaacacgaatttgagatctttggtgagattgcagaaaacattagcataatccaagaaaaataataatctttgtttctcaaagtaatgaccttttgataaaacgaaagcatgcatgaaaggtagagtgaatacatgtgcttaccggaaaattagaaaaagaggcggcgagatggcaagagcagacggaggaagacggagccgtcgctgattgagaaaagggaagcaagcaactggagagagacatgaggatagttcctcagggattatagctaaacatgttcaaagctttaaagctgctttaagtggatcaaagtggaagacgagtgcgagtttaagttttctgattgacgcctccattaatggttccaactttcagataatcgtcgggttcttctaaaccgaaccgtaccggttggttctcgaggaaagagaattgaatttgtggtttaggcgggggtgggtaggttgactttcgatatctcaacgtcaacgtctcttctggtcccgccgagtcggcgtcatcgttgagttggtgagatcatcttcttctcaacttcatcgatcttatcgtctcgaaaattgtcaccttttcttctcagctacttcaggcggagaaacactttccgtggtttagtgttgaggacgatcactgtttgtaattcgatggcgaggaagaagatcagagaatatgactccaagagacttctcaaggagcatttgaagcgtcttgctaatattgatctgcagattcgctctgctcaggtcattctcacgaattctagttttgttttcatcgatctgctttgtggaaattcgatagcacaattcaattggaactcttgaatgaatcgtgttttgtctgaatgttattgagagtaatcttggacttagatagagctaatgaaagtgagaatcttgggaaagatctctttctactgatgactttggacatggcatgattagttgattactagaactactgatgatgggtgattcgttttattgttgtatacttttaggcgacagaatctacggatttcactgagttaaccaaccaggagtcatggctatcgtccacaaagctagttgtgaaaccggatatgctatttgggaaacgcgggaaaagtggtttggtagctctaaagctggatcttgctgaagttgcagactttgtcaaagcccgcctcggcactgaggtgactcatcgcagccagagttatagatcagctggtaaattttgttgtggtattgatgtttgtttatgagtcgcaggtcgagatggagggatgtaaagcacctatcactacattcattgtggagccttttgtgcctcatgatcaagaatactacctctctatagtatctgatagacttggatgcactataagcttctcggaatgtggtggcattgaaatagaagagaattgggacaaagtactacctttttttttttttttgtgcttcttttcttgttttgttgcattatctttttcgactcacttcttttgttttctcctggggaacttggttttctggtatcaacaggtgaagactatatttcttcctgcggaaaagtcgatgacgctagaagtatgtgctccattaatagcaactcttcctcttgaggtaagtttctgttcccctgtgattaacttcctagtaagccagcggcaccctgcaactatttgctttagataaccctagaaatctggttttgatgtgcgtacattttcggtctttgtatggtgttctactttcaatcctatgcaaattcaaagatctgttagtctgaacttaggctgctcagtacttgcattcttttttaaggagattaataatttaggttgttttgaactatgctatgcctgctctaacaaatgcttctatctatttcaggttcgagctaaaatcggcaacttcataatgggtgcctttgctgtatttcaaggtatgagtatattaga

SEQ ID NO: 6258 - DNA, 2387 bp, Arabidopsis thaliana landsberg
aaaaatatatttacaaagaataagatgtaagtgtatttttttttactataataacatcattcatttttttcatataaatccacaatttcgaatgtgaaaaaaaaacattaatctatgttgtagcacgggtaattatcaagtaatatgaaaaattacaaaataaaaatgttctgaattattagatcttccggatcaattataacattacaatacttaggttatatcttgtcattcttgagtttggattgacgtcatgattgcgatagataaaaaaatagagttttcagaattaactttattatatatagggcttgatacaaaattgaaacttttttttgtttatgtatctttttaaaatttatagggtttcataaattgttatcgcctacaaccgcaaacgcttgtggaaatgagcttttaaaattaggcgatttcgatcggtctatagcgggccggaacagtttaaagcatttttatgattggttttaaaagctagcacccgcaaacacatcgtttaagggccgacgagggaaaaccaatcaagccggtaatggtcttatgtcctctttcagcccgtgaacccactaaaaccggggtgttacattcgtctctcgtttaattggtagccaaatgaacagctttagtttcaaccactttaagctaagttactaatcaatgcctttggttcaacaaatgtttaatagaaaaacaattcgatttattagtgaagaacttggccttgtacagaagatagaaaataaagattttgacagagaagaaagtatttaccagttcaattcaaatgaagaaaagaaattacaaagcgtgtcaacaagaaccgaaattgaatttttttttcgtttccttctgtttttaaaatgaacaatttgaaacagagatttatttaagttaaagcaagtgcagttcttcttctactacttctaattaccatcatgaaggagaagaagaagaagaatgtggtaatggagaagagctttagtataaacggaacttctccttagtgttctggaaaacttgctccgcaatcgcagcaccatttccgtcagctttcttgatctccagactagatttctggtaaacccccgtgcctctcaaagcatcagctatgaagtcatcaaacccgatggctatagctgcttcggctttggctccataaaccaacctctgttcacaagtagagacatgagtactactcattttgatatttaaatgattagaagaagggggtttgtatgcagacattgtttcgacttcttaccttgagtctcgagagatggatggctccgaagctttttggacatggctcacaagatgcgtaaatctcgcattctgataactcgattttgttaagtttcttacatgcctgcacattaacaatatattcaaatcatcatcaaaaaaaccggtttttgcaacgtttcaagagattcaagcgtatactcttttcttacctctctaatggcggtgacttcagcatgtgcagttgggtcagtatatttcaaaaccatattgtggcagctagcgacaacctcgttattatgcacaatcaccgcaccaaatgggccaccatcaccacagtcaactcccttgtaagcttcttcaacagcttgcgttaggaatttatggtcgctatcgtgaacagctgaacaaagacaaagtatataaacataaaccacaacaacttctgcaaacacatacaatcttcaactaagactgatggataacaaaaatggcaaggacaaaattacaaagccaaaggctcctaagtcatcactataagtaattgcataaaaacgttaaggtctattaccttgttggtgaccggaaaatgcagaagctacggagatggtaccgtcttttgcttccactacacagatcacataacaaagcaaatcagatcctctaaacacaaaacaatgatcataaccaagaacaattatagccattgaacaacaaagcttcatggttactcagatcacaagttagtagacacaagaaacagataccataacttgtggcacaagtaaacaatcagctaatagaggaatcttcaagctaagataattagataacacaaaactagaagccattgtttctaatcaaaaagtcaaaatcacctaaaaatcgaacacaaatctatatgcttatgtatattccgatgatatataacactctggtgatctggtgattgacaacgagtaaacattcaccagaaattttctcatctgcatgtgaaattagaatgaagaaataagtctagaatccagatctggaaactgaacattgaatcagaaacaaaaagagtctgattcgagatagaatcatccaaaatcgcgaagatcgagtcggtgtgtataatccaacaa

SEQ ID NO: 6259 - DNA, 6722 bp, Arabidopsis thaliana landsberg
ccaatcttcccgggttcaaggtatctagctttggccacgttactgtaagtcccctgtgccatctttaacaatacatgcttcgtgaattgttgtttcaagatttttggaggatcacagatcatcactgtttagttgagagaaaacaaagaagatgaactaactttgtctaacttctcaaaggactctgcgcagcgaggaacccatcctttaatggcctccccagcaacagaagccagccaagacggccattctgcagcagggagttccgttttattgctgatcacacgtgctggctgctgctgtgccggctgtgcaaccggtatagcggtgactcttcttgttggatttctggtcggagctcccacaacaaccaccggtttggtgatgtttcgatcagatgaagtggaaggacggcgtgccacaggataaccattagccacaatggtgatagaagctgaagaagtcgtacgtgtgaaagatccttccttcttggatgaagacgaagacgatcgggggatgatgagggagaagttgaaggatggatttgctggaatctaatagatctttatcggtaacggcggcgcttggtgaacgggcggtggcacaaatacaacccattacaaaacaaaccaccgctcaaaactcctacttaatggaaaaaactttagtttttgccgatttgcttttatctatctatctctcattctctctactatgtcttaggtgatatggtcggcgaccaaaaactttcattttttgttgtctctctcacgtttttgtgagtttgttgtcatagaaaagtggaacgtgcgtaccactcaatggtctctttttcttctagaatcaagatttaaaattaaaacgatgaggatgatgaaggaatcggtcaacgacctttcactttcactaactgatttgtttttcttcccttcataattgggtctcattggtttcacaaaatgggcttcattttatttgtaaagcccgacaatcttttatctggtgtcaactgtcaacataagtacgatgaagtctttgtaatgtccgtccataatcatgatttggtcgtgatttgttcccctatgtgtatgtacttgtggactttggatagtttttaaccgcattagctttttatgatatctctacaaaatgtgtaaatcatccttgagctatatgggtaagaatagttttttttttccttatgagaaaagaagcctgagaaatgagagctcacgtgggggaaaaataaatgagaagtgtaaccaaaaaaaaaaaaaaaagtaaacagatcctaaccctttgcacatcctatattaactgctaaaaacgtactcgtatagatcaaacgagatcgtcttcaagataatcatacacggagatactaagtttgtcctcctcctccatattcgccatggaagatctctcttcacaatcaccactcccagacacagcaccatggaatccggcgtccacggccatgccggcgtcggaagcagctttttggatggacttaggagatatattggaggcgagggaggttgtaagtaagtgagggaagttaaaagattcgtcgtcgagggaagatggtcggtgcaagcagtaaaaagcgacgtcgtgggctacggcagcgccttctgcggtggagaaagagcctaaccagagacgttgacgagttcccgggacacgaatctctgatacccattttccccatttccgacgacggatacctttgtacttgctctggtcagtttctccggtgtctcttgaatccatgtttttgggtggatgaagatgagattataagatcatgagggaaaatgttgcatataaatacgttgaagcggaataaagtcgtgtagatcaagtccgaataaattgaatgtatataattgtacttttaaaattgggttatgagatgaataaacaaatattatatggtcaaagtatgaccaggggggttatgagatatggacatgtggctcgcactggttgacgttttctattttagttttagcttttgggttctttggaatattcgagtcgtgtttcaagtttcaacttgttgaggtttacatcaactaaatacacatttggataagcaaatgaattttccaacgtaatgagagtcatcatatcacctgatgatccatatcaatacgacttgattcaaaaagtctgatagaaaagaaaattaaaaaacacacaagtacacaacagttcatcacgacatcacgtgctgaaacttgaaaagaaaacatgagacttgcctctctctctttttttgtttggtcacatttcatcaggcatgacgtcttcaaatagtcttaaacgggtgctcgtcttgggcttataagtttgactaaagggcagaaaagttattttttgtcttgtctcgttttgcaatttgcacactgaaaacgaaaagggatatgagatttgtggtctcttctttgattggtggtactcaaatttaacacaaactaagattccgcacacggaatcactcacttttgagcaaccaaatttgaatgcaatgtactctctagtctctacaatgacctccctttcttcttttaattaaaaaattatggttaagaggtttatattatatgttatttttacatttaacatacattatctcataaacttaataatattttccaaattcttagagttaatttatttattaaaaaaaagattatgtatgcctatattgctaaatgaacaaaaatcataaaatgaatagaaatgaagactatatagtccaagtggcctagcatggttattgaaattttctctcgtttttgtttcacccaatcaaatatgaggtgttgtatgtcaaatacaaaagatagtgggaaagcttgaagattataatttgaactcaaggagaagaaagaatatctcgtataaggggtaaacacaaagaaagacagagcaaagccatctctatatactattacatggtgttttttttttgtttctcggcaaactgcacaaaggaggcaagcaaaaccagaccaacaaagatattacctctacttgaaagcatctgaagcagagtaaaggaagtccaagaaccctgttcctttcaatagacctttacctgtcaatagctcgaaatctaacagcagcaagaatcctatcactgccgccttcccatttatcacttcgttcttcttcgtaaaaccaaatccttcagaaccctcgtccacaatcattctcacctgtgattcacaaatttaccatcactctttggttttttccccccaaatgaaacaaattcacatgtataggtgttttacctcgtctacattgacgtttgttgctgtgagcccaggctgagcttttccactgaagacgatctcagcagctgcctctgttttcccgctgtctctaatgctgatatagatgttttcctcatcatatttgacagggtatacaaatagtttcctcaatgcaggtgtcaagactctgagaaccgggtttttcgggtaccattcccggatctctccagttctaagatcaaacgtactatccgttgatgggcacacaatgcaaccatcctgatataattgccaaaaagagaccacttaccgttagagaaaccaagagtacttcgagcagaatgtagtactattcaaaccaagaccttaatatatcatagcaacagttgaaaaccataaccaaaactacagagaatatgtaattcatagaatgtgatgaagtaactcaagccatgtgttatgttttatctcataaacttcgttcctacagctatcactctactcggtcaagcattttcaacaaacaccttatatgctcctacttttctcatcaattgggcaatgcacgatcataaaatttccaaacgacgaagaaaacctgagtgagcctagcgttgagaagtccttcgctgtaagctccttcagctggagaacgattctcaattgcaaacacatcgttcttgtaccaaagcaacaatatcgtctcatcgtcttgaataaccactcgccgttcacctttcggaagcgccgataacggcaccaccggaacccaattccttccaggtgtggatacagaagaagaagaagatacctccgtcgcctcgcatcttacgtttccaccacttctctgcttcgaattctggtccaatcggtaagtgagagctactcgacggttacggcggagatagagaggcagcgttctagctaatggcggtcctcggatgaatgatgaaggtcgcggagttgtgaaggagtaattacgggggagagatgaagatgcggtggtcaccattgacgagagtgagagaaagccgtagagaatgaaggaaaatgcatttgaccacacaaagcagagaaaagtggatatcgaagaagaagaagaataatggtagccacacttttttatatgggcctctatttagccaacacggcttcacttcttcagatattttgtttggaaactagccccaatgggccttgtaaacagttgggccaatatgggccttaggagaaaggctcataaattcagtaaccgacaagcaaatttggcatggaacactcttcatcttcagagtctcgtactcttgttgcgttttttcgcgcgcattcttccgctttgctttgttgttccaatatctctctcttacctctgtttcgttattctcaatcatataggttctgctatgtatatactctcagctcgtagggttcaaatgtgtatatagtatggttcagcaatcagcacaccacgtgttcgatgatatgcttcaatgaagttttctcaacttgtagtcttattctgctttgatctgaagtagagaagcatattttttgttgtggagctcgaatatggcgcgttgggcatggtgttgttagacagagtatatgccgtatattcttggaggtctcaccatagccgacattgtcaagtttattcccagattatggaaaaagtcgcagtcttgttccaagaactttccaaacccacattgaatcaatgctgagtgagagtcttttcaaatctctcggacatttggccagccacggtcatttgcacgacgctttcaaaacgttttctcttcttcgtcttcaatcttcttctgcagtttcagatgacctcgttttgcattccgcggcttcccttttatccgcttgcgttgatgttcgtgcatttttagcaggggtgcaagttcacgctcactgtatttcgtcgggtgtcgaatatcactctgtgttagtcccaaagctggttaccttttactctgctttcaatctccacaatgaagctcaatcgattattgagaactctgacattttgcatcccttaccttggaatgtgctcattgcttcgtatgccaagaacgagctttttgaggaggttattgctgcttacaagagaatggtgagcaagggaatccgacccgatgccttcacttatccgtctgttcttaaggcttgtggtgaaacacttgacgttgcctttggaagggtggttcatggttccatcgaggttagctcttacaagtccagcttgtatgtttgtaatgcattgatctctatgtataaaaggtttagaaatatgggtattgctcggaggttgtttgatcgaatgtttgaaagggatgctgtctcatggaatgcagtgataaactgttatgcttcggaaggcatgtggagtgaagcgtttgagcttttcgataaaatgtggttttcaggtgttgaggtcagtgtcataacttggaatattatttctggaggttgtttgcaaacaggaaattatgtaggagctttgggtttgatctctaggatgagaaattttcctacgagcttagatcctgtggctatgattattggtttgaaggcttgctctctcataggagcaatacgattgggaaaagagattcacggtcttgctattcacagttcttatgatgggattgacaatgttcgaaacacgttgatcacaatgtactcaaaatgcaaagaccttaggcacgccttaatagtgtttcaacagactgaagaaaatagtttgtgtacttggaactctatcatttccagttatgcgcagctgaacaaatcagaagaagcctctcacctgctgagggagatgttggttgctggctttcagccaaattccattacacttgcaagcattctccctctttgtgctcggattgcaaacctgcaacatggaaaagagtttcattgctacatcctgaggcgcaagtgcttcaaggactatacaatgctgtggaactcccttgttgatgtttatgcaaaatcgggaaagattgtacctgcaaagcaagtatctgatttgatgagcaaaagagacgaagtaacatacacttccttgatagatggatacggaaatcaaggtgaagggggagtagccttggccctgttcaaggagatgatcagatctggtattaaacctgaccatgtaaccgtggttgcagttctatcagcctgcagtcattccaagttagtccatgaaggtgaaaggctgtttatgaagatgcagtgtgagtatggtatacgtccttgtcttcaacatttttcttgtatggttgatctctatggcagagcaggtttcctagcgaaagccaaagacataattcacaatatgccatataagccatccggtgccacgtgggctaccctactgaacgcgtgtcacatccatgggaacacacagattggtaaatgggc

SEQ ID NO: 6260 - DNA, 775 bp, Arabidopsis thaliana landsberg
tagctacttatattaacgcaggcagtcttttgaatgctgcatgtgtcacagggttgtgatgcttgcctcttgatcgactcaacgcccgcaaggccatcagagaaaagcgcggaggcaaacgtaagcgtgagaggcttcgagaccatggatgaggttaacaaagagtcttgagcatagtttgcccaaaaacagtctcatgcgcagacattgtaactctagccacaaaagactcgattgcattagcgggtggtccacgtttcacagtacgaacaggataggtaatttccgtgatttatatcaagtcctagggctgtgattttgcccggaccactaatttccgtggctgtatcaatcaaagattttgaaggtaaaggtttgaatgtcaccaacatggttgcacttattggtggtggtcacagcgtcggtgttgcacattgcagtctttttcaggataggcttaaggatcctaaaatggacagcaaactgaaagctaagttacagaacacatgtcgtggtccaaatgacccatcagtggtcttggaccaaatgacgccacttgaggtagacaatcaaatctataaacagataaaaagtcaaagaggaatccttagaattgatcaaaacttgggtctcgatgactcaaccagtaggatcgtatcaaattttgcattaaatgaaacattattcggagaaagattaactgaaacaatgcagataatgggtgaaataaaagttcttacgggaaattctggagagatcaggacaaactgcagag

SEQ ID NO: 6261 - DNA, 733 bp, Arabidopsis thaliana landsberg
tatatgtatcacaaaattaaacaaaagagaatccacctatcgacatagacgtggtatcctttcgatatcgacagaattatgttgaacgcagcaagttggccattaatcaaatctttgacgcgtggaatcattctattgtcaatgaaaacaaatattaaagaacaggtactacctatatacctaatagattcctctaacccgtcaaatgtcaatgtatcgaccgttacaattatgcacgtcttctaattgaaacattctctactttgccaatgtcttatccccaaaactacatataaatatgcatttacgggggcttagaatttcatcacaaaacttgcaagtatcattcacaggagagggaagggagagctcatcatacgaaatgaggtcaatcacagctttgtttttccttttctgtttccttgctccttctgctttggcgcagctccgaactgggttctacagccgctcatgcccccgtgccgaatctatcgtggctagtgttgttgccaaccgtttcagaagtgacaagtccattactgcagcatttcttcgtatgcagtttcatgattgctttgtcagggtccgtaagcttctcctgtgtgtacatgtgtatatatataaacataaactagctaatatttagacaacacattgatcaagcaatgttttgaatggttgtgtagggttgtgatgctttcctcttgatcgacccaagacctgaaaggccatc

SEQ ID NO: 6262 - DNA, 506 bp, Arabidopsis thaliana landsberg
aattgttgatggctctgcatgtttgtcctgttctctccagaatcttccgtaagaactcctattgcacccattttatgcattgcttcgacaaatctctttccgaataatctcctgtctgatgcaaaccttgacacaatcccactggttgatccatggagagccaagttttgatcaattctaaggattcctttttgactttttatctgtctgtaaattgcatagtctaccctaaatggagtcccttggtccaaaaacactgatgggtcatttgggccacggcatgtttttcttaacctagctttcagtgtgggatccattgcaggatccctaagcctgtcccgaaagagactgcaatgtgcaacaccgacgctgtggccaccaccaataagtgtaaccatgtcccttacattcaaacctttagcttgaaatgctttgattgatgcagccacggtaattgtttgtccaggcaagttaacattactagggtttgatctaaacccatcacg

SEQ ID NO: 6263 - DNA, 3260 bp, Arabidopsis thaliana landsberg
taacgggccatcctgtcgcctgaaacaacccagccgccatttgcataaccaaaaagaaccaaaacgcatgattgtttcagaaataacccataccaaacaacccaacaaagaacccactcccaatcattccccaagtcagaaacaatctcagatccaaactatcacccaaatgaccagcaacatacattcctatagagtaacaagcaagaaacgccacatcaatctctcccaacctagacgtcccatctttcccattaaacggttcccatcctttagacttacgatgcaacaaaacctcatctatatcaccaatttctctcttcacaaacacgttacccataggccaaggataaattttgtcgctgttatgttcttgaggtggcttagtgcttgagtctgggtgtaaaacgctcttcactatgctgcttggtttacgagaagcatggtaacaagcatatgcgatgaaagtaataaacaaaatcgcgtaccgaaacgtctttggactccaatttcttcctctgactctcctcagaagcgcaatcccaggtggtgttttcctcttcgaattcatcgccatctctcacaacaaaacaaaattttcaatgataacaaaaaaaaaaaagaatcaacctttacggatcaaaatgaaatacccaaatccatttgttttagtgtttgataaatcagaatcacgaattaatttgattgagagagagcgattagagagaagagaccaaagggagagagatattggcgggagagagagagagacagagagagatagaacacgacataaactgtgaagacgcgacacgtgtcctatttgttacggtagagccaaaaggcagaacaacagttgtcatgccacggtgaccactttggtacgcatgaagcgacggcccacacgaccgacgtggtggtgggcccaaattataggtttatgtaatcataataagactgtgtcattagccgactcttttattgatatttttataaatcatagtactatctatttatattaatattgatatactaaaggcccacaataacaaacggcccataaagaaaattcacacgtgcgatggcatacgtgtgccaaaataggaagcgaaaagcagataaggctcttttccactgtcttccctccattttctccgagtaactgagagtttgctgcagctatggcgatgagctttcatcgtcttcctcaggtttaaatatacgaaagcttatgaaatctctattttcacttaattcattattgttgattatttgtttctatgggatttttaggcattgcatatgatacccagaaaccctacgcaatcatcgaagaatttaaggttttcttcgtttctatcgtgtgcaccatcgatggattctcgtatatcagtttctaggctttctctgaatcatcccggctcgaaatttgggttctcactcgatactagggtgagaaatgagtttatcgttagagcagaagaaggtaacacagaagctgaatctgaagaatttgttgctgaaatcgctgatacggaaggaaatgtagaggaagtggtcgaagctaaacctacaagaaaacctaggatcaagctcggagatgtcatgggggttagtgaacttctttgtttatcagtaatccaaattatgagtgtttagcaattaggaatcagtaagtctctgtgtacacatttgtgttgagggacttgctttttctatagttatcttataggcaatgttgagggagattgaatgttattatctgttgattgttgtagatactgaaccagaaagcaattgaggtagcagagaaagtgagacctgttccagaaatcaggacaggagatattgtagaaatcaaattggtaagttgttgatatttttgaagcctcttaagttatggattgaatcgatgtttttgattattggtgggatatggtgtttggcttggcaggaagttcctgagaacaaacgtaggctatctatctacaaaggcatagtgatgtcgagacaaaatgcaggcatacacactaccattcgtattcggagaattattgcgggtatcggtgttgaaattgtgtttcccatgtgagttttttcccctctccagtgaccatttggtatgacctactttgattatgagtcttttcacatgttctgagcttttcaataaaaccaagtttatacatagatactgagttatactttgtgttaccttacataaagtccctgtataatagttagactctgtgcagaggttttactgtaataagtctttagttgctgttataccttcccagttatggcagcctgaatcactatggcaactatcatgtctgctcatgtttactatctttcattctgctgtataacatacgagtctcgagaaacttcctgtgatatatcggttattttcttaccatgtgggaattaagaaaagtgtttggtatgtgttgattctcctaatcgtttgatttgacagatactctcccaacatcaaagagataaaagtggtgagtcacaggaaagtaagaagagcaaggctttactatctgagggacaagcttcctcgtctgtccactttcaagtgaacaccatccaccgtgctgtgtttgacctccagaggtagtaatcttccgcattgtgctctttttttgtaagaattgtttctttctttcttttttttaagcctgtaagtcattccctgcacattttctgagaaagtaaattaagattagttgaacttccggttgatggatgtagacctgttccttgtttgataatgaatgatatatggcttaggatgacctaaagtccatactttaatagaaaatatgtatgaatgagtctgtgttctgtgcatatgttgtttggtgtgtcttgactcttgagggtcttcaggaacaaaaacagaagacatgttctcgtcttatttcttttgggacttcgtctcaactattcgaatcttgaattttgatcttgtgaaggtggaacccaactttttattattaaattaccctaatctctatgaatcattcagcatagatattactgtattaggatgtggtcgatgaattcccttatgatttgtttttctttttctttttttgggtcacataatgagattcgaatcatagtgtgccaaaacctctatcatcgaagttctaaccaaactattactactggtaacaaataagataattgaaacatgtaacaccttgaagtcatgaagtctaaaacatatgcataatacaaagaaa

SEQ ID NO: 6264 - DNA, 1563 bp, Arabidopsis thaliana landsberg
gctcttctcacttcctgtgactaccacttatatctccttatgttgggagagtatctgttaattcaaaacacacatcacatcagatacatattctaaaccaagatccaaacatattacttgattgtgtagattagtatctgttcaagatcaaaacatatcagttacatattacttcattgtagaatcagccaatagtactggaaagttcatagggactagtatgttatgataacggctagactctagagtgattaagattaaaggttggtgcgcgtttctgtagtaaataagcacaaagcttggtgacctataatgctaagacttccagcatttatgtactagttcctatagtatcatacttggagtagcaattatttccttttttcgtgaagaaagctaatacatatgatcagatatagaattgtaaatctcttaagttctcaagaagcgaagactatgactgttcacgataaaagaagctaattccggtttgttttagagttcctaaaatctctctcaaagccaaacgactccccaacaaggtcaaagacccttaacactgacaaactaatactatttacatttatacttatcaatatgcccgagtaagtgtgtgataatagcatagctaaggaaggatattcttacatgggaaagacgatttccacaccaatgcctgcaataatcctccggatacggatagtagtgtggatgcctgcattttgtctagacatcacaatccctttgtagatagatagcctacgtttgttctcaggaacttcctgtaaaatcaaacccaccatgtcgtatcaaaatcttgcagttaaatgcataaattgcataagattatacggggacaatgagtttgaccagtttgatttctacaatatccccagtcataagtccaggaaccggtcttacagtctctgcaacctcaatagctttcttgttcagtagcgacagaaacaaaaagcaaatcaacatttcatttctccaatgcctaaaagataactgatgatttaaaaacaggagccaaaacaactacagtatcagacatgtataatcagattcagagccaaaacaaaatactagacaatctcatagaatcacattggataatgaactaacccccatgatatctccgagcttgactctcgtcttccacggaggtttagcttcctccgccgcaacagtggcttctccttctccttccgcttcagtttcaacagcattctccacaacagcctcagtttcaccttcagtactctcttcagctttagcgataaactctcttctcttcttggaatcgatggcgaaaccaaaattggagctcgaatgattgagaaaaaccctagaaactgatagtcttgagttcactgatgatgctcgtggtagaattgaagaaacccctaaattcttcgacgagaaagaaggggttctcggtatcatatgcaatgcctggttccataaatggtagataaatacagaattcaaagaagcataagtatgaaaatgtgattgagcgtgagagagtgaagaagaagaacctgaggaagaagatga

SEQ ID NO: 6265 - DNA, 4060 bp, Arabidopsis thaliana landsberg
aaaagacggcctgagttagagactaagctcaaacctaaagagatcttgcatcacatgtgcaagtgtggctctaatttatatttgtaggtttcgggaccacgtcgattgttgcccaactccgatcattcactcgatgcttgcggttgcgacagaatgtgtttgcgtctgcgtgattatgcatgctttcccaatggtcagacaaggctctcacttcagttggggtggtcttgattatggctcaatctaaggtttgttatataactaagtgttgttaattcttttggttcgataccaaaagggaaaaaaaaagtgcgatgaaggaaactgagaatgagaggcatagtgagaaaacccaaagacatgtggatcttggacattgcagagatggaatcactcactggtctttggtgagccagagagtacagagaaactggttcaggtcagagcagacatagcttcaacacaacacccaagtttttatatatttggctaattatgttttattcttgcatatgttaatttcccattctcccttaattacaggttttagttgcttaacacaaaagctgttgctattttactgaagctgctttctcctgtgtgtttattgtatctctgtagagttgtgaacgtagttgaacattgttgtaaaattgtaatgtaatacctttttggttaatcctacgtaaaagtagtattagccactacttgctaaacattttaaagggacatcttaaaaagtgaagatgattcttcacaaataaaccacaacggtcacgtgagtctcgtgctattgactactattgttgaggtcggtcaacagtgcattgccccatctttaccttcttcttcccacatttgtttgggatatttttcaatttactcactttatgaatacaaacaaaacaataaaactaatctcttttgtgtgtagttgaaagagataagatcgcagaaaagaagacgatgattcgtcgacttttctcccaacattttgaacaattagttgttatgtgtaattttctatagatagctactatctgattacgtggatcacacttctctttttattattatctctttaggtttcttatcccatataatatgatatcaggtctctttctcgagtaatacattatatatctatgttgattatttactacttgtcatttaagataagatacttaaaaatactttttattggattttgccggaagacttaactttcaaactctattatatgtagaagatagcggactgaaaaatacgtcgaagacagatacttctattgcataatttttgggtagggactagaaaacttactcgtagtttcgacatatcatccgcaatctcaaattaattgcaaactttttgatcatatctattgaaactatctttctagcttcattaattcgttaccagcccccaatataagctatcaagtatgaatattaagatggatttaacggtgataatagtagtatgtacagtttcttttgtcaacagctgataaaaaaaatgaaagcttctaacagtttgagcctaaagagatcatatatgtgaacagtttcacacacacataagccgtacaactaatatagatatcactttgaccgtaaaaatctaacagtttagatcacacacacacaatcttgaaactagtttaaagcactttcagcgaaaagtactcactagatgataagaactctttggcacgtaacagacgctttcgaaccctacgatttcaagaggtggcttatgtacggtccactcaacttcttcatccgacggtctaagattggtcatgtgggttgaactaccaaaagggccaaaagcgtgagccacgttacattataaaagattttgtctttttaatccaacggttcacaccagaatctccaattcggttctgtctcctctcgtgtcggtccatctctctggctcttcacctctagccacgtgtttctaattttgaccttttaaaattttaagaaaaaaacaaattatttcttgtagctaaaatttagcatccaaattccaaactcagagttctcttctatggccgtatgatacttccaataatccgtatgtatgtgaatatcataatctatcacaaacataatgaatagtagtagatattaagacaatcaaatttggtagaaaaaatatcttcctacgttgggaattatgtaggaccgaataatatagtcggctaattcgatattttgtcgcgaaccacgacataaaattatttatcatcatttgtgaacaataatgattcaaaattatcaataacaccaccttttttttttaagttcctttacttctggggtctctagagacccacacatgtgcacaaaatatacgtgtgtctctcatagactttaaagcaaaattagagaacacttatttttagccaaaaaaagtaattaaagaaaaaactatataaaaacagtttaaaaaggggatgatattaaatgattttcatgtgaattataaaacgtattgagtattatcgtgaccgacttcaaaaaacaagaaaaacctcaacttctctttttcagctatagccgccgcctcctcccactaaactcaaatcctctcatagtcttttcaatcaaatctgctcttcttcactgttgaagctggctatcaaaactcacaataactatggtgattgattgattctctttcttacttaactctgttttagtttctttgcaaattcttatattaaccatttggaactggtctaaacattcttcagggaccgatgatgatgagagcagaagaagataactacaatctaaatcctccaccatggctaatcccaatgctaagagcaaactacttcatcccttgttcaatccacgccgcttccaacaaaagcgagtgcaacatgttctgtcttgactgttcttctgaggccttttgctcttactgtttgctcaatcacagaaaccatcgtgtcctccaggttctttcatcaacttcaaatcatttttttctctcttaccaattcacccaacagagttaagaaaatgggattttcattacttgcagatacggagatcatcgtaccacaacgttgtgagagtaaacgagattcagaagtacatagacatatcttgtgttcagacatatataatcaacagcgcaaggatcgttttcttgaacgaacgtcctcagccaagaatcggcaaaggagtcaccaatacttgtgaaatctgttgcagaagccttctcgattctttccgtttctgctctctcggttgcaaagtaactcttctttcctctgttttcctctgttttgaatgaatatctgaatttgctctgtatagttgaaatgaccatattgcccttttgtttggtttatttcagcttggaggaatgaagcgtgatccaagtctaaccttctctttgagagggaagcatggaagagagtacgaaggtgagtgggaatctgatgaagcgactacaccaactaagatacgcaagacatgtgctttcaaccgtctgatgagtggtctttccatctccaccgttaaatgtgattacttgtcaggagatcaaccgtcttcgagctccggtgatgagagcggttttaaactttctccggggacaccgccgatatataatcaccggaattcaagtagacggaagggcgtcccacaccgtgctcctttctaaaattaatactaacggaagctaattatatagtgtagattatagaaaatgtggttgttatgttgtaactaaatggttagtagtttttaaccttttgagctaggaatatacatattgtaagacatattacttacaggtattgtttggtttttctttttatagtacatatagaaattaggtatatactgtactcaaagggattgaaatatgttttcatatagtttttttgctgtaaatatacgtttgaaggaggtatgtttcttcaacttgtttgtatcgtatactgtgtactatcttcacaataaaatagcaaatatgataactaggatttttaactgaagcgctaatattcgaagactaaattgtcaatgag

SEQ ID NO: 6266 - DNA, 5763 bp, Arabidopsis thaliana landsberg
tattcctctcaaaacttcagtttttgttcattggctttagttaaaaaacaaaactttaaaagaagagatgatatatttccatgtatatacagccttttaaaaattaggatatggatgatattttccatgtatatacaactacaagtatagcataaattacaactcacaacatctaaatttctttcttaaaaaacagttacaacgaaactaaatgcagtaaccaattaagggattaaacaatatacaaattggtcaggaatagaatatataaaggtacatgttcatacatataaacacgcattaattatttaattaatcagagcattatatggaagagaatccatagataaacatacagacaaattatttccttttcatcttattctagaaaaatccaattaaagctacttattatagtcgtatagcctatagtttatataaaaccaaaattgtttttaacttataaaatatctttaaaataaaataaaaagagaaaaaaaaagccattttcattttttcatcatcttcgtcttctccattatctctctacccaaatctggcagagaaaaacaaaagaagaagaagaagaaaaactttcgatatggataagagctgtaactcctccggcgattcctccgccgtatccgcctctgcaacgagtagtaccggtaacaatacaacgaacagagatcattacctgagacaactcaataagctgtctcataagatatcaaaaccgacgaactcttcctcctccgtctccgtcgcgaatcgtgaaattgatcttccacctcctccaccgctgcaaatcaatcaagggaatctccatcaacatcaacctcctgtttacaatatcaacaagaacgatttcagagatgttgttcagaaactaaccggttcacctgcacatgaacggatctctgctccgccgcaacaaccgattcatcaccctaaacctcaacagagttcgcgtctacataggatccgtcctcctcctttggttcacgttatcaatcgtcctcctggtttgttaaatgacgcacttatccctcaaggttctcatcacatgaatcaaaactggaccggcgttggatttaaccttcgaccaacggcgccgctttctcctctcccgccgttaccaccggttcacgcggcggcggaatctccggtctcttcgtacatgcggtaccttcaaaactccatgttcgccatcgattcgaatcggaaagagttctctggattatctcctttagctcctttggtctcacctcgttggtaccaacaacaacaggaaaacgctccgccgtcgcagcataacagtcttccaccaccacatcctcctcctccttccgctgctgtttcgcagacggtgccgacatcgattccggcgcctccactgtttggatgttcaagttcgcctaaatctccgtatgggttactctcaccgagcatacttttatcgccatcgtcaggtcaattagggttcccggtatctccgacgacggtgccgcttcctagccctaaatacaaaggtcattgatcagaaaatcggaaacccttgtcggtcaaagtgagaaaacgtcgtcgttttgaccgtcacgacaaaatcccctttgttctttttgtacatcattagtggagagtggtgggatcatttgttttttttttgttaattaactcaaagattacttaaatccgtttttttttaactttcttttgtttcatggtttgttcatgttagaaacaaagaagactaggaaaaagaaaggaatacacttttgcaactctattcaatttttataagtttgccgttatgatttcatctctttgtagatcagattgcatacaagagttttttcttcatcgtctattcgatggggtattaaatttttgattggttgatcagctataccaatcacttcactgttcctttgtttgaattttatgctctgatgctttcattttaagttgaaacttcaaactctgacgagatcattaattttaaacctgtaaagtgtcaaatgactaacgagtgtctattgcttaaatagttcttttgaaatgtatttttatttttatataatcaaattgatgattgatttcagaccaggtaaagtaattggctttacgcagtccaataaactagtccgcttttaaaattaaaaattgataaacaatcaatctacgcaacaagataagagacaagagactttatgatcttcaaattgatgagaaaagaaagcaagtttcgattacacagacattgaaatcgataacaacaaagaaataagaaaagagaaaataaattaaaaagagatagaaagatgattgatggttcagacttgccacaaatatgatgaatgaataagcttttgaagatgagcgaaatggcaagagcgacctcttagatggattaagaaaaacatatggacgagaaagagaagaaattccaaaccctagaagaaaactagcagtttcactcaaaagatcactgctgttcctcggtcggttttggcgctgctgcttccttgatctcatccgcagcatcatcctaatataatccccaaagttacagaatttagtcaatggaatgcgaatcatccataacagaaacaaagaaagaacaaaggttagaggattatgaacggacctgcatatcagatgtccagagagtgaggttgtcacgaagaagctgcatgatcaaggtactgtctttgtatgactcttcaccaagagtgtccaactctgcaatcgcctcatcaaaggccttgacgatacataacaacaacaaaaccagtcaaatttatgtccaatgaggtcaagtgttaaaccaagtccaatcacattatcataattgaaagatgagtagattgaaatacctgtttggcgaggttacaggcacgatcaggagaattgaggatctcgtaatagaacacagagaagttcaatgcaagaccaagacgaattgggtgtgttggagcaagctctgcattagcaatatcctgcatagataatcacatacaaagactataagctcaaaacctagacaatctcaagatcttattcgagactacacaaatccctaatttaagtctcattctactgcaaatctaacaaatcaccatccacggatcacacataatactcaaataaactagatctgagattcggaatcaaacctgagcagatttgtaagcggagagtgtatgttcagcggcgtctttcctctcttgaccagtcttaaactcagccaagtacctgtgataatctcccttcatcttaaggtaaaagaccttggaatcaccagaagcagcggcagggatgagtctagagtcaagcaacttaaggattccgtcgcagattccggagagttccgtctcgatcttagacctgtattcacggatcgccgtgacgtggtcatcgttaccacggctctcttccttctgctcgatcgacgaaatgatacgccacgaggcacggcgagcaccaatcacgttcttgtaagcgacggagagaagatttcgctcttctacggtgagttcatcgccatcgactgcggcggagactttctccataaactctaccatctcttcgtacctctccgcttgctccgcgagcttagccatgtatacgaactcttcacgcccagacgccattgttgtttctagagagaatcgatctaaggaagaagaatcaaagagggtaagatctgagatctgatcaaaaagagagaaacggtttcgattagagaatcgggtgttgtaggtcaagcgagagaggacgatgaatgagtttttgtgtttaatgagggaaagtgataaatgcgttttagaggaaaagagtgaaatttggaaccaagatctaatctgggccgttggatttgtggccggtcctgctttttaaagggggatttttttcacctcaaattaagaacaacataaatacacttttagaaaaattggtaatgtgattattggataaaatttggtcaattaacaaaataattggtaatgtgattttgctactattagtataggcaccttaaggaattataaaattttgggtctagtggttaaaataggggctagttttttgtagatttgttaatatagttatttaccaattgtgaaaagaaattggaagtgtaagattgatacaataatggaagcaagtttgggtaacaaaaaatggagacagctcagagggacacaatgtgtgttgtgagcatgtcaggggatccaatggaccctttcttctccaactcagctttcacatttttgtgattgctcaaacggtttttttttcttctttcaaaatttaaatacttcggaggttgtctattcttcaaatcttcaaacattcaactaagtacgtaggcgattcttacgagctttttaaaatcattatgttcttaattatgtggttgtatttgtactgaagtgatttataatcgatttaagttaatggtattggatgcctcttcgaaattgtagattagtttatggttaacgctttttgtgagattattaaaaaacaatatttgttttcctctacagttttgcttaatccaatggttatccagttatcctaatccatgattatgttttttctatcttatttctttgttaattttttttatttgcattagtttccttcataattattttttacattcaatgaaataataagagtactctctacttttctagcataaatgttaactatacaagaacatgtattcattgaatgtataatcatgagatagctaaaagatcatacgttagaaaaaaccgtcaaataaaaaaggcgaaaattcggatatgttcgggaaacgatttgtggttaatctagtacgcaagtagatcaaaagtttttgataagtattgagatgacagctaattataattagtcatttagataatgatgtatcatgtatattaccctaatccttatctaattaggtttcttatctctatctatatacgattctctacttgtatagaaaccaatcttcatgaaagtgttaatacaccagatgatttgttccgacgtgttgggtgtgggggagatagggacgcgagcatgaatcgatgctaaacgtaaggtttgaaccatatcgaagtgttcattccctaattgccatcccccttaaatttgggacattcaagaatattaatagagattacattatctgagttcattagctggatttacgagtggtcgggtttgatcatacctagcagagatatggacgattgactattgtgtgtttttgacggatgggacgttacattaataacttatatacgataagtctataatgcatgttggtgcatgctcaagtcaacataaaataagaggtttggaacttggaagcccaacaattgagcatatgcgggatattccgaggctcccctgccattaatttcaattatcttctcttctttttaattcttaataaactttaaaaactttcgtcttgatgtgatccatggctatgatctatctttgtaaatcatatgattcatattgataacttacggtataagttatgataataacaacaaacgcattatcttatttgtcgtcgactgtcgacaacaaaagatcttacaattttattataagtttctgacaattaacttttattttattttatttatttctgacaataaataatattttatttattttatttaatttttggtcaagtctttaggattatacataaattacttctcaaataccaacgatcaaggtact

SEQ ID NO: 6267 - DNA, 1673 bp, Arabidopsis thaliana landsberg
tacacttctttctttgatgcaacattcattcgcaaagcccttttttgttgttcttgcagattttagctgtgctaaagaactcaccagactctatgaacatgtcgagtttgaaggagtttgttgaccccaacatgatggatttatacccgcatgactgtttgttcaaggtaaactaagaaacaaatgcttaattagtagttggaaaaatgtagtaaccatatgatttatttcattgtaaatgaatttttgtggacagattgctacgttggcaaagcaatgtgtggatgatgatccgattctaagaccaaacatgaagcaagtggttatatcgctctcgcagatactcctgtcttccattgaatgggaagccactcttgctggaaacagccaagtctttagtggtctagtccaaggaagataaaaacaataaaaacttagaaccctttctttattttcaatttatgaatgtcgccattgcctagaagaagcttagtttgtctaaaccaaaagatcgttcgcagtctaactaagtagatagttacagagacaaatctctatatgattattcttttggagaatcaaatgaagagatgtatgagtttatatgcttaagatatgttgcaatcttacaaacaaaacatcactttataatcttacaaattacaatagattgatgatgatgcatgacacagaaccatataatttttggacataatcaatactttgtaagagaaagtgtgaaggtctgagaatctatgaagacttagagatagaaggtcactgttgtaatctttttcgattcccatactaactctggttttagcttatataatacaaaatctaaaagcataaaaggcttaacgtagtaagtaatcttggcccagcataggcccaataaaccacattcagatcgtatcatcatattcttatttttaattcaaccaaattatcttgtgtttcaaaccaatatctccttgatatttttgtaaatttttgtgtgcgcagataatgatttctcagtgatgactataaactctatttggcatcaattaaaagttttgaccaagggtttcaaactaaacgacgtcgttagggttctcttgggatgcaagcatgtgttttcacatgattaatccaaataacaaaaggaaaaagaaaataaaactcaaatcctaattcctaatgggaagattggttttgatattataaagtaaaataaatcacgtttttgatatttcttctggtaggaacgaacgaaaacgtagtattcgtgaggatggatactattgacgaaattctcattggtttctccatcatcggcttgatcgtcatcgtgattgctaactgttgcgacaatatagatccccctcccacgagattacctcccgagacaatccatcaaactgtacagcctcaacaagacattgaaaccggacagagcaaagccctagtgttcaaagatatcaaagaagaagaaggaggaagagaagaagaaggtggtggtaaacgtttttgtccaatttgtttggaagagtacgaggatgatcatcagattaggcgtttaagaaactgtggacatgtttttcatcttttgtgtattgattcttggcttacacagaaacaaaactgtccaagttgtcgccgttctgttgatttgatgagtttaggtcttt

SEQ ID NO: 6268 - DNA, 2825 bp, Arabidopsis thaliana landsberg
caccgagacctgtgaagagaagaaggaacgacaagagccgtgatcgaaacttgggatagaagctgtggttgtcggtttaatctctccggcggagagagacggagagtaaggagcagtgaaaaggaatcggaggtcaccggaggtgagtaggtaagaggcgtgaaccatgtttccggtggaaagatcggatttggcggagaatctcatccccagaccccaggagaagcgacgagcgacgttggttgcgtcgccgcaccagaactcgatgtgatggaagcgcttaaccttgaatttatcagactttggattctttcttacgaacttggaaaatccgacgagcttgaatcccggcgacgacgcagcgccgtcatcatggttttgattctctgaaacggcggcgttttggtggcccattgatttcaccaactctgctaaaactaaaactctgctacggaactgtgtgtttcgttgagctgtagaagctaacgatagacacatatacggattttattattttattttaaaattaaaatattttagaggttagaaagaaaaaagatcctctcgtgtgtctgagaatgtcaggtcaacagatgtggactgttagtggacatcatagtgtacacgtgtacgatcagattttgattacaaagataatgttccgtgatggatctccctgctttctctttggttgatccttgtccagttacggaatgctcacgtgtaagacctatctaccgtttagaatagtattttttccccacaatatcaaactattacttaaaaaattgaaaattttccaaccattatggatagaggcaaacatgaaatctttggtaattcggtggatttgattggtgtttgaaacaggaaatttaatttgtaaaagactgaaccactttataagtttcctaatggtcaatcttctcacacttctggatttgcaatgacccgtttgatcgaatcttcgtttgcctgattgcatatgtaatatgttacagtggaggttaaattctaaagttacagcttacaacatgcttaagcaaatattagcttctctatgtcaacaaatgtgcgtaagaaagagacatcatttacatgtatgtacaaaactacacctgcaacatctaatgctagagtgaccaaacacttcagcttcaaaactcttcacatgtccaaaccaaaccaatctacaatatgccttgagggttggtaccttaatatcctctcattcccatctaaaatatgattaaatccatcatgcctcctagctttatgtttgtccaatttcgtatcatacaacagccaaacttaaaattaagacgcatctgtggtgatggagaacccttaactcgctatctctaaggtgtctcatatttacctcttttatacgtctacttaattggcataagcccatcctctttttgcatttttctatacagctcatgcgcttcacgccatagtcttttcctacgcaagcctatcatcattgtaatgtacgttataacatcaggacttactcctttgagagcaagactgcaaaataaataccaagcatcttccaccttatcagccttacacagccctttgatgataatattatatgtaataataccaacaactgttttactcttttgcaaatcctccagtctcaccaatgcttttcctatttttccatgatcacatagaccgtctaacaaaatgttaaaggtatacatatcgggatgcacgccacaaaaaccatccgacctaaaaccttttcggcagcactaaattttcccgcttgacaataaccttggtaaagagtattgtaagtgaatgtgtcaccatccactccatcacgggacattacgcacaagattttcatcccatcatctaccctcttggccttgcaatatccatttatgagagtattataagtcactgcatttgggaagaaacctttacttaccataacattaagaacttttttggcttcatctagaagaccgtgaatgcaaagcccgttgatctgtgaattgtaagtgacaatagtaggattaactgacctttgaatcatctcattgtactgtttcttagcctctaaaagctgcccctctttcccatacacatcgatcatagcactgaaagtgattacatccgggctgattcccatcctcatcatatcactcagtattcgagcagagacgccccatgtaccagaatgaaaaaggcgagtaatgagagagttgtaggtaactacatccggtctaattcccattttctccatatgtttcaaaacatccagcgcagtattcacttgtcccttttcgcagagactatcaatgatagtgttgtagattacaacattaggttcatatcccaatcccacgatttgatcaaccagagacatggcttcataaaatctatttacgtgacagaatccattgaccagagatccaaaggtaactatgctgggctcaaaaccaagcttcatcatctttcctagacatgacagagcaagagagagtcgagcgcatcggcagaaacaatctattaaagttgtgaagctatagagatcatgtgaaattcccaacatcttcaaatgctcgaagagagagatcacagcttcatacttattcagcttagcaatggcaatcagtaatctactgaaatcaacaatggaagggaggggatgagactcatccatgttacagaacaaaggtagtgcatcgttaaacttaattgagtgaagcccacttctcaatctttttgggtagtcactctaccagaaaagcttcggaattgcaatgcgtatgagagagcgttacaagattcctttttca

SEQ ID NO: 6269 - DNA, 1745 bp, Arabidopsis thaliana landsberg
tgagattcttgatggtgatgaagatgatgatgaatcgagagagaaattgaggtttaagaatatttttgattgattcttaaaataaaccaacatccaaaaccgggttaccgaaacgatttaactaaaccagagatatgaggaactgagaggagtaaaccatgttatcgatgaatcttcctcttacaatcttataccacaaggaacgataaattagggttttctgaaacggagaactgtggtcgtttgattagaccggtttagatgctttttatgcaaattggctaaaacggggccggtttagcgggagattgatttttattttctcacaagtgaacataccactagaagaagtgtagtcaaactaaacccacgactctctccacaaacaccactaactctctctttaccattttcatcgaatcgaatgacgatatcactatcttcatcaaactctaaaatcatccctgagacgagcaaacactcgccaagaatcgtgtctgcgccaacttcgtggaactgtggaagtactttagggtttcaatggatcaaggaacgatcaagatcaaactacctaaaccatcagagataacgaggaggcaaaagaaagagaccgatatgggcaagaagataaagaaagaagagaacatgaagagagatttcatcagaccaagaatggtttttcgagttaagaagatgacttctgtgatttccggtgtcttcaaccgcaagaaaacactttcaggtgaaaacagagaacagagagatggttctgagggcgatgagaccgtgtttgataaactcaagcaaaacccaattcagaagaaggggagtttctgggaaagcgcaagaattcgactgaagacactcatcttagggcaaagattgaagaggagaagaaaccgaagaagaagcttaagtgaaggaatggaagaagaggagctgtgcaagaagagaatactaatgggtgaaagatgcaaaccaatgaacggggttttgcagtatgatggtgacggaattctcctacccgagccatgacggttgatcggttttcgtcagtattagtcctagtgtagtttcagtttcttgttgattcactcattagagatttgcaggtagtttatacaaactttatttcttaccaattttcaatatcttgaaatcttgaaactaaggctacatttgaagatctaatgacactgcctataaataatcgagattagttacattgatggattatgaggaagccattctggtttgttcatctttgtaactgttctggagtttggttgcttgtggtggatggtgaattgatagcttcagagggtgggatcatcccccacttgccttcaccctctgtcggttccatcatcttcactgacccgtcattcaaacctaccgcaaactggtttgggtcttgcgggtgagccgccacaacaagaggagacaagccttgattcctgtgaaagcaaagagaatcaataaggagaagagtttataactattttggcttatgaaaatataccaatttgtcatgtttcagaagtcatttaagtctatacagattcagtaccaaaccttacaaagtacattaaataagaatctgatgaaatgttggataaacttacccttgaggcaagtaggcggatggagagatacgacatcttaatctgagactgtccgcgtcaaatactccaatgttaccatcgcggaaagtggtgtagatcagctggctgttgaatgggaca

SEQ ID NO: 6270 - DNA, 2577 bp, Arabidopsis thaliana landsberg
  unsure (1)..(2577): unsure at all n locations
tgaggaccttgacaacgacatgcgtgagaatgtcatacacccataaatgtagtgcgtggcaagtctggccaaattcccgaaacggtacgtttttacgggaagggtacttttaccaaactcttctcgcattagtgatgagccatagagaggaagcaaaagatcttgtcaagggtgttttagtaatttcaaaatatccttcccttcgttgacaaggatgacgtctttttgagtatttcaacatccaccacaatttcgcttttctccactttttctgttaaaaagcttcctccaccgcaacgaatttcacggcgacggtgaagaagaagtaaagtcctagatgtgtctcatggcgttatccgacgcggttctcgggaatctcgcgacgatctacgtggcggtgattatcgcgattaaagcctacggattaatcaccgggaggagtttcagcgctggattcgtcgtcgtcgtttcgattacggcagttggtgttttgcttgcagttacgcttgcttgggatgtgtctcgtagagcagcggaggcggtttctcggtacaatcgtgttggtggtgaggaagatcttagccaccaccgtcaccatcacgacggtggtgcgatttgtaaaggagggatttgctggcacggcgttgcggttcggtctccggcttcacaggttcgatttaggcttccacaacatataccttacggtgctttctgagtatataaacttcgaattttccctctttattttgacttttgtgaagtagataacatgtgttagatatatacgtttctcatagattttctgtgtaatagatgatgatgaggaataaggtaatggtgttcttcttcttgtaagttggaaggtttttgtttgtattgatatgttgtaaaatcggatagtgattgtgatgattatagatatgatgttcttgtttttaaaagtaaaaatggattttgaatttaagagctgcactgttatccaaatttgaatgttgatactcgagtcttaccactgaatgaggattgtggcattgagaattttgggggattcttaatgaagagactaaaacagagtaatctaaataacatgtgttcggagttaaggaataaggtaatgatgttcttcttcgtgtaagctgggaggtttttgtttgtattgatatgttgtaaaatcggatagtgattatgatgatgatagatgttcttgttttctttatacaatcgattttgaattttgagagctgcagtgttgtttaaatctgaatgaaactcaggtctttccaagttaatcaagattgtggccttgaaagttttgtgatttaaattgtatatgattcttaatgaagagactaaaacagagtaatgaaggatcttgtttctctaccttaatgaatttgtgactaatttgccttgtcttcttctcacacccgtttataagttgtgactatgtgccttgtcttcttctctgaattgctctatgaatggaggtaagagttatggatagaattagcttcacagcatcatcctcatcttgtgggaaaatgcacattatagaggttgaattctgttgttcatgaacttttaaagcttcttggttgttgatttctgtgaatttttccggtttcttagtttatgtgtgttttgcttcaagagcagaaactacaatgttatgaccctgaggtgattttcttagctcgtaaaaatatgagaagtgaatgacccccaagaactcaatgaaactggtcattattccaaatgcagagtacgagtccaatctcttaatcaaccattagtctgttgattccgtgtttttttttatcagatgtgtttcctttttattttccgagccatctgctggtaaatactttgtaagtaaggtcaagattgcaacatgacactgtcggaagctaacacaaacctgaatttagatatgaccctaattcacatattctaaacagtctagacttaaatccagaggtcaaagctctcacattcttttattttatacactctgaacggagaattagctaaagtttaaagccatcaagcaataagcatattgattacattacatactcgagataataacacataaagaggtaatatacaaattgaaacacaacaaatatacaaacccgaaagtattagaaaccataaataagaacacccaaaaaatgatcaccacatttcgcatcttattttcatatttatcttgcttgggtcnnnnnnnnnnnnnnnnnnncacggatttaggagggttagtgagcatgtgcacaacttccctcatcgtaggccttgccgcggcttcttcctccacacacatcattgcgatcttgaacacatgaatcacacttgtcaacgggtaaccagtcaacctcgggtcaacaatcgcaacaacaatagcagcatccgatggctgagttatctcctcttccgtgttcctcacccacctaactatatccactccttctccaaattcaccaacaggtttcttcccagctattaactccaacaaaaccactccgaaactatacacatcactcttctcgtccactttcaaggtatatgcatactctg

SEQ ID NO: 6271 - DNA, 2514 bp, Arabidopsis thaliana landsberg
gttaagctaaaaaacattttcttttctattggtatagaactcaaagaagttgtatcggtattcaagagcgatccgagaaagtataagatcccatacgacaaagatcatgggaattttgtaggggttaaagaaggaagaaggcgaagattatcgtagtgacggtgatgccccacgtcacaaatatgatgtaaatgaccggtttcgtgtcgggagaaagttcttgaagaatgcaaaacacggcgatggggtcatagttggtcttatcgatagtggtaagttttctaagaagtttagtgtccatcgaccatcgtgaaccattttgattgaataactagtgtacctactttgtggttttctctttaacaaacacacatattttctgttaaacaacttaatcgtttccataaaatagataaattctgttaccaaaatctttaacatatttagtttgttgaatatatggtataattgggggaataatttgtttatatttgggagataaaaggggtgtggccagaatcaaggagtttcgatgacaaaggaatgggaccaattccagaatcttggaaaggaatctgccaaaccggtgttgccttcaactcttcccattgtaatcggtaacaaacaaatatcttcactaatttactaaaggttatcaatttaactatatcttatatacgtatatatgaaatgcccttatcatgagctcagctcactccagctatatatctaattatctatagttttttttttctttcaacattaacattttcaccaaatacatcaaaaagtgacttttgtcatgatatcactacattttgttcaaattaacgtaaattttatgattgaaattagtatatgcacactagtactagtacatacatattatcatgataattgaacttatatctcatcttttccacaagacttttttcataaatatcaaagagaacaaaatttatatgggtactagtttgatactgcaaaataatttattacgttaattacctttagactacgggatatattagaaagggctaataacttaatattaatgcttatcatctttattttatcgtcattaatcacaagaaaattatcggagcaaggtactatgcaagagggtacgagagatattacggaccgttcaatgccgaagctaacaaagacttcttgtctccacgagacgctgatggacatggttcccacacagcttcaaccgccgttggtcgccgagtagacggtgtttctgcactaggcggtattgctatgggtacggcttcaggcggcgcttcactagctcgtctcgccgtttacaaagcttgttgggcggttccaaacaaggaaaaatacgccacaaacacttgttttgatgaagatatgttggctgcgtttgacgatgccattgctgatggtgtcaatgttatcagtatttctattggaactgttgaacctcacacgtatttggaggatggaatcgcgatcggagcgttgcatgcagttaaaagagatattgtggttgcggctagcgctggaaatgatggacctgcgcgggaaactctgtcgaatccagctccgtggattattaccgtcggagctagtagtcttgatcggtttttcgtcggccgtcttgaacttggtgatggctatgtattcgaggtaataaacctaacattaaaacgttacaccttattaaaccatatacattacaaggaaaattatggttcaaatctaaaaacaatctgacgaagacatgtagtttcaaatgttaaccatagtctctttcccggctaaatttaattattactaagaaaatttgtgagttatgactattttaaatttggtacgtaaatagggtacgatgttatatatgctttttgagttatggtttcgcttgagagctttgaggtaagttttacgctcggatatagatttagactattaatcattcaatagatttagttttaatacaaacttatttctaaatattgtgtatcatgtatataatgaatttaatagaaagtttcatattttctagtcggactcattaacaacattaaagatggacaattatgctcctctagtctacgctcctgacgtggttgttccaggcgtttcaaggaacgacgcaatgtaagttttttaccttcgatatcaaaagatgaatggatgttaatattaaataaaaaaaggtttttacttttgttacaaagttttttattttatttggcctaattaattgtttgtgtatggtgaaggctatgtttaccgaatgcactttcacctgatcatgtgagaggtaaagtggtattatgtttaagaggttacggttcaggttcaacaattggtaaaggtcttgaggtaaagcgagccggaggagttggtatgatattagcaaattctcgggataacgatgcattcgacgttgagtctcatttcgtaccaactgctttggttttctcatcaacggtcgatagaattctcgattacatctacaatacttatgaaccggtt

SEQ ID NO: 6272 - DNA, 710 bp, Arabidopsis thaliana landsberg
gatagttgagttttaatctatttcggacctttaattcatacatatatatggtttgtgtgtgtgtatgtgttttggctaaaatttgtatttttggttttatatgtttggcatttttggttttaaatatctgaccaattcaaatcatagaatttctattaaaatttgcattttcttagaaaaaagggaaacatgtcttaccggttacagtgagaagagttaaaggcaactccggtttggcagattcctttccatgattttggaactggtcccattcctttgtcattgaaactctttgattctggccacacacctattattttaaacaaatcattatctcaataatgacggattaatataataatgagatgaacctaacgattccaaaagataaattagtactacaaaaagttccttgaaccttgaattcttgaccataacgcaactctttttctctagtcacgtaataattcaactatcaacgttggagttaggtccatttaagtttggtgtacgttttcatcaaaaagaaacactcattattctcagaatccagcaatatattattttaacattaaactaatcttatggctattatctcggcgctattatgtgtgtgcgtgaaggaaacagaagacagaggaaaattcaaatgaaaggataacacaaaagttgacatgagttacacagatttacaccttccattcatctta

SEQ ID NO: 6273 - DNA, 1520 bp, Arabidopsis thaliana landsberg
tgagttcatgatatgaatctcgtgacaaatgtacacaatccttttgttacactaaactttgaaatagtttaagcctaagatatgttattatatcgtaatcatgagataatcattacatctttttacaagaaaaagctccacgtctcctcttgtcgctggaagcttaatgagttcaataatatcctctcaaaaatagtataaagcatagttttttaaaatatcggaaaacacacagaaacacaattggattggattccttggagattatttttcagaaataaggttttgaaggaggataggagggaaatgtgtcggtccaaaaacaaagatagtgggatttttagattagattttgggtaaccaaataataattagtatatgattaaaataagtacacgtcaagttgcatgtagaagaagctgtcactcattaagcaaataaaaagccacaaatcagtgccgagttctttttctcatttcacacgcaatattgtttccaattcttcgccgtagctttctgatgctagcaaaattcattcacaaaacaataccaaagatgtgataaagacagaactatttttacacactttagtctgactagaatctgaactcaatctgaatagaggtttttggtagtttgtgtatgagttttgcaaagcctattaaaaaaaaagttgcgtacatgtacttgaatagcattcgtgctagaactagctttttattccccgttttagttattttaaagacagattattgtttatagtttcaagtatcagaatcttgaagcatcagaagcatggaattctaatatatcttctgtatctactaacacatccatatgtataatattgatatgttcgtgactggttttaactcaattgaacagtccagttcatgttatcttcgctcagacccatttgcaggctcgtcaaggaagtgtagagttgtttcgagactgttccaaagccatcttctccataagaaaacctatcaagatttttcggaaaagattcttagtgtaaactttgtgattcattagctttagttgttaactggtaaaaaaaaaggtcttgtacctttggcttttgtaagtgatgcttccaaccggagataaaacaacggcggttcctgtgcagaaaacctcgtctgcttctaccaattcatcaactgtcacatttcgttcctccacctgaaaatcagaattaaggactcttaaaccgaaattttgttaaacttacaaaaccatgaagtatttgcagtccgtaactcaagttcctcagttttctgacatacttgatcaagactgttgccaaaaatttgaagaagggaatttggattttaccttgaaaccttggctacgagctacttcgatgatactcttccgggtaattccaggcaagatggttccttttatttcaggagtagatatcacattatcctgcacaagaagagcccaatccaagtaaacaaagaattttgtttccagcaagaaactttagatgttccaacgaaaagatgatc

SEQ ID NO: 6274 - DNA, 1827 bp, Arabidopsis thaliana landsberg
  unsure (1)..(1827): unsure at all n locations
atttatatgatgatgtcaggaaggtgtggcactatcaatttgattgtgaagaatgaatttcaccgtgcaactcctggtggtacgggaggtgttaaaaccataggcaattatgctgcagtaagtaaaagcttatttcacttattgattatattggaccagctttcgtaactcacacatacaagttatttatttaggtactgaaggcacagtcaattgcgaaagctaaaggatattccgatgttttgtaccttgattgcatttacaaaagatatcttgaggaggtctcgtcttgcaatattttcatcgtgaaggtaaataaaaatcactnnnnnnnnnnnnnnnnnnnnnntgtagagtctataagatgtctctcttcataagacgtaggagatgatgagattgagactctggcaccatgtttttttgggggcattcttacaaacatatcaagatactgattctcttacataatgattttttaaccaacacttttctttgccaggacaatgtgatatctactcctgaaataaaaggaaccattttacccggtattacacgaaaaagtatgatagacgtggctcgaacacaagggtttcaggtgacctcttccccttctttaaattccgaacatctttaaagtggatcataagtactattattggcttctgatcacagtgcatgtttatacggtatcgttcaggtggaggaacggaatgtgacagtggatgaattgttagaagcagacgaggttttctgcacaggaaccgccgtggttgtctctcctgttggaagcgtcacttacaaaggcaaaaggtaaaacgttttttctttgtatcccaatttaagtgaaaaccaaacctaccaagtggtaaagttttcccctttttccgaatacacacacagagtgtcttacggagaaggtaccttcggaactgtgtcgaagcaactctacaccgttctgacaagcttgcagatgggtctgattgaagacaacatgaaatggactgtgaatcttagttaagccaggcgaatgcattgcatcaattcgctgcttggttttgctttcttttctttggtctgtggctctgattcgtgaaactatgagttggattgtttagaatctggttgatctagaacttagctggttcaagatcattagatgttgttgcatcataccaataatattatctttagatctctgtttctgattagatggttacatccaattatttctctaaagtctgagacatcattgatatctaacaatccacaactaaaaagtgaagtattaacattttaatcagattctaaccagaacttatcagtcatcaaaaatgtttggcaaaatcacaccccacttttagtttttggatggagaaagcaagctagattcgaatctctaaggagcgtggacttggacttgtttacgacctgaaaagaatgtcatgattatctcatgattacgagataataacatgtcttatctactaaactaatctaaaaaggtagtgaggatgacttgaaacttaagtcttatatgaattatctttaaatatagaaaaagaaaggagatagagaggtgtgtttttcatgtgaacaacttttttttacctttagagtacttccagaagacttattgggtccttaataaaagtagaccaaattattgaagagctaaaaaaaaatgcctacttaaaatatccaaacctttttttttatacctttgggtttttttaaaatttccacacctagtgaaaactaccatcattgtttcattctataatcatatgaattttttgtcaacaccatgcactatgctagtttaaa

SEQ ID NO: 6275 - DNA, 263 bp, Arabidopsis thaliana landsberg
tatcttttgtgagtcatgcatgtcaagttaagaaatttacctgactgcaagtatctatggaacttaaatgagtattcgtggttgtattccaaaaacgtatgcatctatcagcagtaccaccaccagaagcaagaagcccatgaacatgaggagaccaagcaatggctttaacagctgcagtgtgttcactatatttcaaaaccggttgtgttgaatgttggttccatacaaaaagctgtaaatatttataaccattttagcta

SEQ ID NO: 6276 - DNA, 415 bp, Arabidopsis thaliana landsberg
atctacacgattggcaaataatccagtgtgcggggaggtagggaacaagctgtgtttctgctcagcaatcaagcacagttcctcatttgctactctccaaacaatcacagatctatttaagaactttatttataatgtggactctgtggccgtcagaaacataagagaatacgcaacttgatgagggagaagaagctcaaatgtatgatactttcattcacaaaatgaaggatggacaaatggatgaaataaggctagacataagaaagagagctcaggacatccaaatattatcactagaaataatttattatgttgtaaatgtaaatcatgtttaaatatttatcatgcatgttgaaggttgttttcgggttttccttatgtgtgtggggtttgtttttcttgtttttatttt

SEQ ID NO: 6277 - DNA, 1917 bp, Arabidopsis thaliana landsberg
ctttttgaccatcaaagactttcttcaaagataaaatcaaacagtcaaagaatatctttcaatgattcaactccaagtcatatagccgtttggaacctaacgttttaaatctaatggcaaagtacgagagcaagaagaacgtgttagctttgtatatgcaattatgaaacaagacagaagaaatcttctcatttcatcaaaagaggttacattccaaagagtacattaatgacccaaacgaatgtacagaattatacggtaggaggatacaagacaaacacagcactgacacggttaaaaactaacaacagtagggggaaggaacaaagaatgagatatagagtaaaatacaaagtagatttctcatacctttttagcgcttaagctgccaaaaaagactactttctggtaagagatactcaagcttcttgtttgttgaagaccagaggaaattcatcgtaatgctcagaaacaccgtgtttatctgccatgttcttcaaagattcatacacctgaatcatcgttggcctttccttaggcctggacacaacacagctacatgcgattttcaggaactgcaatatctcctcatcgtgtcctttatcacatatgcttctatcaatagcgtctttgcttctaccagtacccaaatactgactcacccagtcaactaaactccctttaaacccttccacaccgttaataacagacaaaggcttttgccctgtaaccaattcaagaagcacaatcccaaacccatacacatctcctttcaaagacacaaccatggtgctcgaatactcaggcgctacataacctaattcccccaaatccccattattgaacgagctatcattcgaatcacgagatccaactagctttgccaatccgtaatctgttatccgagcatcaaaatcatcatcaagaagtataacattggagctaataaactgatgcaaatacggcggttggcatccatgatgcaaccaagctaaccctttagcagctcccacaccaatcgcacgccgagtcggccaatccaaaacagcatcacacaatccaccattgtgcaactgagaaaacaacgtaccattaaccatatgcttatacaccaacagtctctcatcttccacaacacaataccctaaaagcggcaccaaattcggatgtctaagctctcctaacttattcatctccgacctaaactgtttctcaccaaacccacaagcactaagcctcttcaccgcaagtgcagacccatccggtaaatccgctttatacgaaaccccagtcctcgacgaaacatctatattccctgaactaaaattgttcgtagcagccattaaatcacccaatttaatcttcacaataggtttctgaaacaaagtcacctgaacaagcttatgtgacctcaacaaaccaatccaatcactatcatccttagacttcccagcaccataacctttcttcttcctactaccttctctaataaagaaccaccaaaatatcactaaaccaacacacaaagatccaacagctccaagaactccagcaactataataatactcagatttctcccattcaaggctccacatctcgataaaggcttcccgcaaagtccgttattcccgctaaaatcgtctcctccgaaccgagccagctcagacggaatcgtaccggagagatcattcccagcgagtgaaagacgtctaagccgatctaatcgactcaactgagaaggaatcgaaccagaaagcttattatcactcagaatcaaagcgtttaagaacttacactcaacgatctgagtcggaatcgaaccaccaagcttattcccagatagatctaacgtaacgagataaggaagccacgaacagatttgagaaggaatcgaaccagagagatcgtctctaaag

SEQ ID NO: 6278 - DNA, 7878 bp, Arabidopsis thaliana landsberg
ctctgtttcaaaagttcaaaggctcaatactattttgttaacatgtctaggattcacttaatgcatcataactaagataaagagtgagcatcaaaaacaatttcaatcaaatcccatcacaaaattgaccactgaagaatcaaaaacagaggccacttagtcaaaaaaactctgaaactccataaacgaatcccactcttcagctttcactatcctttgttccttacacaaccaaaaagacattacaatggtgtttattagaagtaaagtttcaaaatccatggaagccattgattctatagaggtaccttgtaatactcctcgagtcctcgtcctcgaaatgaagatttgagcagatgggcttttggaggctggaatcaaaggaagcatcggatttgaggggttttcgaacattctcttggctatttcgagttgatttctcttccaagttgtgtcgtctccatttttgttgttacagtggccgagctttttgttttcacagcgattggtttacattggttttgaaaattcaaattgatctcggttcggtttacttttggtttagagaagaaaaccaaaagaaataagacacgcgatggatttttgagaatgaggtgcgtggatcaaaaaaggaatgatttttgtggattaacccctttaaaaatcgtagacacgcgctcaacgcgacatgggtgagagtggccgtaaaatcgagtcattgataaaagtggagtatgaagtggagctctctcattggctaaaaaaataaaaatagtagggaagctcctcctctcatatattgaaaacaataataaacacttacgaattttctgcgttttcagagtgaatttttattgatgtgcatagattttgtttcatattttgtgtacttgtagtttatcaacacttatgtatcattcgaaatgtataccaaccagtcaggggaaaccttcaagaagaagatcagaaccaaagtatcctctgcgatggaaccagttaggcttgtgtcaggttcacaaggagattatgatacttttggtgttgccgccatgtatagaatgaagacagtagtaacagtactgaagtttgagcttgacatatatacaatttgaataacacgcagattgacatgtattgcagagacgtgcgctagattgttgcaagtgaagcaaatcatgcacgtcttgttgtgatataggaactatttttcatagatggaaaatctttgttgtatatataatagactcattacaagctttagtggtatcatcctcatcacgtttgatctctcgcaaaactttgaattacagaaaaagaaaacaaaaaaaaagttgcatattaggggttaagaagacccataaaatgagagagaaagatcaaaatttataaagcaaagctctgttttgtagttcatcatcacagagttagcttctgtgaagtcgtcaaattcacctgcttcagatgtaaagctgccaacaagccctgccatgtgtctgctgatgtggcaccgccaacatgaaagtctagcagtttcctctgcttcctatagtattcttccacctgattgaatcaccaccacaagattttcagctgaaaccaccttgtaaactagatatataacaaagacattgatcagaaaagtacctcctgtgcgtagacaccgacactctccctccgagcattgattgcaacaggtgagtgtaacatagagccgaggaactcctgctgaggcagagctgtttcattgagagcattccggtttaccagatggtcttcagagcctttgagattgacgacaaggtcaatctgagcgatttgatcaagagtttcctgcaaaacattcagaacaacttgaagaatcactaaaacacaattcaattgaggatctctattaaatgttagtatgtaataagagcttcccacattaaaaaaaaaaaagactgttgtcagtaaatatatatgaaaagaaactaacggcttgaaaacgagtgcgaggaatgccatgaagaatgaaaccagtttcccctcttgcatagccttcttcgagcctctttgatagcaacgcaaacacaacactctttggaaccagctttcgttcatttacagcacttgcaatctataccaccagaaattttgattagttcaacaaccataaaccggaacaaatgttatgttctctctttacaagttcctttcattacctattaggctaagttatgtggattagtcaacaacattaaatgaatcattaaagcacacttggaatcaaactctataaacagcaagaattcccattaggtgatcataatctagacaactaactctaatcaaacatcttatgaatcaaaataatcaacactaacaactaagaacataaaaaggtaatgtatttaaacattttcaaagatggcttttctaaggagaaggtcttagggaatcaatgcaaatttagagagaagacaagagtagcacctccttgtagagagaagatctagggttgagttcttgacggacaagggaccccatggaaatgtgaggaacttcaagcagtttggagagcctctcggcgaagacgtgcctccatgctccaggggctcccataagcacccactgcactcctctatccggccccgatccatccaacccaagcctcggttccgcgaggcggcgatcatctccgtacaagtactcgtcatcggagtcgtagtcaaactccaacgcggccgctgatccaaaagatcgacgaatcgctgcgagccttgtcaccggcgaaactcctctcacgcggctaagccaggccatggtgaaggcgtggcggcggattcagagagaaagagagaaagagaatagccacagaaagagagagagcttaaagagaggggtttgaacggagacggagggccgaggtttatgggacagctgacactctctcttttctttctttcttttttaattgattgccactcctttactcacgaatccacgaaattgccactgcccacatgtccgcttcctatttgtcgctcagataattatttgagtgagaattgaatggacaacactgaaacacgtttaataaggcccaaacgtctcttagcccagacttggcccacctaattatattcaacgaccgaaattgtcaaccattgttaaccacccaaagaaataaataaaaagtaaagatacttattcacatgaagcctgacaagtttctttttatagaagactagtcaacgtcaacggaaacttcgtcgtcatataatattttagtaacgaaataacgatgaactttacttgttgttcataataaaaacagaaatagaaacttgtcaacatagaagccgcgggaacaaagcgtttcttcttttgtacgtagcgccgtaaacaaatcaacaagtccacaatccgcatgtgttaaaagtacggtcttatatttcaacgtttttcaaacgtctctccttcatcttctatatattttgccaaactgaacaagtaatagtcttcaaactataatcattttctcctatctctcgctcaagtcttcttcatcgatcttctatgaagagtgagaacgttaacaaacgtgatgagtatcaacgagtctttagctgctttgacaagagccaccaaggcaaggtatctgtttctacaatcgaaagatgcgtcgacgctattaagtctggcaaacgtgcagtagttgatcaagaagatactacaaatccaaatccagaggagtcgactgatgataaatcgttggagctcgaggacttcgtgaagttggtggaagaaggagaggaggcagacaaggagaaggatttgaaggaagctttcaagttgtatgaagagagtgaaggcatcacaccaaaaagtttgaagaggatgcttagtttgttgggtgagtccaaaagtctcaaggactgcgaggttatgatttcccaattcgatattaatagggatgggattatcaactttgatgagtttagggccatgatgcaataacatattcattagttacaaatatcatttttaatctattatactactcttctttaccaaaggcttgtatgaactctctgaaattaaggtactctctctatctattactgcctcatcttcttcatcttcatcgtcatccaccaatcttgaaaccctctctgcaatctcaaccgcgctcggccttgactcggcttcttctgcagtacaatctcttgcaatacttgcgatttcaaacgcagaatcaaccgaatagctctctcccaatgtgctgtccatcacttccctcagcttttccttgtccccgagaagccttcttaatctactccattcggaaacaaaagtttcttgtgtcccaagggatgttgtctctacttcttgcaatccaagcaacatatctggggtttgtccagacaaaacctccattacgattatcccgtaagcaaatatgtcagaagctggagacagtgaactctctataaggttctcttctgtggctaattcattggttacgcactttgacatcccaaagtttccgactttacctctgagatcttcgttcaagaagatgtttctgctcttgatgttgccgtggacgtagttgatccgatgcatatactttaacgcgatggcgacatcgtgacatatcttgatcctctgtttccatgccaagaaacagtaacaagactcgatgaattgattcttgatggccaatttgttctgaatccaatcccacagggacccattccttgcatactcgaaaaccagataagaatcttgatcgatttctctaaaacatgttccaagaaccctaatcacattgtggttatagtagtgtgactgatcattgagaagcccgaaatcgaatcttttcatttcatctgcattgacttgctttatagccaagtctttgcctttgagcgaaccgaaataaaccgaacctttgatgtgattgcttgaactgaaattctccgtggccttctctaactcttcaaacgcgtaaatctccagaacgggttttcggggcgttgtggtgccgacggtgttgtgagaatccaagatggaaccgtcctgcgacccttcaaacgagattttcttgtcactcgtggttcggatgctcagactcagctgccgcgtctcggggtctttgttgctaatccacttttgcgtttgcgtttgaatctgcgtctctttcttccagtgtaagtaaccaaacaccatgagagtgacaagaccgcaaactccagcaatcgcgctgctcacagcgatcatgagcttcatctttgaccgtttcttcttggatggatttcttttccgggatccttgtttctctggtttgtgatcaagagggatgagagcaggcttgagtggaaccacaccagatttgttgtttgcagagacaatggcatcctctgttgtgttaaacctaaccgccaggcttgaaacgctgtcgcggacgcccaccggatacgtaacgagaaaactagcgtttgaaacgccttcttgtggacaagagcacctgatcgccaaacgcagtttaatgttgtcgccaagcttgtcttcggaaatatgtggattcttctctctgatagatctgcagtgaatatagcagtactgaatcgataaacaaaaacaaatttcagtcatagacaacttaattggaaaaagtgtttggctctcacaggcaggtggtcaagccttgcagagactgagagacagagcgaaaggtgtctcctttaacgcaatttttaatgagactggcctcgtagatgcttccattacacctgcactctattgggatcaagagtaactgacctttcggaacatactcctcgtctgcgtcgagaccaagatggcgactcaggtccgagagggaatagaagggaggtttggctctgagaatggcgaaagtgtggcacttttggaggtttgagtggcaaacgtaaccgaaggaggaggcttcttcttcttcttcgacagggtcacagttgtgtgaagttgaagttggagagagagatgataaggagatgaagagcaagatcactacaagacttgtcatgtactgcttactaactgaaacagccatgtctgacttctagagctcctccattacaatctattgcatgtatttatatatattggcaaacatgaggaatcatggattgaaaagttttttttaatcattttattgaataaaatataaggtatgatttcctcttctcttcttaaaaatgtcttatgttaattgttaggtaaagtaaacatgtattaaacacacacatgactgccactttttttgtttggggataaagaaagttcaaggccttgtaccataatctctcttagtttgggaataaaaaattgataatatttgtctacacgtaaaccatcctttttccaacgtatattcgaacttgggaacaaagactcaacattccccattatatttaaacagtagattagatggttaaattaccataaaccatactattgttaatgatatatatttttttaaaaaaaaggaaaaaaaggggtcatcggagccgtggaggtttgtcgacaagagggggtggctatgaatcccgaagtaagactataattaaattataaaggacttcttcttgtgcttgggacctgttcttcgtaaactgaacaacattgacaaagtgcaaagtccaagctaagtgaatcgaaaatggtacaaactcactttgtcctaagaagattgtattgtttcggaacaagttttaggccgagttaggacccactttttagtttttgttgtggtatcatcttggagtcatggcctatgtatctttctctttatcataaacgatttgtatcgggtctcaacagcatgtgctatagtttatttgagtacggagatctagactctcagaattgactcacacctaaattttactaatttatatctacagtagcttgctaaagtaataaccacaagtccaaaacgtatccattttatcctagtctagtaatattggttgagagacctgataagtgaacattgtagttgataccaatttggacttttgacataatgacaacatactttggtaattattgtcttcggccaagatcattttaaaattgaatcaacgttttaggaaacgtgataagtatacttgaaaggctggctttaagcgaacaaatccaaaaaaaataccaaaaacttaagatccaatggctcggtcatgtaaaaatccaaaacatagtgtgtggagaatgatttgggaatttgatagtaggggaaaaacagaaaaacattatcaagaaactgaaaagacatgccatacaaagcaacgacaaggtgctaaaaggctaagtactcttaggtccatcttgcaataaatacctatgttgaccccgaaaataaaaacaagggaatcttaagagaggtaactacaaaattactacttaacactggaatgttcatgttgtatacttgtattcataattataaccattccaaaatgactgaacctaatacgtttattaaattactaattatacattgcacactactcttggtacccaactcctatgaaataatctgtgtggtgagggaattaataactcaaaatgacgttatacagttcttggaaccaagactaagtatcacgattcacgagatgattttaaaacataaaggaccagctttttaaccttgagagaaacgaagaggtaccatcttccgatgagaatacaacgccgtctcagcaccaccgccaccacgtgcagctttttttgaaaggaaaaaaaaaacaaaaactattaacaaaaagaagacttgtaaaaagcttttttggatgtataatatacctattctcatcttacatttagaaaatgggtactcactcaagt

SEQ ID NO: 6279 - DNA, 1181 bp, Arabidopsis thaliana landsberg
agaggttaacaagcaacaaccttttaaaaaaccaatctttcatggaattataaggattggtttgttgagttctttttttctttaaatatatatttttggggggtgtttggtcttcatggattatgaatactgtaattagatatatcaatcattttttaattaatttggtggtgtatgagaatgagagtacactaaataaaaagagagaacaaagtttttttcttccatggtaaggatttgttgttttggagtctttggcttttactatagggaaagtataattccactttgtgtatggtaagagcaagggaataattaaattacatccatcgtcacctttttcttagatgtctctgactgtagtattttgagagaatgtaatatttataatgtgatatattttggtagaacaaattatattcacgtggacgtggacatgggaaatgagttggttcaggctgtgtttgttgattattggaggacaaactcaaaacttagctgtctttgtgagaaatctcaagtcttaatactgaagttgtctgaattttgtttttccatagtactctcatgacgatgttctctcaattatttcaatttttgttcttcaaaacaaataaatttcacaaaaaaataaataaaggctttttgagtggttttataaactacataatttacctgtctcgaccgttattttccctcccaaacttcggagttgacttagagcaatgaaagccttgtttcgattcaagtcttgcttgtttgatccaacacgaaggaggaaccaactcgtttctttctcaggtttctcaaagtcatctaaatctaataaaacccgtgagactactaccacatcgaagatccaagcagaagctactgcaatcacttcactattcaacgagattactgagattttaggaacggatgttgtcaaactagatgagaccacgcggctcagatcccatgtgtcaggagctgtctctgataatggagtatcggtttcttgcacggaaggtgttcgtcaaaatgctgcaatgggattttcaggtgaggatgaaaaggctcagaaagttcttcatgaagaagttgacttcagccccgtggttcatgagattacgagtgtcgtcaggggagatgatgaattagtttcgatggaggacaggttagagaaactgagttttcgg

SEQ ID NO: 6280 - DNA, 674 bp, Arabidopsis thaliana landsberg
agtacctgcagagaaagagactcttatgaactagaaagagttattacttcaagacatgttgatgagtctttcagatcacaatttttgtatacgaaccttaaaagcaaaatttggttctctctttctaaaaaatctgtaacttgttatgtcatcaaacgctgacaagatatgttataacgctgataattatctataaacaatttgacttttgagaattggggtcttaatgaaaagttaccaaatcatttagaataatactactcgcttgtcagaagttgcttagtatagtagaaacgtgaggacaacagcactaccagcttccttaatcttcttttcatctgtattcgacacaagcttagccttgacaacaacaggtttattctccggcaagaaacctttccataaaaccttaaaatatccaaattgagtaacatcaatcatagacacatagtgtttcgttgcttagtccataacgtcctgaggaaccatcgaccaaagcttgtcaagattgacgatctggcagtaaaacttgttcctgagcttgtggaaatacctcataccaactttaacaaaatatccaggatgatacttgtcgaagaggatacggtgtgatgcataccaccggcgttaccacgacttccgggaagcttacggtgctttccaaaacgaccatg

SEQ ID NO: 6281 - DNA, 4211 bp, Arabidopsis thaliana landsberg
tacttttttgtgcacgacgatatatcgatctttgctagttatatgaaataaatgtttagcagtctctcaactaatcaaacaagccaacatgtattttcaataaaaaagattccatgaatccactctcaattttatagtttatttataaatttacgcgtacttcatgtgtgtgtgtttttaatgagttttcaacacatatatgcaacaacactataaagtttttattgtcaaacttcttaaacatacaacgacactataaactttttattgtcaaacatctagttttacaatatatcatccaaaatacatataaataatcacaatcataactatcttgatcttgtatgtgacaaatactaattaaggatgacataaattacataatcttgagcaaaagtttgttagaaatgagtaagtgaaaatcaaggatgcttcttcttctgggtatagatgtaatcagtatgagcgaccaaagtcctcctcattaagcaatcttcgtcgtctgcaccacagttttcttctaccatatgcatgtcatctaattttccttctatcttcttctcctgccaaagtaatcatcatacattacaaaaaatttattaaacctattcgatgtgttaaatattttaaaaaatttagaagctctgatattggttattttgtgtttatatatggaaattgattcatgcatggcatgtgaatcagactaaccatgttacatggatcggcagcagtcgtgatagagatggagatggccggttcggggcgggcagtgcacattagcgtggagcaaaggagaagagctatggtgagcaaagcggagacgtttgccatttttgtgatattttctttgaagggagagagatgcttaaagaagatgtgttgacgggtttggcttctttgaaactcaaatttatttatagccaaattttagtcaaatctatttttgttttgttcatttatttagttattatataacccaaaaagtggatcttatcgcacgttgataacctcgaattttctattttatttatgggtatctaattgtggagtttggtggactcattagtctcatttgaatgaccgattaaatcggaagttgaatttaattaaatatttgtttgcacttgtgcatagtgtttagcggtggaattggaccaaacccataagaaaagtaaatcaaaatataagtcgcagcgtgtatgaaacgtgggatgataaagtgataaatgataatcaccatccacttcttaaaagcattgattccatattaatatattcaaaagttctatggcgtcacctacctacattagcaaaatatcatttgacatgatatatgcaaatataaacactatagattccacacgaatgcaatggatctaccgttatatatggtgtagtcgacattgaatgtagttgatacaactgtcaatatggttagtggacgtccctacccgattagtgtgacatggtgttcttatcatccgtttggaacgcaccaaatttaaaagcgtgtattggagagtatattacaagtcggtgtgtgactaatcatatatataacccaaaccgtgtcaaataaatcggggaaaaaaaaaactgtaatcataaagaaatttatgtacaatttaatatcagacacagagactaactatacaagtattatacatttccaaagtttcggtgttgacgtatatatatagttcacgagactggtttagctttggtatacttgtataaactactactctatgttcgctaggacatagccatgcatgtctcgttgcttctataaattaatgcaccaaacttcataaaaataaaataaaataagaaattattgattggtttgtgagttaacttgttggattggttcgcgagttaagaatagaagagagtggcaaaatcatatatatgaaagttggcaaatattctccatatgagtgacactatcatcacataaaaaaatgacatggatcattctacattaattaaattaaaaaactagtaaaactaattgagaaaaaatcaaaagtcttttgttgtgttaaattctctattaatctcactcttaaaatattttttttaaacattcaataaataaaaaatcataataatatatcaagttctactttcattctattttacttattttttaattttttatcaatagttattaatccataatgactaaaaatttacgtgtgttgtagtttagatgtttgctatctaacctcatattagtttagtaattttagttggatattttcttattataacgttatgcgaatatgatttatcatatgattttctttctgtttatttttgtgcggtctgataactataataacattgatatacaattttttcacgtaatggtcatccgagacattagacatacccacacagaaacacgagactctatatggctatatgaaagggaagagaattaaagtgttgacttaatttactagcatatcatgatgtggttggtgtagtagatgacaaaagaatatatggaataaaaaattgtttgttacaattaagttaggcaagtttcaaaacacataagtaatataactacatattaatatatcatataatgttgttgtgtgtgttcatgatagtgaaatatttgaataataggtatataaatatttatattataataaaagtgatatttcgaattatagataaatttaatcatagaaaattataactatataaaatagatatgaatttattaattacacattaacatacacacacgaatgacatcaaaatcaacaaaagactatcctcatatattccgacaattttaaaaacaaaaacccatgcgtagcatgagtgttcatttagaataacgaattaactaataataacaaatacgcaggtaattttataaacattgtatatataaagatcataagtttatatattatctatatgtggtgtaatcatatgtataaaagttggtcaactctcttcatataaatgacacatcatcacttagtttttgcctaatgtccacttaataattaatgtaagttaatggtttatggtgatttattatttaattgtatatattataaaattttacataattaattgtatcaagaataattttcttttattttgtatatctttttcttaaattaaattatttaattgattttctcatactcttggatatttttccctaatttttataattttaagtcaaaatatgattaaataattgtatagtgaattagctcatagtttttgtagtttgttctttttctatataatatatgaaaaatggtgagaagtacttgagaattctatcatcaaattcttggactcaaatcctctaccattttgtcttattgttttggtttaaggttaacacagatgaaaaaaaattctgaaaaccatgtttcctgagaaaagattttgtaaggaatataaatgcaaaatgcaaaaaaaaatattgatttatggagcttagtatcaaataggatttttgtcttcttgcctattaaaaaactaacctaaaatcttacatttaaatacttttaaattacgaaatataaagcgaaagcccgcacgtagtgcgggtactcatctagtgtatatatgaagaagctaggtctctcggctctcgctaggggtttctaggtttataacgtatcaacaaacaaggattcattatctccgactcccaaatcaaatgatctcatcatggagatattgtcgagattacctttaaagtcattagcgaggtttcattgtgtgtcgaagctatgggcatcaatgtttggtagtccatatttcaagaacttgttcttgaccaggtcatcggctaagccgcgcctcttattcgccttagttgagaaaggcgacgttaaagagtaatcatgtggtgtgtggagctttttcttgtcgcttcagcttgagaatttatatgaggaatcgtcgtccactcttgtagcagctgccgaatttcatggaaaattctctccaaacaatcattatgttaacctaaaaaaaagtcacgtggctacgcctctggtttagtttatttccatggtagttaataccagggtggacttctgatatgtaaccccatcacaagacatcatgcagttttaccgaagctctatagttatagactggcatatagctttttcggattcgaaggggacgtgtcatggttgctgtttacaacc

SEQ ID NO: 6282 - DNA, 1413 bp, Arabidopsis thaliana landsberg
aatgagattaaggtcgagatgagaacatcatcatgcttctctagcctctccaaagtctttataggacattgtgattgtctaaaggagttgacatggctattgtttgctccaaaccttacttatctcgacgctcgtttcgcagagcaacttgaggatataatcagtgaagaaaaagctgcaagtgttacggacgagaatgcaagtattatcattccttttcaaaaactagaatgtcttagcttatctgatttacctaagctaaagagcatctactggtcaccattgtcttttccacgtctgagtgagcttgcagtgcaagaacattgtccaaagctgaaaaagcttccattgaactccaatagtggaactgcaggtgtagaacttgtcgtaaaatacggcgaaaacaaatggttggaaggtgttgaatgggaagacaaagccactgaactacggtttttggctacctgcaaatcgttgtatcgatgaacttctgtttcttcaacttttctctcgtatctttgtaaagttttggagtgttcattggctaatttggcttttacgtatatgaccaagtttattctgttacactgtctacactataatatccttcattgttgataaatgttttctttactccaatgtaatgccaaggttaagaacaccatttagcagcagaatgggtcagtttacagaattggtatcgctgggatttgtttctgcgactcacatggaactcggcaaattgattactctaaaactaaaacattcacaacaaaccaccactactttgttcagcaattacgttattagacacaagtttcatcatcttcttcttaacaactttctcgaactcaattcccgacagcgataaaacctggttcaacagcagtctcactccacttctctgaaccagctcatatctcggcttgatcctctcttgtaaactgtacccaaaaaactgagggaacttcacaagctcggatttcggatagtccattgtctgaaagtaatcccatttcggcatgacattctctttcaagctgaatgtgtacaaagctccatatctagagatcatgattccaatttcatctaaaccaaaacccttttcgaggaagaactctgttactggcttcaaattcgactctatgcttaatccaaacgtttggggacatcgatgtaggagaaccgcaacatcgacatttagcgatctaaagtactccatagttggacggagcttgtcttctacactgtaactcatgatgtctggacatcgggttaggattctccctatctgttcttctgtgagaccagtttgtgataagaactccacagttgaagtaagtttctggcggctgtaagcgaggatggctgggaaacgggaaatgatctttgcccattggttcttggcaaagc

SEQ ID NO: 6283 - DNA, 1516 bp, Arabidopsis thaliana landsberg
aagttcatttttgtccatttgacagcatttccgcttttctttacgatggatcaaaggagaaaagaactgaaataagagcaagaatagcaggaggaaaatttaatgtgttgataacccactacgatcttatcatgagagataaagcatttttgaagaaaattgactggaactacatgattgttgatgaaggacatcgtctgaagaaccatgaatgtgctctcgcaaagactctaggaactgggtatgtttctgtatgttactctggtctttgagtagactgtatctagtttcttaaagatgtttagacatgcctttttacgcattagcttgatgaagtctgaagtgaatggtgttaattagttgttactctgatttatctcttaaagatactgtcacaaaggaaatttaaagacattttgcttacactaatttgtcctggatgcagctaccggattaagcgcagacttctattaactggaactcccatacagaacagtctgcaagaactatggtcgctgcttaattttcttcttcctcacatctttaactcaattcataatttcgaagaatggtttaatactccattcgcagaatgtggtagtgccagtcttacagatgaagaggagctgttgattattaaccgtctgcatcatgtgggtttattatgcacctttttttggtttagaccctttttcttttatagaaaatgcgttatgcatgatacttgatgttaatgtcactttcaggtcataaggccgtttctactgagaaggaaaaaaagtgaggttgagaaattccttcctggaaagacacaagtcatactgaagtgtgatatgtcggcttggcaaaaattgtattacaaacaagttacagacgtaggcagggtcggtcttcattctggtttgtagctaaacttgaacttccattctctccaaaatgctttcatctttcggtaaagaacataagtcaggaagttaaattgctaatggagtccttatgtgcaggcaatgggaaatcaaagagtctgcagaatctgacaatgcaattaagaaagtgttgtaaccatccgtacctattcgttggagcagattataacatgtgtaagaagcctgagattgtgagagcttcaggaaaattcgagttacttgatcgcctccttccaaaactgaagaaagctggacatagaattctgctcttttatcaaatgactcgtctcattgaccttctcgaaatttacttgtcactcaatgactacatgtacctcagacttgacggtagcacaaagacagaccaaagagggattttactgaagcaattcaacgaaccggactctccctactttatgtttcttctgagcacacgtgctggtggtcttggtttgaacttacaaactgcagacactataagtatatttgacagtgattggaatccacccatggaccagcaagcagaggatcgtgctcatcaaataggacagaaaaaggaagtgagagtttttgttttggttagcagtggt

SEQ ID NO: 6284 - DNA, 874 bp, Arabidopsis thaliana landsberg
ccttttgaactatggctcatatatcttagcagtacaactagacatgtgtataaatatatcactagattctgctttgttggaactcatttagatggatttaatagaattgaaatgaaaagtgtacacaatttctagttgttatgacatgattttattttatagctttcaatcttcgtgattggcattgctgatgtgttaaaagtctttgttcagaggttatcacgtttagaagaagaggagaagaatctgattgaaactgccaagaggaaattctttgcagaagtacttaatgcagtacgtgaattccagttgcaaattcaggcgactcaaaaacgccgtaggcaaaggaatgatggtgtgcaggtatgatagagtttacttacgcggttattgtgatagtagttccagttatcttttaatattaccaatcaatatacaaacatctaaaatttattttgtgtgtacattattcgaacaggcttggcatgggagacaaagacaacgcgctacccgtgctgaaaagttgaggctcatggcccttaagtccgatgatcaagaggcatacatgaaactagtaaaggagagtaaaaatgaaagactaaccactcttttagaggagacaaacaaactccttgctaatttgggagctgctgttcaacgtcagaaagatgctaaacttccggaaggcattgatctacttaaagactcagaatctgacttgtctgaacttgatgctccaagaagtgaaccattgcaggatctgcttcctgatcaggatatagatattactgagtctgacaataacgatgacaataatgatttactagaaggacagaggcagtataactcggctatccattcgatgcaagagaag

SEQ ID NO: 6285 - DNA, 1013 bp, Arabidopsis thaliana landsberg
tgttgatatacatcacaaaaaccacatcaagagattaccatatcgatatagaaagcagaagccctcatattgttctttcggacagacataccagtggaagttgtgttgaaaagtccagcttgtatgactttggcgtcaatgcccatcttttgctttgcacgctccaatattacttcttcaacagagccaacgctaaccaaaacaaacactctgacttccttcttctgccctatgcgatgagctcgatcctcggcctgttggtccatttgtgggttccaatcactgtcaaagataataacagtgtctgcagtttgcaagttcaaaccgagacctccagcacgcgtgctcaaaagaaacataaagtagggagaatctggctcgttgaattgcttcagtaaaagccctctttgatctgtctttgtggtaccatcgagtctaaggtatttgtaatcattaagtgtcaagtatatctcaagaacgtcaatgagacgggtcatttgggagaagagaagaatcctatgtccagccttgcgcagttttggaaggagacgatcaaggagttcaaatttccctgaagctctcacaatctcaggtttcttccacatattgtagtctcctccaacaaatagataaggatggttacaacactttcttaattgcatcgttagattttgcagactctttgatttcccagatcctgcacatggtgattacgtttgcataaaatcagctcctctttctgattcattttctcttacctcaaagatgagtgcaacattagggagagagtatacgtgagttaagctacaaacctgtttgaaggccaaccctgcccatgtctgtaacttgtttgtaatacactttctgccacgccgacatatcacacttcaatatgacctgtgtcttttcaggaaggaatttctctacttcgtcctttttccttttgagtataaacggccttataacctgaaagtgacagagtgaattacattaaaacagtgcatacaaatttt

SEQ ID NO: 6286 - DNA, 5014 bp, Arabidopsis thaliana landsberg
gaaactttgcacaacgttatagatatgtagttagattcttactatctttttatagaagtcggtttcagtcttcttgccattccaggtaccacgttgcctcccttctttctattatatacatcagataatcagtcaagtgggaaaatcccttgagtgcaaaaaaccaagaagctggtgaagaacctgtagcaaattcataatctccattccagatcttgattctttctttttctccattaacacttgattcagccgttcctacaagagaaacaaagcgttcaaaatgcagaattaaacaggatgcagaaaagctagtttcacgagaaaaagatacacaacctgcaacttaatgtaatccttctcctttttcttcatttcgtgtatctgttgagccttcacttgctattcagaaataaaagaagaaatgcagagaatccatcatcagtacaatttcctctaagataaagtagttaatccaagagcaaacacaatcagacctggttaccaatcaccatcctttggaattcatccctctcctgctgtaacttttcaatctgagacttcaaagctgcagtatttttggcttcctgtcaacacattgaattcataatcaaacaagagcctaagcgaaaacaatttcagctgaaactttataggactcacggttctggtaattgttgcaatttctctgtccttctgttggagtagcgcttcaagcctctcaactttagcttcaagtctagctatatccgattgctgtctacacacagtaagggaaatgcacataaaccacaaggaaacattcttccgcaaaatcaaagtagataaaactgctacaatctccagaccaatactaatcctcaaagaacaatttcaataatcacaatgaaatgcaaagcaaaattcaagaaggaagaaaaacaaaattcacctctgtctcagctcattagcagattctctaaactctatatcacgctgtcgttgctggagtaacgagtacatacaattgcaggtccttgatatagaaacctaaatcaaacaaaacccctaattaaaaccccaaaatatccaaacaatttcagaatcaataattaaaacctacaggatcattcgaaaagagatcgagtgaggcgggaaatccaaatgtaaccatcgtctgattcaaatacttcgtacaatgctccaagttatcctcattcgcaaatgtgtaatcccttctcaatcaaaaaacaaaaaattccaatcagtactcattggagattttaaagtaaaccctagggggattaaggagaaaactaaccctgccgacgcagattgagataaaacctgtgaagaagaaaccatagaatcagtcaagggagcttgaaattgaaattcgatgaggagaacaaatcggaaaacagtaatcttactttgagatcgtattcagcatcattcgccggcattttcgaaacgacgatgagagcttcctccttcggcgaaaacgggggcgtgagcaaacgatgaaacagagaatcaattcacaggaacagatctaatctaagcagagagagagagagagagagcgaaaacaaattcaaaaattaaaaatatctgaaacggaatgtttctggagaagagcgaaaataaaagtttttaaaaccttgttcactttgctttttatttcaggaataataatcaaaaggatttgtttttgtgataatgagctttaaggaaatgatcctgtgaagagacacctactggcttcagtgctcctccacgtgattttgacgcgccaactgtttaggctttaagagaaggaagaatgtgggcccgtactgttttaattgggcctattaaggctttattgagctgatgtgtaaggcctgtttagacttgtgctaatgttggatgagcatgacaaaatgattatcattgtttggttagaaacagaccaaaacagcgggtaagtgtttgattgttatttaaattttgattattatcggggagtggaataagcaaacattaacgtatgtctgtagaatcgaaaaaaaacaaaaatcgagacaaattaattagatgattaaatataacatgtagacgtagtaatgtgttaaactatagtcctaaattgagatctatgaaaccgaggtaagttttaaatatttccatgtcggatcttcgagtcttctaattcgaatcccgagttgaaatttaaatgtatagagtaaattattgtttgcttcaaacttaagaaaatatgcttcttgtgcttcgttttatgtcttcttgggtttgctttagcttattcacctattgcttgttggatccaccgttaatttttcatttaatagtccatatgaaaatcaacattttagcataaaattacaattttaggcacagttatttgactcatacatgatttacctatacatttggtcagtcaacttaattatttgcgattttaaaatcgcgtataatgttttaaaatgacttgaattggaatcaactaattttaggtagctcgaacaaacttgttatttatttatttttagataagttccgtacaccaaaatctataaccgaaaagactttggattgtattgtatgagtttagagtgcaattcttcttttttccctcttttttgatctaagaaatttctaattaagttcacatcttttcttggatctaatcactctaaacaactcctcccaaataacatgagttttcattattattagaggggtgatgtctacattttggaccaaggtctaatactttgttttactttcgtcaaaccgagttaaatccgagaagtatgagatcaaacgttaaacgtattcatgtgtgtgtatgtgatattacatggataaatggctatgcatgtatattctatatgacgttgatgtgtggtcgtgtggatatatgcgtgtgtttactgtttagctcaatttttatattcttagtatgtatgcttgatgtgtgtaattagtgtatgaaaagaaaatgacgtggaactcccgaccaggcgcgagtcaaggaagcgaggcgttcggcgacggcagcgcggtcgtctccgcagcccatgcgttacaatttacaagatctctttttctatgataccttctttcattatttaattaatcaccaatttataatgtctttaattaatttggagttttctagctaattcacatttcttattatattgactctttttcactgtttttatgttttcccatcagctttcttcttgtccacgtaaacatttccaaacatttttattttaaaatttctttatacttgtatacataaatacctaataccttgctggtaatatatggtcaaaattagtgaaaccttggaacatttcctgtaacagctcttattactctcacagtcgcagtgatagatatatagtagaataagttagcaaaatacaataattgtaaaaacacatttaatacataagcatgtgagaacatttttacgtgaatccaattgttcattgaataattaaatattaaattgattgttaattgaggattcattgtctaacgagaaatccaaagagcagatgtactttcaaattaaatgaaacatttaagacaacattaaaccaaacgaaaattgaaaaatgaaaaataaaagacacctttttgtttgccacacaatttacgctttctctatctatttatatgtacatacattcactttcaccagaatctcatcaaacacacagtctctctctagcttaacaaaaaaacacgaaacactttgagttccatgtaagcgtccgttgtcttctctaagttacaaaagccctaaaaccctactctcaatatgaatagtttcgagccacaaagccaagactctttgcaaagaaggtttcatcaagacaacagcaccacacaacaacctcgtgacaccacgacacctttcatacccaaaccggcttccaaaaaccataataatagcaactccagctctggagcggccgggagatcattccaaggctttgggcttaacgtagaggacgatcttgtttcatcggtggttcctccggttacggttgtgctagagggacgttctatatgtcaacgcataagcctagacaagcatgggagttatcagagcttggcttcggctctaaggcaaatgtttgtcgatggagctgattcaacggacgatcttgatctgtcaaacgccattcctggccatcttattgcttatgaagacatggagaacgatctccttcttgccggagatcttacttggaagtaattttcctcccctaacattaattttctttattattgtcaggatggccatatatatacaaactatatataaaacgagccttattttaaacataggaaaactatattaattttttttcccctaacggtaaaatactacaaacacaagtttttcaagctgccaagaaaacacatgttctctgcttttctaaaaagacaaatatcaataatttagtgaaatgatattttgttgccatccttattctgtatactcaattttgctggctatagttattttatttgataccgttatatatctttcttaaaaattacggttttcgttcaatgtttagtataattagattttgaaggtttcgtgatctttaactggcaatattttaatacttggacgttaacgagaaaatttgcttgttgacacagggactttgttcgtgtagcgaagagaattcgaatcttgccggtcaagggaaacacaagacaagttaaaagaaacgagtgaggaggagaaagaccgtttttgcaacgatgtcatacgatgttttgtaacagccgatgtcggttgaatcctaatggcattactgtaaaatcatcattggatgtgtttgcttctttgttcacgtacgaaatgaaaaaaaaaaaacaagttgtaatactaaatatcacctatttttcttaattatagtgtaaaacatgaaacgttgcagtaacaacacatgttagtgatgcgtaaagaagagagatgtgcaatccataa

SEQ ID NO: 6287 - DNA, 749 bp, Arabidopsis thaliana landsberg
  unsure (1)..(749): unsure at all n locations
actttggtctgtaaatgcaaaacgttgttaagaaaaaacctttatggaagccatcttagtacgtaaactttcttctatttgacctctagccatccggtaaggtaaatcaaacacgtcctgtgtaatgactagttagtaagatacgggggcaatccattatataagattataagcaagagccattcagtgatctaagcttatgcttaccgtcttcccacccagtggagattgtgaaggatcaacctcacgtttctcacttccagccaatgaaggattagctgacccatttggagcatttaagaaatcacgcatatcggtctgcaacaaaccaaagatagaaacttttcttatgaattgaccgtgttaagtagcttaagttaagcttagtatgaaaaaagagcgtacctgcatggatcgaagtaatgctcttagactagtgttctcagccatcaattcttgatttttcgcttcgtacgcatccacctgcagggaggacattagtaagtaatgccctnnnnnnnnnnnnnnnnnnnnnnnnnnnntgatatgtagttagattcttactatctttttatagaagtcggtatcagtcttcttgccattccaggtaccacgttgcctcccttctttctattatatacatcagataatcagtcaagtgggaaaatcccttgagtgcaaaagaccaagaagctggtaaagaacctgtagcacattcataatcttcatttcagatcttgattctttct

SEQ ID NO: 6288 - DNA, 3561 bp, Arabidopsis thaliana landsberg
gattaaaaagctactaatttcatacaaccctatgatattaaccaacaagcagctcataacatgtacacaaagagtgaaatcttaccatttgtgaaggcgtctgtggaggttaatggtgtactctctggtaatcacttcctctttccttccctttttctcagacatcttctctttctctgtgacttacttcttcaaactctttacctgcgattacccattacaaaaaaccacttcaaaatcgattcttttcaccggaaatcaaacagatctgttcaaagctaggtcaaggacacagaattgagctagattgagaaagagagagagtagtacctttcgattgaagaacgccgagagacagaaaggggacgaaggaagagaactaagcatatatatgcggcactttgagttaaccctaaaataaataaatgattgggctttaatgggcctattttttgtgctattatgcttggcatttccctcttacgctttcttattttaatagcccatttacggcccaaatacatatgaagtaaatgttttactcgaatttaaactgattggttcgattaattaatcacccatgttaaccaacaaaaataaaagtttgaggatctttatttggctacattttttttatagattccttgtttttgttgcatgacttagattttttgtaagacgaagttttgttaagtatcaggttatgtcctcttagaagcttttcatagattccttatgtcttcttgattatttttttggttttataaattgaactttggaatgcatgacattcattcgttgctttattatcttttttacttggaaaacaatggagttcgttggagaagaaattaattatacttttgtgattcagaaagttttggttctactgttttgtgttggtttgtcatggaaaatgataatatacatgtgtaatttgttaaacattgagaaagatcctataagggttttgattaccggtgcagcaggtaagaactcaaacaaaagacgatccggtttatgttttgatttataattctatcaatttatttggtttggttcagtgtttttttattggagtcttttatctactactccctacctttatggtcgtttgttcttaatttaattgagaactttctattgaacaggaaacataggatatgcaattgctccaatgattgcaagaggtattatgctaggtccagatcaacccatgattctgcatttacttgatatagagccagcttcaagttcactagaagctgtgaaaatggagcttcaagattcagctttccctcttctcaaaggcgttatcgcgacaacaaatgttgttgaagcatgtaaagatgtgaatatcgtgataatgatcggcggattcccaaggatagcaggcatggaaagaaaagatgtgatgtcgaaaaatgttgtgatatataaagctcaagcttcggctttagagcgttatgcatcagatgattgcaaggttcttgttgtagcaaaccctgcaaacactaatgctctgatcttaaaagagtttgcgccatcaatcccggaagaaaatatcacttgcctgacacgactcgaccataatcgagctctagctcagcttgcagataagctaagtgttcccgtgagcagtgtaaagaacgtgatcgtttggggtaaccattcttcaactcaatatcccgacaccaatcacgcaacagtctctacaaaaactggagacagaccgttaaaagaactagtcacagatcacaactggctgaagaacgagtttatcgtggaagttcagcaacgcggtgcagctgttttaagagcacggaaacagtcgagtgctttttccgctgctggtgcagcttgtgaccatatccgtgattggtttcttggaacccctaaaggaacttgggtttctatgggtgtttgttctgacggctcatatggtataccacctggtttggtttactcgtttccggttatctgtgagaaaggcagttggaagatcgtacaaggactcagtatagacgagttttcgagggagaaaatggatgactctgcacgagagctagctgaagagaaggatttagcttattcctgtctcaatgtatagaccaaaagttgaaaactatgatagtcatggcacaaacaatgtagcaaacaaataagtttgtgtttctatattcatgaaaaaataatgggaacttacataataaacgctgaggttcacagatacatttaaaaactctgaaatcttggggttaaataatcagaaaattgaaagaaagagagttcatacttctacttgcgagagtatctccagatgccaaaaacaacaacacccaatcccgcaatgccagccaaaatctagtaaccaaagagacaaattcatatcttagtgattgcaatgttacatttacggagacaagacaaagaacagatgaacactgaccttggtatcacggatataagggccctcggatcgtgaactaaagatagatgaaagaaatccaaaacgagatctctgcggcatgagaataacagcagtgtactgtttcttgcacgggtgaggaaggattcgctgtaatgcagcttgtgctgtttgtggtgcaagtgactctctcattcgcaaacgcccttcttctaaaatctaaaaaccacagagaagtttcttcccttttcgtaagactgtgtttataaaaaatgatcaaagtattgacaaaaaatgttttctaaactgaccttgcaagaggcgcccaaatcgccagcgtaaacccttgattgatatccacgtatgatcctgtctaaccagtaatagttttcctgacaagaacaaaattaaatcagttttgtttctgcagcaaattatggttttttggctgtgatggatttgtgatgattatggcaataaaaaatacctgcatgccattttcgtgagctctttgttcgatttcaaggatagctgaaatgtcttcctgcgaagggccttccttttgaagccgtacaatttcttctaaagctaaatcaacctgaaggacacagaggtggctttggtgaccaacaggcagccaaagatatagagaaacccgtcagatagtgttagaagatggacataccagtttagaggagatttctggatcacatgaaaaattaacactgatgtcaccacgtaaatccgcagttctagaaggtttattcccgccaagaaacacagagacttcagcagaataaatctgtttaataggaaagtaaggtcattaaaggtttggtatgatcatcatagaaactgacacaaagagcagaatatacctgcccgtgctcgaacctgagaaactggattatcttggtctctaggagtttgcctaaaaagccgatacagtggatttcttcgatctatcataagtttaatggtatgaagcaaattcatttagacatcttcgtagtaatgaaaagaagaaaatatcattagtctgtaagttatggttcagatgatgaagcagagtcacttaccattgttccatttgttaactggacaagaaagcataactggactgaacactgggc

SEQ ID NO: 6289 - DNA, 3863 bp, Arabidopsis thaliana landsberg
gcgtaaggaggagatctgatctgatccacacacgtctcacgagtgtagtaggctcgacgtgctcaaactcaaagtgtgataacgtattttttaagcttaaaagaagtcatcattattgttatctgtctcaatagaaataaacgccacgagatccacgagtcgcatttcttttattttgccaaaagtcaaaaatatgtttccatatcttcggaaattaagaagaattcccaaatatactttttttaatcactaattttttatagagtagctgtctacgaatgttctatccaacacattcgaacacgtgattgttcgttaattttcttgattctgtaagagatgaaaaaactatagatgtccaactttttttttcgggtgggaagatagacgtccagcttagctacgtactgactaattcaaagttccaaactagtatatattaatacaattgacgataaggtcataaggatcgatggattccaacgattcgatacaagtattaatgaaataagataacacgattgtgacagcaaactctatattgatatttctatttttaattagccatgcgttgcacgatcaatttacaaaataataaaagaaaatgatcgatcaaagagcattccatcgaaatttaattccatcctgtaaccacataattttgggcccaatcctatttttaaaatcggatattaaaattttgttaaatccaatataaaaagtaagaagataaataataattcagccatgatttttatttggaatatctaattttccaaaatttgtgatcattctaagttctaacaataattggagacaagacagttgattgaggatatagtgtctgtatcaactatcaagccatattagccatctaagttacagttttttatgtcatcaatccagataaagaaatagatcattcgccaaattaattttacagaagcgcaccaaagtggcaaaaacgtatgttaggtgttcaaaatttggcgtcattggcgtcattgagcgacaaatactgagagataatatttcgaacttttacgatacttgatttgttaatttaaaacaataaatggagcatcgtacaaatagatactgagacaatatactgtataacacttgacaaaattattcaaataattaatgatttataggtgaacccaaaaaaaaaaacgttattattataacgatagtggactagaacatggaatctcaaattttatggatgtcgaaaatttgtatcaacgccatagcttgttatatgatcatataatttattaatagattttatatagtataataactctaatttatatactaaaatcaattctaataaggtacgataaaaattttatatcgatttctattgatataacaactgattggaccgcaaaaataaatattaaattatggacagaaatctacaaattcaaacaaacattacggtttgttaaatgttaacattgatgattataagcttgatatgaagaatttaatatagaagtatataacatgctattacatagtcacatagaagttcttttgtctatttgcaattttgatattttcctttctcaaaaagatcagtatatggcaaattatcttttagataaaagatcttttgtactcgctatatattaatgtattattattatctgaaatttcattcaaaaaaacttcatttgcaaatataaaatagtgaaaaataaaaaaagataccataatctaaaatctgacaaaagaaagtatacaaaaagtcaattacgatacttcgaaaaaactatacatttttgggtagggaagtttgaaaaaaaagcaattaccgatttgctgactatatgagcaattattacatacttttatttatttgttcaacaattattatacatacttgtgtggaccaacatgattaattttatattggccatatggtgcgtagtaaatgttataataacttgaaattaaataataactaagctcgactcgatatatagatccaaccagtagcctctcttattcacacctaatcttcatcttcatcttcgcattcatagtctctacgatcaggtaatccccctctctctatctatctttcatatatgtgtgtatgtgtaaactatctatattctgaaaatagatcaatcaattgatcttttcctatctcattatttttcacaaccatcagtttgacttttgatcgtttaaggctcgagagaattatcattcactgtagtaaagatagtttataccaacaaacccatttggtgttgaccagctttcaacataagtatgagttagagctagaaccggattagtattaatgttacttgtacctgttcatagtactaaccaaaaatgatccaaaaaaatgaaaataacaaataaaccatttatggttatcacagatagataaaagaagtcaacaacgatgtcttgggacgatggatcacacgcaaaggtgaagaaagtgcagctaaccttcgatgagatcatctactcaatccaggtcacgtacgacggagctaccgctcttcaatcccagcttcgcggctccgttggtcccaaatctgctgaggtttgtggaaaaaaaaaactacgatcactttttttacagttataatgtgtaattctttttgttaaagttaattaactttaatgtcatatatgtacatacataatcagttcactttggctccggacgagtacataacggccctttctgcttacggcaaatcgttgagtacgcaagaagttattacggcgttgactttcacaaccaacaagacttcttatggaccttacggtaccaaatccggtttccagatttctgctccggaggccaccggtaaacagatctccggtttccttggtaccagcggcaatgttatcaacaccatcgacgttcactattctcccatacctactggaggaactggcaccggaggaactggcaccggaactggcaccggaactggcactggaactggcactggcaccggaactggcactggaactggcaccggaggaactggcactggaactggcaccgaaggaactggcactggaactggtaccggaggaaccggcactgggaccggcactggaactggcactggaaccggcaccggaggaactggaactggcactggaaccggtactggaggaactggtaccggaggaacgggtacaggaggaactggtaccggttcaggtgctcagaagttggaagcacaaggcaacaatgcaggaggtacatcatgggacgatggatccgattacgatggcgtaaccaagatatacgcaagctccggtagagatggtatccaatacgtcaagttcgactatgtgaaaggtggagtaacaaaacaaggagttctacacggtagacaagctagaggaaatcacaagaggtaagcttacaacattctttcaaggtttcgaactatttatacaaagattactgacactgtgaacctattttgttttggggcagtttgtgattaaccatccagatgagtatcttgtatccgttgagggttggtatgaaaccgtcatgctaggaatccagttcaaaaccaacttgaacacttatgagatcaaaatgtatgatttcactcctagtactgatactaaatttactcttcaagttcaagacaagaagatcattggatttcacggtttcgccggcgagtatctcaattccattggagcttatttcgttccaaaatcctccaccactcctgttccttcaacccctttgaagctgaccgcagaaggtggtgagaccaggaactgtatgggacgatgggctcgcacgatgctgttaaaaaagccctatgtaggacaaggccaagatggtg

SEQ ID NO: 6290 - DNA, 3071 bp, Arabidopsis thaliana landsberg
ttactgattttcgatgatactaaaatcgctctcaaaaattgcttaatgattgtaaatcggtcacagaaaaaaaaaactaaaaatagattaatgttggcaagcattttaattattgcagacaacatacacatgagaattacatttccaggtatatcaatggttaatttttttttaatttccaacctggttttgataggaatctgtttggtaccaaacagatttaccgaacataactgcctaatgtaattaaaaaaagagagagagcgagggagagagagaaagtaaaagctcttactttggccacaagatagtccggatctctctctcagcttcacaattttccccaagtttatcggtccaatctaatcctcaaacctcaaccaaaaagctaacgagcaaacgcgcgtgatactcttttccagaaatggggaagagaccgccgattccaccagatatcgaaaacggaccaccaccaccagcgcgaccacattttcgcccgcccattcccgtgccatgggttgcgtggcttgtgcctctcattttagcagccaacttcgtcacattcgctaccaccatgtatgtgaacgattgccctgcaagatcagatgagtgtctcttatttgatgtccttggaaggctttcgtttcaaccgattaaggagaatatgctactcggtccttctattcccacgtaaggaaggatttcttgattccataatgggtttttttctctccgggtagaacaagaatctattaaaaactggttaaatacttacagaatgcatctttgttgttgattcaggctgagaaaactcggagctctcgaaaggagacttgtggaggaaggtgagagatggcgtctcatctcttgcatatggcttcatggtggtttccttcacttgatggctaacatgatcagcctcatgtgtatcggaatgcgccttgaacaagaatttggattcagtaagaccctttaaacccttccgtctcctgaattttctgtgatctgattttaagagtttggtgttacagtgagaattggagctttgtatgtgatctccggacttggaggaagcctggtgtcttgcttaacagattcccaaggagaacgggtatcagtcggagcatctggtgctttgttcggattactcggtgcaatgctctcagagctcatcacaaactggacaatctatgaaaataaggtaaaaagatttttcattttcgacttcagatttctagaaaaataaagactttatggtgcgttattgaaagctgatctcaaacttttttgtagtgcaccgcacttatgacattaatcctgatcattgtactgaatctaagcgtcggattcttaccacgtgtggacaattctgctcattttggaggattcctagctggtttcttcctggggttcgtccttcttctccgtccccagtacggatacgtgaacccaaaatacattcctcctggttatgacatgaaacacaagaaatcaaaacacaagtgttatcaacacatcttgagatttacatctctagctatccttcttgcggggtaagtttacaaaagagatttaatgaatcattgttcaaaagtagtcgaattatccaccaacacataaacaaaacctccggtgttgtgaaaagtttcatcccttacctgtaaataattgaatttttccttgaaatttctgcagattcattgcgggatacactaagcttcttagagaacataccatacagagcatgccattcagagatttcaattagcagcttgtagccagcagaccagtgagacattctctggaaaaaagacaatttcacacaatcccaaggttttttccatatatataacacaaatatcaacatcggaaaggttatacatttgacgagtacatgattcgaaaagtagtacatatgtatctattgtttaatggctgttgtaaactatacatctgtataaaagcttatattaatctgtaggattacatatctagttttttttttgtggcaaagtaggatcacatatgtattcttagagctcacatgaatcagatcgaccaaacattgcatatcgattgtttgcaacattttcatagaaaaagtctctcacaaacctgcaacatgtcaaacgaaaaatgtttattaagatcaatcacatcgcggtgtttccttctgctgtttaaaccttaagcgagaacttacagaggagcaaactgcaagaagaacgcaagctgtggaaatggtaagtcgatgtatttcatgatcttcaagactgcttctgattttatgtaagacctgaaataaaacacatatcactcaattgatgccctgcaaagctttttacagttacatatcaaaacataaatgttactgtcaatgtacctatcgttttcgacaagtacgacactcgatatatcgtcaggagctcttcctgatcgcattaacagtttcttgcccgcttcgctctgtaatgcttcaaaccttatgctcctgaaaagattatcatagtttttttttccttccatttcagttctttatcgactctccagtgaaaaaaatgaaacttgtagttcaaatgaacactaacctgtttcgatcatggtctctaacaaatttcacacctccattacagagattacaaacacctatcacacaagaacaagagtactaagattcagataaacatcaacttcactacgttgatacattctactgacccaaaacttatatagttatacgcgtatgataaaactatagcataagtgaaaattttgaaaaaaatcgtacaaataaaacaatataaatgaaattttactaattgaagtcgatacactgaaattaaagaatcaactaaacgtgattaccgtcgaacattatgatcggccttttatcttcttcgaaaaagcttgaagtttccttaacccaatccactgaatcgcgacgaatagtgcgttggttagcagaagcagaaactctcactctaacttgtgcacgcgacgtaatcgttaatcgcccgaaactcgccggaataaggatcggcatctcaaagctttaccggagaagcactgag

SEQ ID NO: 6291 - DNA, 630 bp, Arabidopsis thaliana landsberg
caagtgcatttaaatacagaaggaaacaaaggtgggaattgcataaatcaaaagttgagatgaggtagtaaaggaacaaatcatgcgttgaagagtctccttaaaggcccatctttgcggtctttggcagcttcggtaagagcaatgaacttcttgaagccagtgcttgcagctcctctgccaagagcagctgctctggttaaaacatcctcgctgtttgctatgaaccctgcagctgtagccggattagtgattgccaatggtggtgcaggtggggttggcattggttgtggcattgctgctgcaaccgactgctgtgtgaatcctggaccatgcttgttgaaatcatctagtatactctgctgatcagctttcttaagaccctgcaccaaacaccagaaaaagtttcagcagactgtcactctagaatactgttgtgaaccagactcgagcctcgagcctgttcgattgagagcgaggaaatgggttaagacatgccaaaattaccttaagttctaagatgcgttgaaactccatgggcgttccctccggaaacagtgcacgataagtgtctgccactgagtcgattggggatagtatgaccttaaggagtgcttcagctctgctcat

SEQ ID NO: 6292 - DNA, 1759 bp, Arabidopsis thaliana landsberg
  unsure (1)..(1759): unsure at all n locations
atctttaaacctgctggtcttctgcagaaccaaatgccatactcgtcccgttccgctgctccataagccgtcgatgttttcacggcagcgtttacagcgccgtgctgatacattccgttaagcaacaacatatcaaagcctcctccgagttctgacttttgtcctgacaagtttgtagctgtttgcaccaaagctgtttcccaatccgcagaatcatccttaaacgcttcccatcctgnnnnnnnnnnnnnnnnnnnnnnnnnnnnnnnnnncccgtcaaataaagccaacgctaagctatctccagcttgtcctgcttcaccgccgtttgtattcccaagatcaagtaaatcacccatttcttcttgtttcttctctatgatcacttcttcctttgcctcttcctcaggttttacgtcttcttcttcttttggtggaggttcaggtaaggcctttattgcgttcatatcttcttgctcttcatttacttcctctgttctcgcttcatcatcatcttcatcggcttcagatttaacagattttgattgcttggtgtgttctaaagcagatttgtctcttataaactcatccatgagatcaagcttcttctgtgtgatcttctctatctctggatactcagaagaccgtgcgatccccatgttcttacaccaagagtagaactgatcgagctcttcgaattggttcgagacccggcagaaaatgtcatagaccttgatcgaatcaggaatatctaactccatgaatcgttcaatcaaaatccccattatctctgttacatcgtaatatatctgaaaactctccttcactatcggatacagagccacaatcacaactctgttgttcctcgcattacctgttaacaaaataacattggtccttatataaatttttatccaagaaacaaacacacacagagaaagaaatcttgaggcgcaagttattacctgttgggcgacaagccaagaaacggtcaagaagttgctgcaaatgttggattctgatgaaaatctgctctgttttcatctcggcgatcggttgtgacctgaccacgatagccgtggagagatctgccgcagcttgatcctgttcttcttcgtcagcttctcctccaacgcagtaaactccacgtttcccgtgtctcgcttgcatcctcaaaaattgcaatgaaaaaaaaaaaaaaacgcatatcttagatatcattcaaattacataaataacttgaaatcccgaatcggaacctggatcaagcacaagaactcttacctgaaatcaagcctttcgtcaaggtacaatgcgtaagtcctgacaaacgcagagtagtcccaagaattagacctcgaaacatccctaaaatcagacatattgagaagccttgttccacggcgagtggcgaagaagatctcttgctcgtaggcttgatctccttctcctaagagcctttggatcaaaatcaaggttttgagggcaacggtccagcatttggttttattaaggcgtctcgaaagcgtgctaacgcaagcgttgatgtaactgcgtgagtaagaagttaggctaagaatctctctaatgtatttctcttctgctggaaactcttcgtgacgagtggctttgacgatggctacgtcaagttcagataaagaagcgcttcgaccattgactttggctagaccgacgctggtttggtcctttacggctcctatggctcgtttaaacttactcgaacccatttttattctga

SEQ ID NO: 6293 - DNA, 1094 bp, Arabidopsis thaliana landsberg
ctcgagtaatccgtgggaggacaagtttccggcttatcgttagctccacggcagcaatattgatccgtattaaacctctcacaggcacttttgcaggccacgacattgttctgatccatgaccttaagcatgtcggggcaagccgcgttgaggtcagagacacagcctgcgtatttgcaatctccggatcctccggatggtcttatccccagcttgacattgtaaccatctacgaggctcacatcgtagaaatctttgccgccatcgcctactagagtgaattcagccagagtgacgggaggaactccgccgccgttacatcttagaccgccacagtctccggttacacatctaccgtttccggaggcgtcaaagttgcagcctgtacgagcccagaaccggcctgaccatcctgcaggagccgtgagctgtcgggaagcacctggagtcaattcaaatcctccatcgccgagcttgggtccttgaccggcgagagttccggcccagacggtggtagggcaattgttccttagagtgaagtctgtggccataacagcaatgccgcctgcagtttaaaaaaaaaacaaaaacatcaaaaatacgaaacaattttgagaaataatggtgcaatatgttgtgatctaagatgatgaacaaaagaaaaagaaatcatcagaaaaggaaacttaagaaacagtattgaaagctattctccttaaaaacagacaaaacaggtgaagaatgtaataatgaaaggagaaagataagacatatataagtgaaacagagaagaaacagaaatagagtgtgtttgatgttgttacttgtgatgaacacgaggaagagaatgtgaatactggagatatttgccatatttttttatgggttttttgtgtgtgtctctgtgctgtgggtgatgatgatgaatgttaatggcaccgatcctctatttatagatgttggttcgaggggtagcgacgtaatgttgtcatgattaatcaattagaatttttggtgtcttgatagatatttcctttggttctctgaattttctcctctctgaattttctttgcattactggtttttacttcca

SEQ ID NO: 6294 - DNA, 1102 bp, Arabidopsis thaliana landsberg
ctaagactctctagggcaaatctcgttgatgtccgagacgcaccctgcgtatttgcaatttccgaatcctccttgtggttttatccccatctttacattgtaaccgtggacgaggctcacgtcgtagaaatccatgccggcattgcttgatcccacggtgaattccgctagagtcgctggaggaactccgccgccggtacattttaaaacgccgccgcagtctccggtgacgcaggtaccgtgaccggaggcgtcaaagttgcagccggtacgagcccagaaccggcctgaccaaccggtaggagccgtgagctgcacggaagcgcctggagttaagggaaatccgccgtcgccgagggtgatgctgttgccggagagagttcccggccaaacggtgtacgcacaactgttttgtaaagtgaatacggtggcggaatcagcaatgccacctgcaatttcaaaaacagttaaatacaaccaaaaaacctaaatgcataagtgaaacagagaagaaacaaaaacagagtgtgctttgttgttggttacttgtgatgaagacgaagaagagaatgtgaatactggagattttcgccattattaaaaaccggattttgtgtttatgtgatgtggatgatgatgaatctctggcaccgattctctatttataagtgctggagactcagaggtttaaagttagggtatcaacttcaattaattataattttctgtgcctactctgttagcccattttctttgtcagtgtaacatttaattgccttgatgattttttttttcttgcgttaataaaaagaagattatgtcacatagttatcgattacaattgtacatgtgtctttgtgtggttagatatagaattacaattctacatgagcttgtattgtcctaagagaaatgtatcaatagacattgttttgttttgtgtctctcaaatctttcccaaccaaaaaagtaaagaaagttcatgaaagttggtttagtcaaaactaacctgagctcatctgcacctactcatataaagagataagatgacacgtggacaagttatagatatgcatataaagaaaacaggagatgctatgct

SEQ ID NO: 6295 - DNA, 1428 bp, Arabidopsis thaliana landsberg
taaagtaaaaatcatttattagaggttaggttagaatttgaatttgttttactccttcattttcgtttttgggctttagaggaaaccacaagaataaaataaaaaccaaaaagaaaacgttaaaagtttaaaatagcaagcgacattgacacttgacagtgtattatacattttcaacgctgcagggtaatcatgaaatacaagtggtgaaatatcttttttacaattatcatatatataagcttaagttatctttttccttaattaaatatatactgatccatcccatatccttttcgatccatgcatacactatgtaacataacattagtttggctttttccacatcaatatacccttttgaatccacctaattatgcttctctgttgaagggacaatcaatcagaaattaataaggtttaccgactttggctccatatggagaaaaaaacattaaaccctagctagaacgtatcattgctctcaaaatattgtacattgttcgagtttggatatatcaaacggttcaataagattaattagtgttttcatcctagatcatcaaacgggttactataaaataaaggaatagtatatctcaattaaacaagtatgattcctctcgttagaaaaaatacccatcaaaaatcaaatacatgtgtcatcttgaacatcatcacccttaatgatatgagaggtaaggatcctgacaattagaaaaaataaacctagctagctagctacataattatgcgattaactaatactcttccttaatgatatgagagggaacaacatcctgaagaaggccatgatctttgagtaaaccagctccatccagcagatcccgagttcgactcttcttcacaacatgatcgtcatcatcatcatgattaattcctttttcttgcctgttaatgtactcggttccaaaagaagacggcgcttgttgttgttggttgttgtaatctaaaagctgaggagggagtgtagggaggccaatgtgggccctagaagctgagccattggatggagagctgccttctttgggcatgatgagtagtggacgaggatgagtatgttgaccttcgtaagtggtgattacactgcttggatcactgaatgatctctctactctcttcttcacgtcacaccaagttgttgtgcaacggtaataatttcttgcaaagggaaaaaaacacaaccccttaaaaatttgtaaacctcataattttttaaatctatcccaaaggaaatatatgagtgttaattaccttggaaaagggctgtctttgacaggtttttgaccgtattttctccacttataaccattatctaaatgaaaaacctcactcctcgtgatgaatgacacttttggcaccttcttcttcgtctgctttctactcattttagtgaatttaaaccta

SEQ ID NO: 6296 - DNA, 4076 bp, Arabidopsis thaliana landsberg
  unsure (1)..(4076): unsure at all n locations
ctggttacatccagatgccattcggactcaagaatgctggggcaacttatcaacgcttcgtcaacaaaatcttcgcattacagatcgggaagacaatggtagtttacatcgacgacatgttagtaaaatccatggcagaaaaagatcacatatcccacttacgcgaatgttttccacagcttaacctctacaacgtcaagctcaatccagcaaagcgccgcttcggagtaagatccagagagttcctcgcgtagctagtcacgcaccgcggcatcgaggcaaatccaaagcaaatcgatgcattgttgggaatggcgtcacctcagaacaagcgagaagtggagcgcctaaccggaagagttgcggcccttaaccgtttcatctcccgctgaatcgacaaatgcttggccttttacgatgtgcttccaggaaataagaagtttgaatggacgacccggtgcgaagatgcttttcaggaactcaagaagtatctagcaacaccacctatcctcgcaaaacccgtaatcggagaaccactgtacttgtatatcgccgtattagataccgcagttagcggagtgttaatctgagaagacagaggcgaaaagaaaccgatcttttacgtctcacagacattcaccggcgcggaatctcgctacccgcaannnnnnnnnnnnnnnnnnnnnnnnnnnnngtcggctcggaaactgcgaccctactgtcaatcccattccatcatagtaatgggatccatgccgttccgcgccatcttacacagtccaagccaatcaggacccctagctaaatgggcaatcgaactcagctagtatgacatcgagtatcggaacaaaacatgtgcaaaatccaggtcctagccgattttatcgtcgaactccccattaaggaggcccgggaaaatccactcgatacaacctggctattgcacgtagacggctcgtcatcaaagcaaagttcgggtgtaggcatcagcctcacttcgccaacgggagaggttctcgagcaatcatttagacttaacttcgaaggcaccaacaacgtggccgaataagaagcgctcgtagccggacttaatttagcttgggggctaaagatagagaaaatccgagctttttgcgactcacaactcttcgcgaatnnnnnnnnnnnnnnnnnnacagatcgggacgaaagaatggaggcctacttgactcatgtacaaaatctggcaaagaatttctaggaattcgagttaacaaggatccctcgtggagagaatacatcggttgacgccctagccgctctagcctcgacatctgacccgagcctgagaagagtcatcccagtagatttcaacgaaaaacaaagcattgaccttggcaaagaggaacacgtcctcccaatacaaatcggcgcggatcaagacgacactctggaagacagcccagacgactgcaactcagaatggatagaacccatcaaaagctatatatccgaaggaaaattgccctcggacaaatggaaagctcggaaactcaaagctcaggctgcacgtttcgttctagtagatgaaaaactctacaaatggcgattatccggacccttaatgacatgcgttgaaggagaagcagtttgcaagatcatgaaagaaattcacggtggctcgtgcggaaatcattccgggggaagagccttagccatcaaaataaaacgccacggattcttctggccgataatgatcaaagactgcgaaaagttttcaaaacgatgcgaaaaatgttaaaggcacgcgccaacaatccatcaaccagccgagctcttgtcatcaatcgcctcgccgtatccattcatgcggtggtcaatggatataattggacctatgcatccctcgaagcagaaaaagttagttctcgtcttgaccaattatttctccaagtggatagaggccgaatcttacgccagcataaaggacgctcaagtcgagaacttcgtgtggaaacatatcctatgtcgccacatgatatcttacgagatcgttacggataatggctcgcaatttatatcaacccgcttccaaggcttatgtgataaatggggaattcgacttagcaagtcaacaccgcgatatccccaaggaaacggccaagccgaggccgctaacaaaacaatcctcgatggcttgaaaaaatggctcgatgctaaaaagggctcgtggtccgacgaactcgagggtgttttatggtcacataggacaactcctcgccgagccacaagagaaacccctttcgtcttagtctacggaacggaatgcgtaattccagccgaaatgatagtaccgagcctacgtcggagtctatctcccgagaacaaccccgataatactcagaggctcctcgacgaactcgatctgatcgatgaacaaagatattcagccttggttcgcatacaaaactatcagaatgaaacggctcgtcattacaattcaaatgttcggcaacgaagattccatgaaggggatcgggtcctccaaaaagttttccagaatactgccgaaccgaacgctggaaagctcgggacgaactgggaaggaccatacttaatttctaaagtcatccgacccggagtgtatgagctcgctgacttaaacggtaaagccgttccaagaccatggaacgcaatgcacctaaggaaatactacaactaaatccgaggtgactaaacttgaactacgaggtggcttgatccccgaaaggggtacgtaggcagctcgtcttcggacgagttcagctaccccccattaaaaaaggggggagtgggtccgtatattcatactcccattttcattatcatcggctaatacaatgagcgatggctcggagtatccattacgcctattctaacacatcgcgctatacaaatacgaggtgaaaacttatcacaaaatttctgataagaaattttcatcttcagaaacccggttatactttgaacaccggtctctcagctcgttcctaaacgttggtcaaggagtgaatacgatcgggtcgcaaccgagaagtttcacccaaaatactcaaactgaatcacatcaggcaataaaacggttcaggtttttcagaatcgaactaagtgtttcagaatttaaaaatggataaagccatccaggcacaagtacaataatcgaacaaattaacaaaacaaaaaaataataatgatgaagaacggctcccacgtcgggtacttagtcgagctcttcagacgggcgaatatcttcggcaggcagaagcgacctagactgatcagtgacccccgcctcgtcggcaagagtctcaaccgatctgtggccgcccggacttaaagaagtggggtcgggagtaggagccttgagttcctctttcagctaggtgataaaattggtgaaatcgacctcggtattggcgaagtctttcagccattccttaacctggtccttctcagttgccaataccccaccttcctcaagtgccttgatcagttgcgcattacgtcgcgcttgggataagttcataaactggtcactgatcctgtcaaggagcgacaccttctcctccggggctttgagtttggcgataaaaaccttcgatgtctcgcgtctagccgtttgagaagcctgagccacttcgctatcgcggagccccctcgcctcggctagcatgcgtttgaaacgaacaacctcagaatccgccctcaaattgagctcggccatcttgatggcatttgccttgttcacgaaggcctccctctcggcctcctccttctccatcttcgcggcggtggcttgggagagcgcctcgtctctttctcactcggcagcttgaattcgagcatctactttggccaacctgttgttcgcctcaatgttattcctcatggccgaatcgtacgaatgcaccattcggttcatcgaggcgacagcctagagaacagatttaaaaaaagttacaggatcggaactccaaacataagcacgccaaatgaaaaagttgaataggcgcctaacctcaagaaatgagacgccgtttcaacatacttccgcgact

SEQ ID NO: 6297 - DNA, 1208 bp, Arabidopsis thaliana landsberg
acaaatcataacgacatgggccaaaaggtttcggaaacccaatctctacttcagtctttcccttttggaaagagagagactgaagaagaggttgagttttcgaaaccttttaaccaaagttgttatgatttgtcaagaaagatttagggaattgacagttgttgccttctaaatcaaagaaagtgcgccaaggacagcttcgaggaagagtcaaagatcaagaagatgaatagccagagagatacttatcatgatcaccagagagatctttacaaactcatagaaaacatccatattctcattaggcttttcactcctaagaagcgatgaagctaaagctaagatgcgaaatttagctcaattgttttacaatccaactataaagctaaatagtagataacaaaatatgaaaagttgcacatttgtgaacttcatacacaacaatattggaatgaatccaactcgaaattgcatcagcataactagaagataaaactcaaccaaaagaaaattggagaggatcgcaataaaacaaggagattaattaccaggaagcaaattgtggttgaatccgtataatatggcaacaggaagaatccacatgaacattgacgcaataggaacttgtgcataactccagccatggcaaaaccaccgaattgaagtttacagaaatcgagagcccattgattttagatgaaatcaggaatcgagagacacagatcttgctcagggttaagggatggattgagtccggcgttggatctagcgagtgcactctcggtcttagactcggcgggttaaataagattgcttgtaagagcggtataagccgattcgtgggacggtacaaacattaatcttgacggtatttttttactaagattattttgacggtttttgtttaattttaacggttttttttgtactacaattaattttgacggtttgattatttgatatgtttcaatttatgacttattaaatagatagacatggaataaaggtaaggaatatatattgtttacaagttatgcaaggaatatctcatcatgtaacaagattatcctaaaaacaccgacttataagaaattaactcttgcattatccttaaagtaagagggaacaaaaaaaacacataaagaagaaaatggaagggaaaatcaagataggaccagtgggaacgggattattcaggtaaagaaaac

SEQ ID NO: 6298 - DNA, 2608 bp, Arabidopsis thaliana landsberg
gcgcttgtgtgagctttcaagggggaacatgcatccataatctaatgcatatcctccaactcggtatcaggtaatcaagttcgagacacaagtcatttatctttctgcaagcttatgaacaaattttcacagctcttagttatcaagagatcttcattcagaccacctctgaacatgttccgcaattctcgtatgatcttgagcctactcagttgtagcctagaaatacagttatttttgcctactatgacttgattaatgatttagaccagaacacaaacagtcagaccatgcttgtactagttattgctcttacaaaacaaatcttttgaagttcacaggtatactgttgggaaaatcacaccagtgcctccgcgggaagttcgtgcttctgactttagtgaaagagccagaatcatgatgttcttccctagaaacggttcccagtatacacctccacacaagtctattgatttcgattggaaagactattgtcctatggttttcaggtaactttctttcgccacattccaaaaaaatgcttaaaatcagtataaaccaagaggactcttttgttcataaacacgttttcttagtggatgcaagaatacctgctcttcaaatgatttactatgcatttatctcaatggcatgtcataggaatttaagggagatgttcaagttagatgctgcagactacatgatgtctatatgtggcgatgatggcttgagggaaatttcttcccctgggaaaagtggcagtatcttctacctttctcatgacgacagatttgtgataaagacattaaaaagatctgagttgaaggtttgatatgactaaaccaagctgctatctctacttgattgtcgtaatgaattatagtggtttgggccttggggatattgtaaacccttcgttagtgagcaaattcttgctcctgttgggttttcttgttgcgtttttaggatgcatgtgacctacagatagtctagcctgtctttccttgtatgtatttttcttagtgtatcacataatctttaatttataaggtagtaacatctcattggtttatgtatatgcataactgagagcatctctttctgttataggttcttcttaggatgttgcctaggtactatgaacatgtaggagactatgaaaatacgctcataacgaaattttttggagttcacagaataaaactcaagtggggtaaaaaggtaagaactagtctgatcccttctatgtattaattccattatatttcatttctttttagtatgggcgttgtgcttctctgacaggtacgctttgtggtcatggggaatatgttatgcacagaattgaagattcatacgtcgctatgacctaaagggctcaacacaagggagatatacagaaaagaataaaattggagaaaagactacattgaaagatcttgatctagcttatgaatttcatatggacaagctgctgcgagaggctctcttcaagtgagttctcatcaaatccatttttgcatgacctgattgatagcctagtcaactaactagtatttagagaaccgaagcacttaataatttctctgtaacgagagataacagaacccttgaaaaggaataaagcagctatttcctatgatttgcaaacgcttttactgaaataattaagatggtagaaaaatgagctgcagagaagaggttgtaccaaatgtcttactttcaatgctgtcttcacacataccttccttgaatttctcattatatttattttctttttgcacataaatatattgctgtagttttcgcatttgtgtctgcctaattgtttgtggaacctctttgtttcccacatggcaggcaaattattttagactgttcgttcttggaatctcttcaaatccttgattacagtcttctgttgggattacattttagagcccccgatccacttactgatatcctggagcctcccaatgaaatgtcagatcaagaaagtgatagtgttggttcggttgacggtaggcctctcaacccttttagtgactatatatcttttcagtttagagagaatagtcgttcactcgcttagataaatcaggtgatcagtttttctacgacactatatggtatagttctagagctcacacatggagtctatgtaaactagatttaaatgtcatggatttgtgtctcttactgtttttgttttgtctttcatcagtcaatttgcctcgtgaaccctccattcctccaaaagggctattaatggttacccatgaacccaattccgttaataccgccccgggtcctcacatcagaggaagcacactacgagcattctctgttggcgagaaagaagttgatcttattctacctggaactgcaaggttagtaacttcctgcaaaaacctaacttgactccacaagatcactcagagtccaataaccttatttcctgttcattaaattgtccccaaccataccttttggaatcatcttattcaggctccgggtacagttaggagtgaacatgccagaaaaagcccaccacaaaaacggccaagacaacgaggaatcaggaacggtcgagctctttaaagtatat

SEQ ID NO: 6299 - DNA, 2038 bp, Arabidopsis thaliana landsberg
aagactgtagtcaatgatgttcagcgattccaaaaacgagcagtctaagtaaatttgcctgccatttggggacaacatgaaggttccacaaacacttagaaactttcaaatgcaaaacacagctgtttaatcgttgtttatgatttgatgctccaagagattgtaagcgatttcagaaagcagatttatgtagaaaatagccgtgccacataaagttagagcttcactttagcaagataaatgatataaagaaaaaggtattgcactcacttgaaaagggcttcccgtaacagcttgtccatatgaaattcataagctagatcaagatctttcaatgtggtcttctcttggattttgatcttttcagtaaatctcccttgagttgaaccctttagatcataacgacgatgaatcttcaattctgtgcaaaacatattccccatgactacaaagcgtacctatcaaaagaccacaaagcttatgctaaaaaaggtggaaacataatggaatataagctataaaagggacgagagaagttcttacctttttaccccacttgagggttattctgtgaactccaaaaaatttggttataagtgtgttttcatggtcgcctacatgttcatagtacttaggcaacattctgagtagaacctagaaacaaaaaaatctggatggttttagtcattagtatctgttatatagacatttagaacgttaccaccaaatactaaagagttcaacaatatagacattgtttatgcgacatagcaagaggggcttataacatcactctaaaccaatactatcggtaaagacgagaaaaagtcaaatcacagatttgttcagttagttcaaacctgcaactcagacttttttaaagtcttgatcacaaatctgtcgtcatgagaaaggtagaagatactgccacttttcccgggggaagaaatttctgtcaggccatcatcaccacaaatagacatcatgtactctgcagcatctaacttgaacatctgccttaaattcctgaaacattccattgaaaatcacgcacagtctatcaattcaaagaacaggttccataatcacttgtttcatattttttcgtcccacggctacgtaatccaaaaaagtaatggattgcactcattgcgtttgggaggtaaacaacccaaatcgaaagttctggctttctcaaaaagtaagattttctaggatgcactaagaatcatgtctatgaagaaaataatccttttggttaaaactttctgcctaaagcagataacatggaactcaaagcgtaaaaaagatgcacctctctacaaaacttacttgctatgttacccaatctatacggtttatcgttaattaaactactttatttaagaaaggtgttctatccgaccaaaggaacaactgagggatcacacagagctaagtagttcgtaatttttacaaaatacatctaacttgagaacagtatccaagaactaatatacacattcaaagattatctactctgattctaaagttctttggtaatcagccagaagaaagctggtttacctgaaaaccataggacaatagtctttccaggcgaagtcgacagatttgtgtggaggggtaaaattggagccgtctctagggaagaacatctttgttctagcgttcttaccaaagtcagaagcacgcacttctcgcctcggcactggtgtaatttttcctacagtatacctgtgaacctcaaaagattgttgtgttagaggaagaactaattataaaccaatcttagtgacttatgcagtagatatacaaggccatcatataaatatgcaagcaggttgtctcttggcctgtatacggatctgagtctaaaatcaagccttattgcagaaataatactcataatgtgtcataggctataacagaacagtctcaagaatcatgaaaattgagaaacatatttaaaagaagtggttttacgtaaagctctccaacttgctatgtttgaccaaaaaaaaaattttaacatattaaa

SEQ ID NO: 6300 - DNA, 1698 bp, Arabidopsis thaliana landsberg
ggggtttttttcaacttttttcgggtggtctcctttatcttcaatttgagttttgtcctgttttctctggtgaaagcaaagtttttatctttttcttctttttgtgtggttatatatgtggttgtcggaaatttacctaatttagggttttttcctgtgtaagtgcttgcatttcactttaacaaaacctcaagttagagttgtgagtgttcagagttcagatcgattgaaactctcagttgctactcaacagaaattggactttttgtttgttgagatgtattgtttgaagttgctttgttccactagtgtaaaataacattctcttctctgcatctttagacttatcaaggaatcaaacccattttatcattgcaggtgacgtggatatatgaagcagatgttttggggaaccagagttctgtaaatagaaaccttcacgcgacgttgaaaggtttttgagacgaatataggaggagaagatgggatgtgtttcttcttgcttccgggtcgaggacattgatgagtacatgaatccaaacagctctgtctataggaactgtccctgcataagatgccttgctcataatttccttaacctggtaactgcttgcttcacattgctatttcagttttatgcttcttatggttagatatctcgaaagttttcatgtttctatagttacaatttctagttcttgtcacagttatttactttgatctgtaatctgattttttgagcccatattaatcgttgcagtatatttcggtcttcagaagaggggaaactcgctctctcccatcttcggttcaagctactgcatcgataacttcctcttcttcacacgataactttttgtctgaagcattccgttctactccaagacctctgccttatgatgctgatcctagatacttccgctcactcgtctcaagacgagagaagggttcaagtcattctcatgaggaagttgaacctttaagaagcgatagcgatgcagattctgaatctttcggggtaggagggtgcaaatgggctaataataagtccaccctctctgataaagattccaaagaagagtactctagtaaatccagtctcaggattttgagatcaaggtccaagtcaataatggccgactctgaaaacatgtatatattgtctgaagacgaagatgtctgcccaacttgtcttgaaggtaataataatcccattcaacagtctcctttttgttccttcagtattcatatcttgttggttttttgcagaatatacatcagagaacccaaagattgtgacaaaatgttcacaccatttccaccttagttgcatttatgagtggatggagagaagtgaaaactgtccagtctgcggaaaggtaaccactttttttttctgcattcttagaacgaagtgcgtataaaactcccgtcaaagcaaaaggccatatgcttttcgaaattgcacggtctagatgatgaaaagctctaatattttcctggaattcataacaatattgttgttctgattcattctgatttttaaaaagctccattttcaaatttcatcatgctctttccatggcttcttctggttttatctgcctgagactcagatggtagaacaagtgaaagcatatgtgcgtacaagtatcccgataaagaatttatctttttcttggaatcctaacagttgtt

SEQ ID NO: 6301 - DNA, 1257 bp, Arabidopsis thaliana landsberg
agttctgttaacagaagcagcccatgcccgagatgtcttgttaacaacttccttaacctggtaatgctcttttttccagcgtttacttttcacctgctacttatattatgtaaagtagagttcattgaagcttcggatttggtctctttgcagtatatctctttattcagaagaggcgaaacccgctctctcccatcctccttacaggctactaatgtatcgatagctacatctacttcgtatgacaactttatgtctaatacattccattctactccaaggcctctgccttatgatgctgatccaagatacttccggtcaaggcgtgattcgcttgtttctagacgcgataagggttcaagtcattctcatgaggaatccgagcccttaagaagtgatgctgatgtggattctgagtctttctcagtggaaggaagcaaatgggctaataagcttattatctctggtgaagattccaaagaagagttctctaaatcctctaggaggtttcttcagtcaaggacaatgtctactggtaatgaaggcgtgtatataacatctgatgatgaagatgtctgtccaacgtgtcttgaaggtattcatcttcatcttttttttttttcttcttgggtcaatgcattccaaagaagcttagtatcagattatttcgtgtgttttgtagaatacatatcagagaacccgaagattgttacaaagtgttctcaccatttccaccttagttgcatttatgaatggatggagagaagtgaaaactgccctgtttgtggaaaggtaaacacttttcatgttcttccaagccagttttcggcttctcatttactagtgtttcagagtcagactcagacaccatcacgcataaatagacgagtgatccagagatcaatagaatgaaagatgtacaacaaccctagaagcacatgcgtaaaatctttacttgtcttgtctatgacaaatatggctaatcattcttcctgaaactcagaacatttgaattatttctcattcatgttgactaaagaatatttttttctctgctgtgaattcgtctcatttgcaggtgatggagttcaacgaaacaccgtaacttgttgccattgatcctgtcttgtactgccttgaccggacctgaggagattgacaaggcagcagagagatgtgcaaattgatttgatctgtgaatatcttttttttaacaatatatggtattggatacgatgggggaatgaggaaaacgtc

SEQ ID NO: 6302 - DNA, 313 bp, Arabidopsis thaliana landsberg
acgattcaggactgtagtttcccctcagatttgagtcgatgatggactcgaggtttctctgtttttgccagcttaaagcccattccgcaaggttgatctggtctttaggcaaagttgggtttataacagctcgagcacaaacagcttcgaacaacacaacaccaaaagagtaaacatctgacttctctgttaactgttgccttctaaagtattcaggatcaagataaccaaaacttcctttcacagctgtacttacatgagtatggtccatggacggttcaaccttttacctgggcagactcagaccacaacc

SEQ ID NO: 6303 - DNA, 1066 bp, Arabidopsis thaliana landsberg
  unsure (1)..(1066): unsure at all n locations
caagctaatctctgatctattgaattaagttattaatgtgttcagtttatgtaatgtggtttgtaatgtgttccgtttcatgctctttgtttgttttaagtagttgtgtatgttttgtttcagtttatgtgtttgtaatgttgaatttcagtttcagtttagttagtattaatgaatgttggcttatattgtttgtgtttgcggttacatgagtttgcagcaaagtccatgtggtttgtaatgtattcaatttcatgctcttgtgtttgttttaagtatttgtgtttgttttgtttcggtttatgtgtttgtaatgttgaatttcattttcaatttaactagtattaatgaatgttggcttatattgtttgtgtttgcaggtggtggacaaggcttcttaccgacatcaattgactaggtggtggacaaggcttcttatcgacatcaattaactcgttttgtgttttgttcttttgtacacacaccactagttttgtgttttgttttttttttgtacccacaccactagttttgtgttttgttcttttgtgtttgagaccacacaatactattgtctcaacttttagaaaatattctctatatatacaaccatgtatcgctcttcttctttatctgatcgtcttcactctttactgctcttcaactccaaaaccccaaatacacttttctttaactccaacaaattctacttcttccaaaatgacaggttcttcgtattataatctcgacaaaatgatggatgacaagtttgatgaatatatcgatcaagccttagagaattatagagatcgtcaccaagccgagccaacaataaacaagcttatattgaaagagaccgtgagcaaggacacatccaattatggaatgattatttcagagaagatgcgacatttcctccgcatatatttcgacgatgttttagaatgaacaagccattgttcattcgtattattgatcgactctccaatgaaatttcatactttgaacanagaagagatgctaccagagacttcttttctcgcactacaaaagctacagcagcaat

SEQ ID NO: 6304 - DNA, 498 bp, Arabidopsis thaliana landsberg
tactgaaacacaacagacgggttatgcaagaacataaactaaaaaacatacaagcaacaagattaagacaacagatcagtgattaccttgttattaagagttatctctatggcaaagagactatcaaacaatttagtcagacaaatcttctcttatttgttaattagcttctctcgcaaagccaaatatttctccttaatatcccaaataagttgtacctctttcagattgttatttttttcaccaaacacaatacttggcttagctttggcttttgctgccttaacaccaggggaacatatttggctttggctttggttctcttcaatgccaactggaacagaggatgatgactaaatagattgttcaaagcactttcttctctttgatgttccattagtagtatactcactgcaccatttctgctcatggcaaaccaccctacaagcatgctcaaaggtgaacttggtaccatagtctttgtagaaggtctgatga

SEQ ID NO: 6305 - DNA, 145 bp, Arabidopsis thaliana landsberg
cttgtggtgagaataaatcaggattcactctttgacttacgattgattagggtgaggagatcttggctgtttgcaaacacagatccatagaatgagatttgagtgtggcgaagaagaaaaccgttgggtgtctataaaagtctat

SEQ ID NO: 6306 - DNA, 1044 bp, Arabidopsis thaliana landsberg
aaaatattcctactaatggttcaacgcggtggatagaagagattaattttaacagcgagatagtaatttttacgttataggtttaagatatatggtagaatagatcgtaccttttgccattgattgtatgttcggaaggagagtgccaatgaagttgttgaagttgatatctagtaccacggatagtgacaccaatacctttatttcctcctttgaatttcaacttgccacattaaccataagaaaaatattttaaacaaagtggtgatccaatagtacgcaggtttgattaaagaaaaaaatgaaatatattggaaaaggtggtaggatatttaccatgatatcatgacctctgttcttaatggtggtattagaaggcagatactggctacgaagcaatccaaatttattactaactaccacatttttgtcccgaagatcaataggagattgcattttgcctattccacacattttccactctgcatctagtgttccccatttcgctggccccttgattcctttcgtctcgtagctaaactcggtttcgtcctctattcgaataaataaaacaaaaacgtttctgtgaccctaaaactaagtttatataagtcgttcaaggagaacataacatattatggttcattggatctttagtctttaagactaaatattccaactattcaacagaaactagctagtatatactctgatataatcataaatacttaaaagatgactaaaaacaataatttagcttgcttaccaacttctccacctggtgctggtttaggtgcaggtttaggtttcggtgctggtgttggtgctggtgctggtgcaggcttaggtttaggaggtgtaggtgctggtgtgggcttaggattaggaggtgtaggtgctggtttgggcttaggtttaggaggtgtaggtgctggtgcgggcttaggtttaggaggtgtaggtgctggtgcaggcttaggtttaggaggtgtaggtgctggcttgggcttaggtttatgaggtgtaggtgttggagagggctta

SEQ ID NO: 6307 - DNA, 594 bp, Arabidopsis thaliana landsberg
cgaaccaatagattgtattatatctgaagataatactaaaatggacatagtcgaaagagttgatccatcattggaagcaaaagctggatgctcaaatagcgattctaagccgaagatcgatatccaccttcgatggagcaagcaaagcaaagatcacggaattcgcttcgttttgaattagttttttttttttgatgtggtatgtgtcatagaccagcaaaattgagaaagaaaataatcaaatgtaaaaaaaaaaaatatatacttacgaatattgtgttatcaacttatcatacatataacgcctgcttgtataaacaaaaaagaagattggttccaactaattaatatgtaaattaagatttttggattttttttaatgcaaatgtacaagtcaacatttaatcctactgttaaagtcaatcattgagattgattctcccttcttcgtaatttaaaaatcacaacaacttgcatatagatccaattatctcctttcacctagaaagaaagagagtcgactaattctaagtctttaagtcaacgtctcttgtctttatatagttcatcaaaaacaaaacgttttgttaaaca

SEQ ID NO: 6308 - DNA, 6764 bp, Arabidopsis thaliana landsberg
aaaaaagagaaaataagttttttatgagtattgatccagagaagatagaaactgcactagctattaaggaggacgaagatttcacaacagaatggtttgcacaagaagatgagaaaggagttcacttagtggaaagaagcctagaggacaagttgttgagtgaggaggaaatccctattccgacttattctccaggagagcctaaacagcccaccaacccctctgatgaagaagaacacttgattcttgattctgttgctgaagaacttctggagctctagattggatataaagctcaagaggatacaattggaaagttaactcacaagatggaagactaaaaagcaccattctggaactttaagaaatggttaaaggctactccagttttgaatttgaggattggtcaaaaggagcctggttcagaagaagaagactactctgctgatcagaaagaagtttattttgaagaaaaatcaaatgaatattcatcataccatatgtcaagagaggatgcaatatatgattcagaaactgaaaattcgaccactgaagatgaggacttctctattcctctcttcaaccatttttctgactaagctctgtaagattcaagcgtgacttaaaacaagctcacttggtaggaagccccatgtctatccatgtatataactttctattttccttgttatttttgacgtttttgtttaagtgtttcaagtttatttcattgaccatgatgaagtcaatggtcgaggaaattcaaaccaagtcaagaaagatctctaccgttgatcgagtagaatgagaaggagtgttttgaaccgttgatttgaatgaccaaatgagataagcatcaccaccgtttgattgagtgacttcttgaagtttattttggtctgtttgatcgagtaaacaagaacgaggagctctccaccgttggatcaaattttgtgcaactcaagaagatgctcgatcctttactcgagctcgaattatttggagaccaagaagtgatgtcgactgtcccacttgttccccttcacttcattattcaacggacaaaccatttacccatgcccctcaccaattcaaactcgcttttgcaatccctccaaagagaatcccaaggccatcctcctccacccattgaaatctccaaaccacttttgaaactctctctttcatcatatcatttttgcaaactctctcacaaagctccaaaagtttcattccaaactctccctatcactcttcacgcattctcacttcatcatacttcaccaaagttactcgatcaattccaagttcatcctcaaattttcaatcggttttcaagctcaatctccatcaccaaaaaaactgattcccttttcctttgatacctcttagagaagtagttcttgttcgccttgttgaagctcaccaccaatctccatggattcaagaaggaagagttcatctcgggcaagaaaatcctctgttgataatgaggaagttgaggcatttgacatgagtggcatgactgaacgccaaattcgccaagctcgccgtgctcaaagatcaagcttgattcaaggtggaagctcaagccgctcaaccatgcaaagagaagaagtagctcgaggaaagagggtcgttgaagctgaagaagaacaccatgaagaggcaccctttgaagaagcggttcctgaggaagaggatgagatcatcggggatgatacaccaacccctgttgggagaagaaaccgtccaaggaggaagagagagccaaccccgagcgaatactatcaatacttgaaggagttgaagtttgagggaactagataccctcataaggaaacgatgcaagagcttggtatttgtggtgatgtggaatacttgatggaattggccaatcttgcaacattcattaactaacaatgtgggggatacaaagaggagagctgccaactccttgcaaacctcaaggttcatttttgtgttgatgattcggagaaagaggagagaggaggtcttggttacataactttcaaagttagggatgtcgagtatactcttgatattcgccatcttgattccatttttgggtttccaagtggagaaggaatccgccaagactatgatcaagaagagctgaaatctctttggaatacaatagccggtccgaagcccttctcgccaaccaagagcaagagttcttcaatccataatcccgtgattagacaccaccaatgcatcgccaacaccctctttccaaagaaggccaccagatttgttggtgaagaggagctttgcatgatagaccaatctttggtctttactttgagagagacaaaagatgggaggaatatggcgggtgatagagcagacacttcgttgagtgttgttctcttggatcacctattgagctataaggagtatgttgcaaccattcatcgctcgggaattcacgggaagtctctttgttggtggactcttgacaccaatcctaggagctgccggaatagagctcggaactcttgatgttaatctagaaaaataccttaacctcgactatctcatggggagggattttcttgagaaaacaactctggcggatcgctatctcttcaagttcaaccactcggagcttggaccttctcttctacccctactatgtgagaaccggacttcggtgaagacaaggcgcaacatcaatttcatgccatctccctctgccttgaacatcgacattggaggagctcaggaagatgaaccagaatatagtccggccaactatgagcaacatgagtactttactcaagctgattatgaggagcaaatcgagtttgaacaacatgttgatcaaccggagcatgggggtagcgaacaagagtaagctcattatgaagaaggtgttaaccaaggagaagatgagtttgctgaagttcacaagaagctcggtgtacttgaagagcttgggaaccttcacagcaagacaatgaagggtttagagaagaagatgagaacaatgaagaagtcgctcaagagtatggctgctcaactcaaggacttccagagcaagccaaggccaacgtctcccactcccgaagtaagaagaagcggttcaacgagctcagctgcatggagagctgaaaggatcgatcaactctgagcttcatcttttgagcctcgggaagtgatctccgagttgagagagccaaggagtaggcagagacgagcttccacacgctcgaccggacaaaacgagcaaaaccctcccgcctcaacttcagcccctgcctatactcaagagagtatggacgactatgtctccatctacttcacctgatcactgaggtaacaccacctcaaccattgtacataccatagcatctttttatttttctttgtgtgttttgtgttttggtcttgaattctctttcagatttttattacacaagggactgtgtaatttaagtttgggggagggttcaagacatgtttaacattgtgttctcttttcttatttcaaattttgcatcatctaaggcatagaaaaaaccataaaaaaattgaaaaaatttcagaaaatgatttcacaaaaacagagtgtcatgtagattgcatatcattttaggattgtatatagagtgcttgcatttaggattgctcatttgcataggggataatgatgatttcaaaccgttaagcatgttttgattcaatgaagtaagttcaatacccaggttgttagttctctgttgcataaccgattgtatctctaacgtaagaccgcaccctgctttgatttacaacttgactatactgctttgattcaaaacttgcttagctgatgccattccctatctaaacctgaactgaatttggaattatcatgtctatacattgtttgtgaactcttggctaccatatacatacttggattatcttattcacttcaccaccctctgttaatccaagtagctgactatcatttttagaggagtttcccatacccttagcctagccttatttcaagccaaaaatcatatgtgtgtgattgtgaggtcttttttgattgagcttggtataacttgttaggtatgagccgacaaaagcagtctttcatgtagacctagcccacgctttttgggttggctaggactaggtggagacttgtatttgggattgggattgtgtatggattgaatgagaatgagaatgagaatgataagaaaagaaaaaaaagagagtaagagtttagagttctaaagggggatacaaaagtgttagtctagtaaagagtttggaattcaaagaagttaggcattgtgattcaaagaaaagggtaaaacgccctatgtgctaagattagaagaaaagccttaagtttgtcgaagtataaaaccaaaccgctagactcttaaatcgtttcaaagagaaccccttagaacttgaaccaaaagagagaaagaatgagaaaaagggtagagataggacatctatgggactgggatcatcttctgagctatcattctatatcattgggtagatgggagtctgttcttgtatgtgtccattggcttttacctttagcattctgctgaacctcaatcttttctctgagagtcccctgttactcgaccaaatcactagagggaccattttttgtctcttagcctaagcccgaaaccaagtgagttcataaccattgctttgcttgatccactgttcgtgcttaaatagattaaggcaggttgttaggttgcattgtgacgagtatggctaacggttttaagtaagggtctatcactttgcaacctagaattagctacctggacattgagcttacctgttctatatgcatgcttcgatttttgaatccccaccttcaaacctctctttcaacttaagattttttgtttactcgagggcaatcaagagataagtttgggggagttgataacactgtattttactcattttaggtgtatatttatcatcatttagctttgcatttgctcattgtatcatatcattttgcaccattttagcttattttgcatacttaggcatttaggatcatcttgcatacacattgcatgttttggtgtgttttcaggtgcagaaggagctcaaaaggattcaactcgaccttctactctatccaaccaggagggaagcagcaaagcattgtactcgacccactcactcgatccaggcagccacatcggaggcagcaattcactcgaccctcttacacgatccttgcagcctcataagaagcagtagatcgatctactcgccccttctactcgtttctctactcgacccatttactcgatcaagggtgaccaactctacaagacttgttgatctatcaaagcgtcttcggatcctcctcattccccactcaactagacatctgagcatacagataggagaggaagaagcatctactcgactaattgatcactcggagcatagacacaaaggcgtagactttacagcaccctccttactcgatccccaagatcgagcactcgtccaaaccgcctcaagtctcttatcttctagtctacggttttaaacattttagtataaatagatcaccttgggatttgtccaaaggatgtagcttttatctcttagtttttctttgtgttcttgaatattaaaacctaatttactcttaatctatttcgttttttcatttagttttttgagtaaagttgtttagcttgtttagatttacattttggtatgatttcagtaatttatgggtttttgttctaagttatgttgcttaagtactaactagggatcttgaggatggattagattagggtaatctctaggttagtcaggtggttaagattatgttagatcccttctggatttgttggcccctatgcggttttcgctcgctaatgtgggaattcgaccttaggtattcagcgtccaaaagaagtaaaaatggattccttatttacgaattcagagatttatagattctagcccaagagattggatgtttagactgcttattgactttggtagattgttgcttaaagccagctctgctatgtttcatcaacgagagttgagattaggaagcggtagagttatgagggtctctttgacgagagtggattgacctggttttgaatctatcgtctagggtatctgcctttcgcctgttagccacctgataaaccctagagttgcccttatcaatgaatcaatccttaggacttctattcttcttagatttatatgtattcaccccatgattgcagttttattcatatgttatatgtgtcacatgttgattgcattttggttcttaaatttgttacctcttggttctactcggcccaataatcgagtagggctcttaaagttctcatttttgttgtttgaatcctgatttaggattgttattagaaacccaccatcactataacctggcttgacttagttgcttttgtatacatcttgattgctatcaataacaatggactggattgacaccccctatagctgcatcgacatattagtgtttaaggcgaattgaactgaacctcacttcagcacataagtaggcgtaaaaatctacttatcattgctctgctgcttccctcctggtttgatagagtagaagattgagtgatttccttgtaacctccttctacacctgaaaacacaccaaaacatgatatatgtatgtaaaaagatcctagatgcctaagtatgcacaataagctaaaaggatgcaa

SEQ ID NO: 6309 - DNA, 2444 bp, Arabidopsis thaliana landsberg
ataagacaaattgttaggttcaggtccttcgtcaagaagtttctttttgatctccaacgctgcccaccgggtctgatccttacccatcagccaaatcaaatggttgcaaacagacagacttatctcagaaaacctctctctgattcttttatacaactctttaccaacaatataatgctcttcacgagtacatgcccatataagcctctcgtgctcttccctactcggtctaacccctgcactgtccattgcattcaaaagcttcaacactctagtagtccaattatcatctttcaccaaccaccgcctcatcacttggtagcatattctaccaataaagttctcaagcttaacaaactcaaattcccaatcgtaaccaacatcattccctatttccctctttgcgtatttctctctcaattcaacaaagaactctaaagctcccataccgtcttccattcttctgtaaacaagcaaagccgttgaatatgtaatcgggttaggctcaaaacccttttccttgattaaatcaagaatcccaagagccttgagaaactcaccttcctccatgtaaataaccatcaaagtattgtaagtaacaatgtttggaacaatcccttcttcctccatatctttcagtatcttctctgcttccccaaaccctctcatagcacccaaaaggctgttatatataaaaagatttggacctatgacaccgcctgattcactcttcttcctcttaagccaatctactacagctaccgcaggcttcaatctcttgtccttgccaaaaccctttatcatagcacaaaagacttgcagaggcaactctcccttgtccttgagaacagcatccacatcatcagctgtcttagcagctcgtaaactaaacgctaattctctaacatcaactcttaaattgttcttttctcctccatttgctgaacttaaatcttccgtggaaacttcttcttccccgagctcgagctctcgttgctcagtggcccatcctaccccaaacgatgatcccaacaaacttctctttggctcacacaaaaacagaactttcctgttactcgaaacgaagatgaagctagagatactactactactaccgaagcaagcctgttcaagaaagcaaagtctctttctagtagtcttagggctaactacaaaacaagaacaatccaactcaaattccaatcttgatccaactaaaagaccagactttaatggcaaaatgcttaaagcttgcatctttttccaaacacaatctcacaactagcgttatgtagcatggaagcgtcaaaagacacacgatttcacgcttcaaaagcgcaacggaagcactctcttccaattttgcaaaatcagaagcgcaaagttctttcagaaactgaagcgtaaagatctcttacaaattaatattgaacaaaaacgaaaattgaggagggcttgaaaataacttcaatggcggattcagagccgcgaagaagaagatagaatttttgtcttcttttctttatgtgaaaactgaaaataaaatactattgggcttatgggcctcaattaagcatgagatttaaaaagccttttctacaaattaaaaaattgctaaattaattgttttttaaaaatgaaaaatgtaattaaaatccccaacttattgaaaaaggttgatttggatctttaactctcgatgaaacgaaataaatatcaaacttctatttttcaaaaatatcaaactttcgttggttaaataggttaacatatcccgttaacgaagttaattttttgtcaatatacatgttaactgaaaacgacattgttttctataataacaaaatgacgtctttttgtcgtaacggatgaacgaaatccttaaattcaatcttatatctctaaatcgagcaaaatccatgatcctaaattttaatataatttgacactcgggattttatttaacaattacgacaaaacgatgttgtttattgtgagaggaaatgctatcgttttcaattcacaggtctgttaaaagaaaattaactttgttaacatgctctgttaacttacttaacatcatatctcaaatttgaataaacgttgagatattaaaaaaatcttcaataatataggaaaagaaaactatctctggtcgtgcatcgtgtgcaaagtagtccattctatatagcttttttttttgggttttccaatatatatctttaactaaaacagaaattgtaatacttttcgtcaaactaagttttcatatagttgaatggacagtgataggtgtactaagatgaatgtgagtagtgggaactgagaagtcttcataggccatgtcttgtaagaactcacatgctcacatgtggatatgaaattggtccaaagtgttttttttttctttcataaaacattaaatgttctttaggtatttgtca

SEQ ID NO: 6310 - DNA, 2272 bp, Arabidopsis thaliana landsberg
gatattaccagtgaccaaaacaaaacaaatctatatttgggtaaacaaaagataaaccggagtggagccgagccaccttatccaaacttgcagccacgtctattccatcatttcatcagaaacaaaatccacacaaaaaacatattttcttgaaacgaaaaaaaaaactaattactcgatgatcatgaagcactagcttatccacaagaaaaccaacttgatcccaactaaaaataggaaaagactttgttttggtcatcgactattatatatagagtccaatcacaatctatcttattcagattttgtttgtggccatattctttgatctcttttttgaaatcttcaaaagcattaaaaacaccatgacgtctagatttgtgcttccatgtactactctctacgttctttcggtaacacttatcttatcattatatctccctctcgcatctgcgaaacgatcattagaagaagaagaatcaatcatatgcccttataacgacaagggatgtctattatatctgaatgagtttgcaatggaacatatcaacaaccataatgattatgaagcagccttagcttctctggagaaggagtttcaagatcatgacagaattcacttgatacacaaaccatacatgcacatgactgattcttccctttataatactttagacatatagaattctgtatatatgtggatattctcatagagagatcattggtgtaattaagaagaaagggtttgaaaagatcatcgaatcatttcaattatatgaagctttattatataaaacaagctaaaattaacattgattaataacaaaccaaaacgcaaacaactttttattaaagcttaatgacaataatgaccaaaggaacaatacttcccgccaccgtcatgaccaccataaccaccttcatcgtcttcttcataatcatcatcatcattctttctactatgaacccaccacaacagattacttaaagagttcccatcatcaaacccatttaatcctttaatcttctgcatcgctccatctttgtcgtacatactttccaaagcatacacaaatcctttccacccttctccgacgctgtctctagccaaagcaggcattgtccaattcacgagctgtttcacgaatgtcacgtccgagaacagaacttctgataccggaagtaacggtaataactgtatcccaaggcgacattctttccactctttaggcgcgaaccataagccactgtctctctttgttgaccataacactccaaccacacgattctccgatgtgaaatcttgcgggtaaatagcgtcgtcttctttcacctgccaccacattttcgccgcgtgaatctccagcgtcagaaccatcgaagcagccgccaccaaatgtgtatccccataagctagccccaacaaagcagcggagtaatacgcattgacagcctcgcttgtactctcttgattcctcccgtcagcgaactccgttaaccctccagcccaagaatgaagcttgaaaagatcaaagcatctcaaacgcgggtaattcgaattcgacttggctcctttcttccccaacgtcaagtaatccgccattaaagtatacgcttgaggtctgtatctcttcccccataaaggatcaatctttgcaagcacagcaatcgcataaacaaagtaacctaaatgataatgatgatcattgtaaatcccaaacccaaaatctgctcctgaatctctagatcctagcttagtaatcacacctccccattttggatcatacaagaaaccatttggtccgaaacttccattaagccacggctcgatcatgttcttcaagtaagttctaatctttggaatcacatcgagataacaaacttcttcagctattaaagctaacctcgccgccctcgcgatcaatttcgcgtagaaatacgaagagttggtgacctcagctgatgaatctaaagcgttaacgtctttgattagagcagagatgatctcttggtgagaatcttcttgaactcctttgatagagtgccacgtaacagaaacagggtctggttttaaaacccatgaatctccgatgacacctactaaatcaccgtcgatgctgttgtatttgaaattgtctagaactgtgatagaacaatcgttggttgataaaagcttgagatgaagaggatgagctagcattagaagatctccatagcctcgtttctcccatttatactctaaagcaaacggctttgtgaaatcagcgtcacc

SEQ ID NO: 6311 - DNA, 978 bp, Arabidopsis thaliana landsberg
aatcattgcgattacaaaatataagcatattttaagagttcatgggattaaaaaagggagatttgcaaaaataaccttcttctagtgttcttttgcaaaaataacctttcctgttggacatttttaaaattgccccttctcttgcggaaaatgactacgttaccctgaaagattaggtttttcttcttcttttctcttcgacacacaatttcttcttctccgacggcgatttcctatttgaagatccgacgaagaaatcgccagatccggtgaagaaactttttgccaaagattctatggtcaatatgattctcaattgtgcaatttctagtggattaccttaacaattaatcattttgcaaatcaccctaaatcttatagtttagatctcgattttgatttattttgtatattgtttcacacatggactgagagagctaaatcaataaactgaatcaagctaaactaaaaaataaactgaatcaagctaaacactaaatcgaaaccaaaatctatcacaaaacagtataacgaattcacataatcaacaccaaaattgaataattcaattcgaaattgagacatttaggctaaaataacaaattcgaaatcgattccataagtgaaacacaaacctgggaaattgatggtgaaatgaagactgcgagggtgaaagacaagaagattccgacgacgccgtcgtactctccgacggcgacagaccaagaacaagagagacaaatgaaaattaggccgctggtctgtagtttactataggtaaaaaggggatacaaattaggagaaggtgcaaatgaaaatggccagaaaaagaggttgattttaaaaggggtatgataaaaagggtattagagaattaattaaaaaacaacaaataccaataattagtcaaatcggaaattaacattacatcataataataaattagtattatattttaaaattaatatatatcatttt

SEQ ID NO: 6312 - DNA, 508 bp, Arabidopsis thaliana landsberg
atgtttctcttttgatatgtatattacagatttctgtttgtgttttagttgtgagctctctaaaggatcctaaaaatggagaatgagttagattcttgttatagaaatttctaatctttgttgtgttggccagtgatactgtacagtaaaagaaaggagaaatttctgtgattgctgatgttttgtttgtgtttttccattcagcgtcgcaatctgtgaagaagattattgaaattaatccttatatgcttggtacaatggctggtggtgctgctgattgtcaattctggcacagaaatctgggaattaaggtaccctaacgttagtttttgttagctttctgaattgatgattgggtctatcagttatcttccttgctgtggcaatccggttacttcttaccttccctttgttcataacttcatattagctaatgtatagatatccgaaagctgttgagtcatttgttaaagacttaaaaacgttttgtatccgtctgtttcctgga

SEQ ID NO: 6313 - DNA, 4048 bp, Arabidopsis thaliana landsberg
  unsure (1)..(4048): unsure at all n locations
ctgcaacatgcatttaccaacatctaagaccaacgaaaacattgcccaagatcatagctgacacctttattacaagggctaccaaacattctaggaacaatctcataatatctccaaaacaactagtagttacaagattcaaaaaccactaaagaaaaaatctcatgacatcctcatgcaggtggtgcactcaaggctgacacttcatagtaggatatcagaggtcaaatatccggagcttcatatatacagagtgttgagataaaagcataaaacatcaaatgtgaatccagataaaaatcaactgtgccaagcaaagttccatattagcatatcatcgagtccgcgttcaaaggtcatcataacgaggcattttcaacgctataacaaaagcacagatccaaatcagcagcaaaaacaacacacacacacattcatacagagaccgactacaccaagttattgtttaagcatcgaaaccgaaaccaaatttggtaacctaaaactagttgattttgtaaaaagtaacaaatctctctcactcaatatcaaacagagaaatttggcagctgagtaaacatttcatcgagaagaaaaaaaaaacgtcaaaagacgaaacccagaaatatcaccaaacgaagtccaaaggaaacaccacgaagcaaagatctcgagaaaaaaaaaaaaatcgaattcaaaagcataccttcagttcagagatcgaatcgaaaatacacaatgtccaaaaagtcaaaactggtctcgctctttctcgggtctcccctttagacaataataatatcacggacattattaagtagaagaaaagaaaagaaaaaatccaacggtcaggatttcgtttattcctcaaccattgtcgattcaaaaaagaaaaagaagctgctcctagccacagactctgactcaacgtcaagaacagcaatctcactgtgctttttcttctcatttctcgaagtcaaaagtcaaaactggtctctctttcttcttcagacaataatatcacggacattaaaaagaaaaagaaaaaccaatccaacggtcaggattcgctgctcctagccacagaaagtaacgattacagactctgattcatcatgtctagaacagcaatcgaaggaggaggaaaaagctttgaccttagcaacagatttgtgttctccaacaacagaagattgagaattcgatctttcaaggagcatcgtggacttgttttcttcaccattggatttcgattacagtcacaatcacatgtcctaatttttgatgatttactctctggttttggcattgataggttctttattcaccacgaagaaaaacccacatcggaattggctcggattactatgaggaggtcaccaagtgtcaagaacaaaaatgttgcatatcacctattcgacataatgcttcacagaggctaactagcttattggaannnnnnnnnnnnnnnnnnnnttgcgtggagaacatctcaggcttctgcagagaatgaagaattttgtttgagctctatccgtatgcaaacacatgtacacctctcggctgctaatcaggaacatctcagtggttgggttaagtcacgtttccgttgtcttctgtctcatagtctgtgactgtagcctttgctttgttccacatgttattgaaatacaggaagtctatggcatttttgtgatccaaacccatcagagcaaagcagccacacattattgtcttttactggggattacacctcactgaatctcaacaatggaagcttcctgggaccagttggtagaatccagttatcggttttgaaagcatctcagctacctaagaattgtgagtgtgctagcaacaacagaagcaagaaggtgacaaagacctgttgcttggagattctggtaagatatctatgtgttgtggaaactgggaactaaaagaaacctattacaaaggtgacaagacctgttggagaatctgagaagttatctatgtgttgtggaaactgggaactaaaagaaacctattacaaagcagccaaatgttattgtcttttactggggatttcagctcagaaccataaatgttccggacactgaatctgtggagacagactctctctgcagaatctcaacagcttcctgcttccagggaccagttggcagaatccagtcatcggttttgaaagcatctcagctgcctaagaatggtgagtgtgctagcaacaacagaagcaagaaggtgacaaagacctgttggttggagaaatctgggaagatatctatgtgttgtggaaactgggaactaagagaaacctattacaaagcagccacacattattgtcttttactggggattacagcgcagaaccagaaatgctccggacattgaatctgtggagacagactctctctgaagaatctcaacagtggaagctagggttggatcagtggagacagactctctttgaagaatctcaacagtggaagctagggttggatcagtggagacagactctctaaagacttgttaggttggtcctagtgttttgtatatgttttcaaatatccgtagcttcatatatgtatatatagatatagttttgagattaaacaacaaatgaaatcaactgtttcaagcatagttccaagctagctatagagtcgtgtaacttcagtgaagatcatcataacgagaccttttcaaagctatagcaagagcactaatccaaacttcgtccaaagcattggaatcctctactaactgcttcttacgagctatttttgccaccaagacactaacggtgaggtgaatggctcgtagtacagccagccatatcccatagttgttagcgtcagggggttttggaaacacaaagccatcctcttcttgtgaaacattcacattgtcatgtaaccacgttaagatagcatcaccacgtgaacgaaccttgccatagtaatcactcggtacaagaaactgcagttttccttcatcatcataatgcttaagctcccctagtagcagttgtttatccagaagtagaaacgaaaactgcaagtcaacggatatctttcctctaaacagactactctgcaagaaaccatccactgcttggcaaacaagattagtaccatcatcccttttactcttgatcttccgcagaaagacaaggattctgttgagttcatcacactccagaaaacagatactctgaggtgtttccagtaggcgacagtctttaagcttctgttttgaaatgccaagctttagaaccaaggaatacaccaccctctctcgaaagctatctgagagaaccttatgttggatgaaggttacaaggagtgatcggatctctttgagtaactggctgcgcgctataacctgatccgtagctaaaggccagtcattgcaccacccatcctgatacacaaacgatttcacatgtgcagactgatccttgatcatttgaacagcagctactgcatccactggtttccagtctctaactgatgataccttatcagcccaatcctcacttatcctctgaggcatatgcattctctgagacggtataagccctgtagcatgttcttgttccagatgatcgtgacatgcttgtcgagtagagaacttcttagagcaagttctacaaatccaggctatccacttcagattcttcttaacatatttgagaactatctccagatctttcactgctccagttttggcctccacataggttttgaattcagaaattggaaccttcaaaaagtttcttttaaattcatcatctagacctaaccaatacgacttctgcctctcataatcctctgtatccggaaccagccgaatactaatgagaggaggaccaacgggcatctctggaacaggacctttatcaattcttgcttctaagtttccaatgtcagcctctctgcgagaaaacaatctatcggcttaagaaagtggagagctttttgggtggaaatagaaaccatcttgttataaaccacggatttgtactctttgaccagattcaaca

SEQ ID NO: 6314 - DNA, 5572 bp, Arabidopsis thaliana landsberg
tatgtatcaccatgaatacgtaattgttccgttgatggtaataacatatttctcacagagacgagtggatgagaaaaagacgtagtatttattaatttacttgttatttgctttccatgtatatatattttcatatatatataaaagaaaaagagtataatttagcaaaataacaaaaatataaatattgatagatggtttttgtatcataatttatttaattgtatttctggaattaatattcttctttgactagatttcatgagaaagtaaacgaacacaaaattaatgttcatctttgactttttttggagggaaaagagtgtttaaacgtgggagaacaagaaacaaagcttgcagccaaattaaatagaagacaaataatcattagtgagaaaaattcttagattcctaatcttctttgtgtcttttccatcaaaccctaaaaagattcacgtaagagatgtcgagatttttggaatagtcaaagaaggtcgatcggattttgagctccctattgagattctgtcgataattccgacggattctttcgagcaagtggatctcgcgaagaggcgatcatctgtaaagtgtcgaatttggaggaagaggtggtcgaattgaggaagaaactccatgagatggaaatgagtattcacgagcttgaaagggatgcgtaggcgtggttagttttcgacgtttttaaaatataacacttagactaatttttaaaaattaataatgaaattaacatggttttagtttaaaattattaattatttccttaaagtttaaattttaaattggttttaatttctaagtgaaaatcattattattattttaaaatgagttgaagtgtcaaatctatattacgtgaaaacatccccgaacttcgaacaccacaaagcttacggaccaattaaggacgggatgcataggcgcggttagtttcgacgatttcaaaatttaacacttcaactaatttttaaaaataataatgaaattaatattattttcttaaactttaaaatgtaatttagtgataatcactattatttctaaaactaaattgatagttgaactattttttaacaaataaaaaggaagaaaataaaaataagaaatgaaaaaaggaataccttgttggtagcaaagaaggcccatacagccaaccccattccaaagtcaaacgtgagcccaccgttcttctgtacctccaccacttgcacgagatccaatttgacgaagaagattcattctttgtgacatggacgaaacatgactctgatttttttgtttgtgtgatcttgttcatcctctctacctcgatctgatcggacagatttttgattgcaatgcgaagaagcaatcatgggcatcctctgttacttagggtttcataggagtattggcgttttgtttcgtcagtgatcgatagattgattttcatcttaagagattctaaaatcaatttagtgtgagaccccttctcgattgtaagcgatgatgaaggagacgtcattcattcaaccacgatgatgaactcgaactcaggggctttgcttcaatgttgattctgtataatcatcggcgatcatgcattataaatagaaatagatgataaattgtgtatcatcgacgaagaagaagaaaaagaaggtgaatagagaattttgatttctcaagaatgaagaagaagaagagaatgcgtgagggttattttgatttctcaagaatgaagaagaagaggaagcgaatgtgtgagggtgtatttataagcaaacaaggttcttggtttatttcctttttcccttaagcgtatctttgcgatttcatatactttttattaatataaccgttggggatcatatttattaatctaaccgttgggattatagaggaaatttaaattttgatccggtttccatttttttgatgactttggtttgttttcctattactaattttgatttggttagctgagagcctgactgagaggctttgttgatgacccttttgtcttggagatgacaatgagcatcaaacccaggcgtgttaattaaacggctccgtttacaagttgggccgaaattaggcctcttgttgggcttaaacctgattagtttttcttataaataacgtttttttttgttttggtaagaataataatgctcgtttgtgagtcagtgactagtcgtcgtgaaataacgtgacaattaaaaaaaatcaaacaaatccaatgccacgtcagacaatacattccaattcgtggaaacgcgcatatcaatcaatgaaatgaatgaataaagaaataatcttagccaaaagtaaatacattatataagatcgatctcacttttggtcggaataagaaggtattggatcgctgacagataacccgatcagattcagggagtttaatcgatcagatcattttttgtcaatgacgaaaaaggcggtgcttattgggatcaattacccaggaaccaaggcggagttacggggatgcgtcaacgacgttcgtcgtatgtacaaatgtctcgttgaacggtacggcttctccgaggagaacatcaccgttctcatcgacaccgatgaatcctctactcagcctactggcaagaacatccgccgcgcgcttgctgatctcgtcgaatctgccgattctggcgacgttcttgtcgttcattacagtggacacggtacgaggttgccggctgagactggtgaagacgatgacactggtttcgacgagtgtattgttccttgcgacatgaatctgattactggtgagttttatctctcttttttttttttgtgattgatggctacgatctgacgttctggtctccgatcctataataatcagaagaatcttttgatagaaaagttttgattttttgtagaattgttgatcttgttttcgagattggtctctcatagagtcatagctgagaaaaagtaggatcaaacgaaattaaggaatctcatatattcttggtatctgactttggaatttgtccatggagctttgctgatgtaattttgttgtttccagatgatgattttagagatcttgtggacaaagttcctccaggttgcagaatgacaatcatttcagactcttgtcacagtggtggcctaatcgatgaagccaaggagcagattggagagagcactaagaaagaagccgaggacgaagatgaatctgaagaatcttcttcaagattcgggtttaggaagttcttgcgcagcaaagtggaaggcgccatcgagtctcgagggtttcacattggagggaacaagaaggatgaagatgtggcggaagaaatcgagactaaggagattgagcttgaagacggagaaacgatccatgccaaagacaaatctcttcctctgcagaccttgattgatattctcaagcagcaaacagggaatgataatatcgaagttgggaaaatcaggccaagcctttttgatgcgtttggtgatgattcgagcccgaaagtgaagaagtttatgaaagtgatcttaggtaagcttcaggctggaaatggagaagaggtggctaatggaatgcttgcaaattggcttcagggttcttgaggtaaactaaacgatgaagactatgtgaaacccgctatgcagacacacgttgggagtaaagaagaggtttatgctggtggatccagaggttcggttccgcttccagacagcgggatactgatcagcggttgccaaaccgatcagacctctgctgatgcgactccagcggggaaaccaactgaggcttatggagccatgagcaattcgatacagacgatattggaggagacagacggtgagatatcaaacagagaaatggttacaagggctaggaaggcattgaagaagcaagggttcactcagcagccaggtttgtattgccatgatggttatgccaacgctcctttcatctgttgaaaacagagattttattgaatgttttttactacgacacgttgattgaagtttctggtcgcaaaaataagcctgttttttttttgctgtttgatggcatttatgtaatttacaagttatgtgtgttgtgttctgtgaaacactaaaattcttcttgttttattgagatctattatgttggttgtgaaattattttttttggttttcttttcttgttaactcttgtgtattctgatttctgcacatcaataagaaaaagttttttttaacggaacataagaatgaatcttgttagataaataatattacatctatgtatcatcttgccaatttgtcatgtgatatacacaaaaatgaaagtcaagtgtctttttcctctttttcttaaataaagaaaatacaaaataggcatgggaacttgattgtggagctttgagggtgtatgcttcttataaatactcgttgtcttaatcatcaatctcttgaacccatgctaaatctgcagaaacaaaaagacagacacaaatcaacgactgtcgagataaccattctgtttccttgtcggatttatcatatgatgtctcaagatcatgagataagctcgcaataccttgtaaaacagtttctacagctgcatttgggatggagaggcccactatccgctgattatccgttgtagtctctatgcgtataactcgaattctcttgtggctgtgacgggcctgcaaaagatccaaatacatataagtttccatgccaacacactaagagagagtctcacaaattcttgaatggtctttgttacttgtttggagagagctttctcgatggttccccagatgggaagaataaggccacccacaacgtttacttcctgtatcctacgtccaaccgtgcaatactccccaagcttacacttgggtccatgcatacactgtactcagatggaaactcatttaatgaacagcgctatatcaatggttatgacttatgaatctcttgtgaggcttaaactataccacgccacgatgattctgtgctaatctatttttctgctttggttctatgtattctcaactttatttttgataggggaagcatacctgttttgatgaaacttcgtactcgtcctcccaaccagtacgagccttctccagagaagatagttttcggtatttagttttcaactctgaaagagacatctccctggaaaaaataaacaatagttaagaccactttttctagtcagaaatacgaaatgtaaaggttctgccaatggtgtagtagatacctgatcgactctcctacagcaggacgtacaatcttaaacaacccagaagcggcactggaaatccaagacaaattcagcaatgagattttgatagtgttattagtattctaatatttgtttgtataaaaggaccacattatccaaagagtagtgaggataatgatttacctctcaaatgctaatatgaagtgccgtctttctaaccattcccttttagattcaaaaaagccatcattagctgaaccaagcccgtcccttctctttccctctagcattgaactcgcagactggaacacagatcaaatcaagcttttgagtgc

SEQ ID NO: 6315 - DNA, 9594 bp, Arabidopsis thaliana landsberg
  unsure (1)..(9594): unsure at all n locations
tatgaacaggttagttaagaaacagattatagagggcagaacaatcctgataggttctttcacttcattagcttcagagagtatttcagagatggagatagagtatccactagagcgagctttggtctcttccatagaggatattgcggatttggacagcgaagcttctacatacactaagacgctagatgagaccgaacatgtgatgcaactaatattccaagaagagccttgatctatgattccaaaactaaatactaatgccaattgggatccaacaaaggcccctaaaatcgagttgaaaccacttctagcagggctaaggtacgcatttctttgtgaaaaaattcttcttaccctattattgaaaatgcttctctaagtctcgcagagctcaccttattgctaagcaagctgcgcaagtatcgcaaagctctttgctattctcttgatgatattgcaggtatctctctggacttgtgtatgcataggattcacctcaaggatgagtctaagccctcagttgagcatcaaagagactaaacccgaatctgaaggatgttgttaagaaggagatcataaaactgttggaagctgggatcatctatctaattttagatagtgattgggttagtctagtgcatgtggttcctaagaaaggaggtgttatagtggttaagaatgacaagaatgagctgattcctatggtacttgatggatactatgggttctgaaatccacactagagatttgtaattgagattatgagaaaggagggctataacttcactgaaaccttgagagttatattgctaagaacgaatggactttttgtattgattatgacaaagcttttacaatgtgaaatgagattacaagtgtaaaagtatgtgtgtgaatgtaagctgaattgaatgtgtcttccaagtcgtccttgcttccttatatgggtctacgcacgtggtagctccgttcgggatctgcggagatcctcctgaatattgggcaggtcagttccgagatatcaggtccgctccgcgaatatctcctcatcagttcctaggttgttattcgcttatctcccttcattaggtgaccgggcttatctggcccaaatacccattcgcgtatgtgggctcatcagctgcgtaggtcctctacttggtgggcttggtgggcttttgtgggctggcttggtattttcgcaggtggattcctggaggggaatccagctccaacatttgccccccagcccattgagtgagtaggcaaactcgatgagcagacatataggtcatgtaagattgcgaaaatattcttgatgagatgataaatgctataagatcagtcggttttgaggataaactcaacaattttgatttaatttcagattccttaacccaaagatttcgaggagatacgcgagataagtcgctgctgatgtggacggccgagatggagcgtctcattcagcgaaccgcatctgacggtccagattaggcgcagagaagagatctctacaatctcaaaaatcgtggtgatgatggctttaaataacttcccacctctccacttgacgtcacgttaactcacacgactctcaaggtaacttctctcctcctttattatttactgcgtttagttttgtagagatagaaaaatctcgtccttttttttttgctatctccttcgtttctctgctactccctctctctcgatctgccttctttgctcttttctttcatctctctcgtccctctctatcgaaacccaaagatgagcgacttcgaagattcccagaataaaagcaaccacaattatggcgacgatgagagttcgtccgagccgaggtcggcggcatcaccgcagcgagtacaaagacgcgtcataaccctaggcggaataggtccaattcgtccgccgtctatcagagccgacaaaccgaaaaagaaaaaggctgccaagcaaggaggaggcacgccgatgacgaacagcgacctggtcgacctccggaggagatgccaggttccggtaggggtcactatgatactcccaaggccgccactgcatcgtgagaacgtgccggtcgggtggtgctgcgcttatgccaatttctttgagaaatgtggcctttttttcccgtttccggtgtgtatcctcgagatgctctactgtctcggccttgcctttccccagatatgcccgaactttgtccgccatgtattggcgttattcacccggctcgggaagtagacagagaattcaactgccatgacctgcttcagctctgccaggtcaagaccaatgctaggagcgaccaggggacgtactacatcagtgctcgtcccggatctctgatcctaggcggtttaaaggcttatcgagacaccaattggggatccaagtacttcttattcagagtagatcgtcattcaatcggcagttttgatcctgcgaggataacgaggacctggtccaccaacctgggtcagatggagacctgagcctcttggttttttgttgtttgtgtcgagtccttaactgcttttgctgaacgttagtactgatatcaatgttattttccctttgatggtttgcagcaaagaccaaggaagttactctctcagagactcgagctgttaacccttctctgacgtggtcagactaactgggccacttttagcagagatcgcatcgtagctgctcatgccgtagcttcagcagttcccttagctccagcagttcccgcaatcgtccttccagcagcacagctagatccgatcgaagaggtcccgcggattgaaccgatccccgaggctgatctgcctataggtacgagttccgtttttttctttttttttttagacaatgtacgggttactgaggcagctgcgtaactcgagctgctaactaacacatatcgtgctttgtctgttcagttcctcctgactccagctccacttcagaactcccgctcatcagaagaatgaggcgtccaagtcttcgtgttcaacgagccaacgccggggctcctgctcgtggtgatgatctgtcgaccgcgatgactgcggctcgacagactctagctgtctccagcgcatctgcctcagcatctcatccctcaattcctgagatcaataccggggcctccgctgtagcaggtcgttctgattgtgcaccgtcctctccgaagagagcttggacccagccggaggtgcatccggcggctgagttggtcgtgagtgactagggggtcgcctctcccagagaggagacgatagaatctgcggctgctatcccggacgcagctgcgtccgcggataggcggtcctcgggcaggtcccatggcggaggacgaggctccagaggtgggggcaggtcttcaaaccggtctcagaaagtgaggcagacgtccaactctggtggaggttccgcgggaagcgggcctttccactggtctaacactcacgaccgtgatcatccgatcgttgaggacgaggctgggttggcgaacttgcttcgccacataaaagggaggaactgccaggttcctggagtgaagaacatggacgaggcggctgcctatgctgacatgatggcgaacgagggcgaggtaattatcgatcactgtctccttctaatttatatctttgcgctagttatgactttcagatttgctcttggtaggcgatagctgctaccaacaagctggttgctctctatgagcaacttctgagccaggtttcctcaaagagcgagttcgaagaaggaaagaccctcatttaggagctgacagcaagtgtgaaggctagtcaggagcgcgaggtttcgttccaggtatacctcggttctgacttgtttgtatataatttatcgatgatacgatgattctaacctaattgtgatttcaggcggagatcgagaggttgaaaatggagttgtccacttccaaaagacctcgagaaaggttatgctgagaagatcgggctcatggagatcgagatcgggggattaaaagccgacaagcagacggcgaggaaccagattcatcgcttagagcagaggagggaagagctctccaaaagggtgacggacgtgacttcgactgcacaaggagcgatgaaggcggttcatgatgctaaggttgagctggccgctgcgtattcgaagttgctggctgggatcaaggaaaagtgggtcgccaaaaaggagtacacggtgctggagagtcacgcggctgaggtggcattgaacttggctttgatcgactatatcacaaaggctggcatcgatttgaccgtggagagacctcggctgcaggcagggctggatgacctgaggcgcagcgcaaatcgaaggaggtatcagacatcactctaagcaagttggatctcccgcaagtttcagagatttcgatggtatgtctgatggacgtggacgagcaagggacgccaattggcttggatgagttcgggagcaacaaagacgtgtttccgagaggtctcgcggatggttctggtgttgtctttgccacgccagccggagaatcgagggagtgatcactttcgctccttgtttgttttaggatttcgtgttttgtttcagacttaatgcctgggaaggcttttatcctttcgtttattgccttttgaacttggtgcctggaaggcttttatcctttgttcgtttaagtactcgaatgcctgggaaggcttttatcttttttagctagtattttttgtctttcgttcgagtgttgacacttcgttggttttggtgcgagaccacctcgctttgtccatgttccggataataatcgaacttgtttcgcgtccaaattatttcggatgcgatatggtatgttcttcgaaggttaaaactttgaatgagtttgagttgttttgtcttgggaacctgttgaagtgaggtcacacaagggacctgccagattttgggagctgggcttgtggtatcgccaggtcgcgaatgaaaccttcatttctttcttgtttactatgttatgcgttgatagcgaaagagttagatttggttgtagtaggtgagctccgatgcaagccgaagtgatgtgttcttataagttttagttcactgtccactttttggaagcgagatcacaaaatggatccgctaacgttcggttgttgggctttaggtatcgtaagattacgaatgagttttaaatcatagtgtaaatgattattttttgcgaatatgataatgagtatcaaaatttccttttattcttatctcggaattgttaagtacaaaaggaggtaaagcaagcgacgatctggcgtttggtcatcgagcagggacctgcttgataccgaagggagattgaactgtcaggtgagcagctgatcttcgttgatgggagatgcgatgtctatttccctttttgaagtttcgtcttacagatagaagggttgagatggtaattgcgtttgcggaggtgactgcctgaatacctggttaggggattaagcccttttgtaattcgattgaagtgatggctgcgctcttggggggagctacctacgtaccctgccaagggatcaagccttatcgtagttcgattgtttttgagtacctattcgtggtatttcttaagatgcatggcattccaaggccgtaactcaggtactccgttgaaaacttttacgagcttatagacgccgtcacgtaccacctcggtgattcgatagggaccttcccagttagttcccagttttcgagcgtttagctctctcgtgttgctgaacacttttcgtaaaacgagctctcctacttcgaatctccgaattttgatattggagttatagtagcgggcggcaggttgttgatagttttgaactcggatcattgcctgatatctgcgttcatcgatgaagtccctgttgtcctgtaacatttgcgtgttccggtgttagcaggactggcggtccttctcacgcttggtactatggtttcgacaaggattactgcttctaaaccataggcaagagagaacggtgtttcttgcgttgatttgcgaggtgtagtttggtaggcccagagaactccgtggagcatgtcggactacattgattttttagaatcatgtcttttcttgatgttgctaagtatagctttgttgggggcttctacctgtctgttaccttgtgggtaacggggggtggatgtggtaagacggatcttccacttgtcgcagaatgctttgatttttcccgaggtgaagttagtcccgttatcggtgacgatctcatatggtatgccatgtcggcatacgatattttcccataggaagtcctcgacttgtttctcggttacctgttggaaggctttagcctcaatcaatttggtagagtagtcggtgaggaccggtaggtttttagtctcttcttcccaccggaggcttccatgggacctacgacatccatggaccccttcatgaacgggtaaggtgaagatatcgaggacatttcctcgggaggttgatgcagagtaggtgcgtgtcgttggcatttatcgcacctgagtgaatgagctatgcaatcggctagcattgttggccagaagtagccttgctttttgattctgagggcgagggtacgtccactacagtggctaccacattgtccttcgtgcatgcttttcatgaggtcttttgtttgttgcccgtaggtacacaccatatagggacctgcgatcctgcgtttcataagtctcctttccgtgatgcggtaccttgcactctgggctttgagttttctggcctcccacttgtcgggaggtgtgatcccttgttcgatgtaatcaatgattggaattctccagtcattgtacggttcaggttcgtacgaggcaggttgttcgggggttccgagctccagctcttcctccgctgcacctgcctccacggctgctgcgagggctctagccgcagcggtggtgcttcgggttactggcgtaaagttgcaagttgccgaggtttctatcccagcgtgtttgaccgttaggtcaatgctcgggtgttctattccttcgaacgggataattcttttgacgaaaggatctgacgtggaggcgagagctgccatggcgtctgcagaggtgttttctcctctggggatcctggtcagttcgaacgattcgaggtacgcttccatgcgctcgtctttagcttcatattccccgtggaactggctggtgacaagttgggagtcgctatgggcgtgtatatcgcggatccccattccttgagctagcttaatgccagcaatgagggcttcgtactcagactcgttgtttgatgcgttgaatccgagtcggaacgattgttcgatgacttccccggtgggggaggtgagttgtattcctactccggattcttgtcggttggaggagccatcgacgtggaggagccatttcttattggagttggttccatccaggtccgctaacgggagctcgattacaaagtcggctaggacctgtgctttcaggctggttctggtgcgatattctatatcgtactcacttagttatatagccaattttgcaagtcaacctgattgagttggactgtgcagaatggttctgattggttgagacgtcatcactacgatgggatgtgattgaaaatatggtctcagttttcgagctgacatggctacggccagtgctagtttttccattgctggataacgagtttcagcgtctatcaacgttttactaacgtaatagatcggtttctgtccttcgtgatcttctctcaccaggacgccgcttatcgcggttcgggagactgccgtgtacaggtacaacggttctccttcttcgggttatgcaagtatgggtggttcggacaggtacgctttcaaatgtttgaaggcttgcttgcagtcctcgttccaatcgaactttttatcctttcggaggagttgatagaaagggacgcatttatcggtggacctggatatgaacctgttgagggcggcgatacggccggttagtcgttggacctcccgtgccatttttggtgacggcatttcgatgaaggctgcaatctgcttaggattagcctcgatgcccctttcggttaccaggtatccgaggaattctcttgattggacttcgaaagaacatttctcgggatttagcttcatttcgaatttgattagaattttgaagcattctcttaattgtgggacgtggtccttttcgtgagctgatttgaccagcatgtcgtcaatgtagacttccattgttttaccgagctggtcgacgaacattctgttcaccaatcgttggtaggtagttccggcatttttcaaaccaaagggcattactttatagcagttggtgcctcggtcagtaataaaagctggtttttcttagccgtctcgacgcataagtatttggttgtacccggagaatgcatccatgaaggacaatttttcgtgtcatacagtgacctcaaccagtcgctcaatatgtggcagtaggagactgtctttaggacatgccttattcaggtccgtaaagtcgatgcatactctctacttcccgtttttctttttaacgacgaccgggttagcgagctaattagggtattttacttctcttatggatccgagcttgttttattgatcgacctcatcgtgcacagctttagccctctcgggacctagcttgcgacgtttctgctttatagatcggtaggtcggatcgacgttgagttcgtgtgaggttacctcgaggcttattcctcggaggttcgcacttnnnnnnnnnnnnnnnnntttgttttccttgagaaaggttatgagatcctctcgtattgctgggtcgaggtcgtgacgtatcccaacgcatcgcttaagatctgattcatctatggagacctgcgttatcattgattttcgaggtccacgttgagaagggtctaaggatctgactgttttcatttctgcgagtttgtcctttatcattagtactactgggttggcttttttgatatgctcgtagccacccatatagcattttcgggagctgtgttggctgtcgtatacgactgctatcctcttgtcggaagggaatttaatgcattggtggtaggttgaagggacggctttcatggcgtgtagccatggtcttcgcaatattgcgttgaaagaagctttcttattgacctcgagaaagttcgtgagttgtcttactcctcgtgcgacggttggaagctggatggttcctagggaaaaggtcatatctccagcaaacccggtaagtggcgtttttctgccttgcaacttggaattgaggtgccccatttttttgaaggcgtcgtagaagagtacgtcaactgagcttcccttgtcaatcattatacaggagagtttctagttgcctatgtcgattcggataacgagagcgtcatcgtgaggtttatcgaggtcggtggtctcactttcccagaatgtgatctagtgatcaggtcccatcatcgggctttagccttttgtgtaggaatctgtcttcctcttatgagttttgatcgaattgattgagtcg

SEQ ID NO: 6316 - DNA, 635 bp, Arabidopsis thaliana landsberg
caagatcatgtacaaacaggtactgttaagtgattgcttaagtttctctaattgttgtagattagtgtgcaaatttatgtggagtaagttaagtagctatttaatgatgatttgacttaattactcttgaaggatcactgagacaaaaaaccaatgctactaattaatgatgcatttaactcttaagtccttaatctggaatcttaatgacctttggactatatagttaggtacctcctttatactaatagttatctgatttggtaaaatataactaccttttgacaattatgtctccttcatgtcttctctcaggatttttttgaaattgtgtttatcacttttcttactgaagcttttctgatttgctttgaccattttgcagaatgtgatttatatcatggtaactggttttatgatccgatgggaccgttgtatacaaacaactcttgtcctcttttgacacagatgcaaaactgtcagggcaatggaagacctgacaaggggtatgaaaactggagatggaaaccgtctcagtgtgatcttccgcgttttgatgctaagaaatttcttgagctaatgagaggcaagacactagcttttataggcgattcagtagctcgtaatcagatgga

SEQ ID NO: 6317 - DNA, 613 bp, Arabidopsis thaliana landsberg
  unsure (1)..(613): unsure at all n locations
cccgctttcttttctttccttctttgcttctttaaatttcatctgttttcgctcctttcgcatgcattcttgctcacttgcaaatttctttgtttctttcacttattcagttgagatttctagggtttctcttcaagttttgcaaatttctctggagaggtcgaagaagagagaaagctacgttgcttgaaacccaagcttcgtctaaacgatctcacacgaagttccagaagcnnnnnnnnnnnnnnnnnnnnnnnnnnnngataagcattcagaacagcttcaatccgctaccgagatcaccaggattctatcagagggtaaataaaacttcctctgtttactttctttacttattcttgataccatctgaaagattcgtcaaattttatcttatatctgtccaggaatgcaaggaaacattactctcgctgccgcagatctgatacaatctggagttgtagatcgtttcattggccttattcgcgatgaagaattccctaggcttcaagttagaagatagaaagaacccatcaaattgatatttacaatgatcagtataatctttgataccgatatattctatcatcttttctagtatgaagcagctcgc

SEQ ID NO: 6318 - DNA, 2544 bp, Arabidopsis thaliana landsberg
gcataactgttgctttttgttaaaacttcttttgtaaaaaagatacaaccgtggaacttccacttacatgttttaacatacacattaaacttttacaacattggattatctaaacaatagaatcatccatgttacctaactagagaaacaacaagttcagcttataagtggaggcccaacttaaagaaaactcaatccaggaaactgaatcctttgggaagtaagatatttacagaatccaatgcaaggttgagacacgtggacatgtgaagcagatgtcgtcgccagtcatcatcgccgatttggaactccaaaaccacttgaaactgtcagatctccaaggtacaaagaagtctgacggttttaattagagaatcccaccaatcttcatcattgaatatgcaaaggaaagatatttccaaagaaattgactcccaaactctcgaggaacatcatcgtagagattaagccgatggagctttcagcaacatgctagaaaaaaaacactcgtttccatagatcagttagataaatagccacaattgccttaaactcaacccaaagcaccaaaaagaccttgatccgcaactccaatttgttcgtaaataatgaaatcgataagcttgagaaacaaatcaagccctttaaacaaaggaggttcaaggaattaagattccatatctaagaattgaaacgcaatagagcccaatcagaccaaattttacgaaataggagaaagaaaattgtttaaacaaaagcaaaattcagaactactggatacaatggacggcgagttaaaacagcaaaactggccaacgccgcttatagaagccaatgatgctagacataggaccagccatcacgactgcggaagccggagataatggacaaaaagccaactaaatcgggataacaaaactagaagaactctggtcggcaaaagaaaacgcttctctcatctttgaaaatttttagagaatttttagagaaaagagaaagggaaaacttttttatagtttggagtcttgaactatatataattgtcataaaataaaaatgaccatccctattacataagacatagaaaataaaagggaaaaaaagaatgacatgtccacgaaaaattttcattcttctagttgtccaagaaaaaaagcacatactatcgaagtacattataagataaagcttaccaaatcaaacttatggaagagtcctaatacgggtcaaatttccctaagaactactctctcaaataagagatcaattgcagtatttaaggatcgaattccacaaagttcttttgttcaaacaatgagttgattgtcgagattaagctagcaggtgatgattgaaataaaaagagaacaaagtaaaaaggcagcatattgattgtgttgtaaatgattaaataaagagctaggaacagggtattctcaggaaactattggttagtagatctaatgatagctaggttgttatcgaatcattcttaaactcaaactttaattatggaataaccggtagtgttccgcaaaactccctatgtttattgctaagaataaccggagaagccaagagatctttaacctaaatatgcattctaaaagagttcaattgttcaccttagtagataggccgattcttattacacacctataaaccaggctcatcaaataatagatccaactatagatacctatggtgggcatatctattgtaatacccctgaccaggactagcactaggccaaggaattttagtcgacaatttagcaagccgtacaatcggaacgatcggaagaagtccttacgggaagagtattgttcatcggaccaacggtctggtagttttggggatagtcatgagcaagtgttcggggaaccggatgggtgagacaagtgggacgaggacttgggtgactgggattaatgtgttgatgcattgagggaatgcgtgaacctgtcgtggttacggttctacgagatgatcaccgttggtaacggtaatgtccccgagtgcgtgggatgtgtttcacccggtaccgtggcgcttagtaatatctcatcccttactaggcgctgcttatgtactatttaccaaacaagccgctacgtgttcctcgagctttatttatgcccgagcgatcggcatttggatcatgtagatgatgcctgatgatcggggattttaattgatcggaccgggcgtatgatcgagagtgcttttgttgtgtaagcagctaggtagaattagtggcctagtatagtcatgggcagataggtattattttagataagagcggaatcgtgtagagttgagatttggataagtatggttgtggataggaacgagaacggatagggacggaagtggatagggacgtgagtggatagggacaaggtacggataagaacgagtgtggataagtatgaatttcggataagtatggaagcggaataggatcgacttgtggataagtttgttcatgtctatctgttccatatagataagaacgtctgagtatatccatgtacggataag

SEQ ID NO: 6319 - DNA, 1762 bp, Arabidopsis thaliana landsberg
aacatttactagctttgttatttttggtctcacactttttttgcatgtccttatgtgtgtttcactaaaatgtaactgccttttctccatctttttgtttgcattggccttatgtattatatgattctttaccaatttttgaaacatcaattcaagccaaagattctatttacatgtcatgtcttcttatgatcatttttgtgcatatatgtgttttaggaagaaggatgggtggtttgtagagcattcaaaaaaagagctacagggcaagccaagaacacggaaacttggagctcaagttacttttacgatgaagttgcaccgaatggagttaactcggttatggaccccattgattacatatctaagcagcaacataacatttttgggaaaggtttgatgtgtaagcaagaactagaaggaatggttgatggtataaactatatacaatcgaatcaattcattcagctcccacaactccaaagcccttctctcccgctgatgaaaagaccttcaagctcgatgtccataacatcaatggataacaattacaactataaactcccattagcggatgaagaaagcttcgagtcattcataagaggagaggatagaaggaagaagaaaaagcaagtaatgatgacgggaaattggagagagttagacaagtttgttgcttcacaacttatgagccaagaagacaatggaacttcaagtttcgcaggtcatcatatagttaatgaagataaaaacaacaatgatgtggagatggattcgtcaatgtttttgagcgaaagagaagaagaaaacaggttcgtcagtgaattcttgagtacaaactcggattatgatattgggatttgcgtatttgataattgaatgaaactacatagatggcatgtgagatttgttggtacgtttacttacacttatatgaaaatattaacagtataactaataaagaaaattaaacatatggtttagccatgtctagttttatgaaaagaatgtgttagggttgtgaatgagtgaggatataaatctatattacgttacgtactatttatattcgagtttgagtgactaggtcagagttatagttacgttatgagggtatgaattgtgaggttttctaaaatttttaattatagttagttttatagagatgatttaaggggccattaattaagtatagttagaaatcagaataagaaatcattgttgtggggcaaggagatgtcgagcgtgcggtgtgcacaacggggctccgttgggcatgctttgtcgtccacaataccaacgagactttgggagcaagagtcttcaatttaaaactttattttatctcatatgaatctttttttaatcttgattcacttggaaattttattatattataaatgttagatgttggttctcaaatctcatgcaatcttttcaaattgtgggaatatcaataccaaactaacaaaaataaagaaaacccatgtattgtaaacaaaaactcaaaaagtgaactatcaaaattaaagattatgttagctgcgtgcatcggttatatttcagatcattcagtaatctctccaaaacaaactcgcaaacatgcgcttaaaacgaggacaccttccttagtatatatatagtttccgaaactttagttgctccaaactctctattttactctttgagctagactacattatatttacgctttaaagaatgtcttcatgcattggtaggcactatatttcaaagcattggt

SEQ ID NO: 6320 - DNA, 6765 bp, Arabidopsis thaliana landsberg
tatgggattcgactcagcattgttccttgagaaacgagggatcagccggcaattaagctcaaaaaatggagaaaaactaaatttagatctttatatggagtaatcttttcaaatgatttaaaagaaatttatatgaaaatttgatcaatcaaatacttattaagaataagtgtgggacacatgtcccacctcctttcattatagatatgccaacggatttaaatgcctcacctttttttactgtagatctgccacacacgacggatttagacctggatccgtcatgagtgtggacatcagattttgtggttttcatcttcgcgtttgacttttttggctctgatggatcttttcctagtgggttggttgttcctctaataggcatgggtggtctttctctttttttttttttgtatttttaatatcgtgtttctgcaattatcctcttttgggcttagcacaatttattgttttacacataatttttaaaatatcataaatatgaaaacttttgacacaaaaaaggtaaaaaaccagaacttagggcttgattggttctcgctctaccacccgcaaacgcagcgtttacggttggtagcgattgttagcggttgttagcgattgacaccaatcatagaaaccgctagacattgctttggaccgctcaaaatcgtccgttttcaaaagctccttcccgcaagcgtttgcggttgcgggcggtagcggttaggttaaaaataaatctttttaattaaattaaataattgtggcttccacccaaactctaatcactatattaaaataatataatctgttatatatcttatttttattagaaaaccttaatcaatatattgtaaccctattgtctcaattatggcatccgatgaaaatcaaaatcaagaatcaaacataagtatcatctatcattttattcattcattagctagtgtaattttttaactatttcatagcatcgttgttttttattttattttgtattttttttagttttttgattgaatacatgcttcgatttgttttctcgattagaaatcatttggtcggacaaagtgatatattgtatttttatttggtcagaaaaatcaaattttctaatattatcaatttatcataataatatattgtatttttatttcttttaatagtaatatattatatttattttggttattttttatttaattactatcgcacccgctggtttaccagtcataaaactctcgcaaacgcactcattatcaaacgctcaaccagtcgttcaaaacgcttgataacgcttgaaaccgcaaccgtccgtttccgcaaactcccgcaaccgcaaccgcacccgctgcgtttaaaccagtcaggctattagaagcacaaagaaatggcttacagctgttacggttggttaacggtcagaaaacagagagcttagattaagaatggcaatgtaaatagtaaaaaatgtatctctcaaaagcaaagcgatacaaaatcatcgcaaaaacatatgtacaggagattagcaatacacagcaaatacaagaatcattcacaaagttgagaaattggtgacattttggctaaacacaactcacagctccaaaacgtcagatgaatgaagttataagagaagatcagaagttgatgagaacgctgggcaattgagaagcagatggtttaatctgatcacacactctccatttggaacctttctctttatcaaggtcgtacattaaggtctcatgtccacaaacccgtgaaaacagtagaaccttattgttccatactcctagtctcacccagaaacccccttctctcggaggcacaaacactgaactccacgaattctcctctggatcaaatactcccagacgtcccggcatgttcctgtccatgaaatacactttgttcctcacaactgtgtaggaatacaccgacactgattgctccgagtttaactcttcccatgtctgcgttttcgggtcatatatgtcgatgaacctcgaaccattgcctaaaaatatatcatcaaacttagtttaacccaatgtaccttggaatctaatatgagtcccttgtctcctacctacagcgtagagtttggaactgaatgcgaatgcaaagccgcgccaaacagggcgatttggacaatgcataagactccattggttagttttcgggttgtatacttccgcgttggaaaggctataagtatctgtggaatagcctctaatcacatacaaaagaccgttcacttcagcaaatgcaaagttgtaacgtggtatgttcattcccgcaagttttctccagctgcaaatatatttcgacatagtatcagaatacaaccagactggacagttctaataccaattatggtttcagagaagcttaggtcttttcttagttatagaatcccaaactgaataagaatttcattcttgaattgctttgtctaacaatcatgcagaaacttaaaatcaaaaagaatcttcactcactcattcattcattgattcctcaaaattcaaaaaaaaaaaaaaatcatcatggaatgccacatttgaccagattgtatgagaattaatgaaagagagattgagattgagacctgttattagcaggatcaaactcgtaaacatcagcagaggcagagacagtggtgctattgatgccagagccttccacctccgtatatcctccgaagaacacaatcttcccgccatcaagcactgcaacgccgaaaccgcgcttcaagggcccagggacaggagggatctggcctaacttgttcccggaggcgtcaaaaacttcccagtacacgtctcttccacactcgctttccattagaacacacaggaactcctccaccgttccggtcaactttcgaacagctgcaaaatgctggctcctgaggaatgacctccatcgccggcacacctgagaagtgatctgaaagctagacctcgggattttcgagacacagagctctgccacgtcatccgtcaagccaggtatgatcggagacgacgacgactccaccaccatcgtcacgatgttacttactcattcccttaatcactcattgtatcatttaataatgtgcaaaaattgctataaaaaatggtttgagtaatcatttggataacatacaaaagacaaaaacattgaccaagtgttttcgaatttaaaaatcaagactttgttaactaagcataaacaaacaactgcttactttttaaaagatagtgactttctattcaactgaataattcatatattatcttaaattttacttactcctcccacagaaaaggattgtgtattagaccattcacatagacaccattgtaaccttgaggaaaaagaagccgccacatcaacgtgagacaccacccagaggcaagtagagctaatcaacctctaaaatctttgcgcactttacttggatacgtgctctcttcttgtttctcttcaaacttgaatgactatctcgcttccaccttttttcttttgccaacattctagtcttgtcacttgcagaatatgacttaatcctaacagctcgaaattcctctgcgatgtcaggcctcataagcagcacttgtggcggttggttggctccacagatacgcccaaagtagtaaagagggtcaacatacgatgatgatgacaccacaattcctttcatgctctttggtttcacaagttttataaactctccaatctcctcataacatgaatgatcagagtagtgcaccgagtacatatagtcatggaacttatgcactgcagctgcttctaattctttcttcgcagaaacggtttcattcttcatacttgcagtaagaaaagaaccagagagcttgtcatctcctttgaaaggtcttttcacccatgggagacctgaaggcatgataccgatagttgggcacatcgtattcagcccctcgagagtctgaatactaaaactataacgagggacagcccgcactcttgtaagagatgtatcagtagtgaaaatgtcttggaaaccaaggagatgcatggtacgaagacgttctggccaaacccaaatctaaaggacatacaaagaaaagaaactcaactcttaatccatttggagtatgatgaaggaagcagaggattactataagaaaccttgatattgagaatgcgggaaacatgaacaaggaggtcttcttttcccaaagagtcaactgctatgatgatatcatgtgaaggatgagaagcaattatatcagcaacctgcaagtaaaggagatgaggaatataacaaagagaaacatgattcagggtttaaggcttttggattagggtttaggtcgaaccaattgaacagcgacttgacgggaaggaaaactgtaaattggattgcagtaagtgttatccagatagagaatgtcgactggaaactcgtcaatagcagcaacgagagtggttctagcttcgtctgatgcatcagaatcccaccggaagtctccagtgtagagaaaacatccgaaatctccccggaacaaaaacattatggatcctaccacattataccagcaaattcaaatttcaccactgagaaagcgaagccttatatagaaatagattagacttttatcataccaggacagtggtgagcatcgatggccatgagatggaggcggactgtggagccggaggaaggagagcggagggagagagatgtccaggaaaagagagggacgacgcgaagcaaggagaggtcgaaacctgggaaacgggagggaaatagagaggcggtggtgcgggaacagtagagaggaccttgggaccatccgccggagaggccacgagtgtgatcggagtgcatatgagtcaagaagtaggcttgacttccatttctccatcgatccactgatatcagaccactctccatttcggattccttgaaaattgaaattgcaggtgttttgcagtttcaccatttttgtttgcccacttagtgacgatgattccttccgtcttttgggccgtttatgatgatttatgattgggtctgttttgggttttacaaacgaatgaaagtgttacttgctcttacgtaacataacatttcgaactttctcgagttcaaaactaatccatccgttttatcagactgtgaagtcgatgtattggtcattatattaatgagcgttatgaacaaactgggcgacgatttaacaagtcttaactaatccatctctaaaaacatatttcaagattttactatgagttattcatctatcaataccaaggataaagagagattctttcagcaatccaaaaaccgataatcatcatacttaaaaattgagtattggtcttatagagagaagctaacaaaaagtattaagggtaacacaagtgagcacaaatagactgtctatgttatagcttaagatgagactcctttctttgactttgctgccaactgtgtctccggctgtgcaagaacccaacaaaaattatgtgagatcagtgatgaagatgaaatataagtatttgaagatattcagagaggcgttgggatcattaaattacctctttcttcacaggctcttctttctctgacaaaatcaactcaatgtggcatgggtttgacatgtaagctgcataagatagaattaaatcgagagtcagcacaatgtgaatgaagaaacaaacgttgtaaaaacagtcgaatagaaaagaagacatacgattgattcttccatgagcacgatatgtccttctcctctgttttgcggcttggttcacttggatgtgagaaatgaaaagggcatcgacatccaaacctttgacctgataaccaaatggtttacaaatttttttagtaaactaactaaaatcaccaagacaacaaaacaaatagagtcataaaaccaacctcagcattgctctcagcattcttgagaagatcaagaacgaattgagcagatttagcaggccagcgaccttgtccgttcgaatgcctgttctttgcctgagcggtacgaccaacaccacgacagaaacgggtgaaggggatagcttgcttgtgagctatgacatcttccaagtaccttttggccttgttcaatggtagcttccttatggcgtgcgctgtttctctagtgttctgtttcatacatattcaattcaaaaacacaattagacacatccaaatcatcaacaatgaaactagaatgacaacaatactgttcagtgtgattatttacctaatggcacagtaacatttagcacctcaaacctaatgtaaatgatttggtgtattgcaaattattgaacgactacatctatacaaacccagatactacaatcatgacctaatcaacaatactgaaaattgaaaaaggattcagagctaagctaaaatgtaccatcatgtactgaaccatatgctattagaagtaacattggctcacccattcacaatgaccaattcgattttcctgacatttacgtgaggtctgttatataaaacagaaccctgctttttgttaatcaggttttattcaaactacaagcttaatccccataggaaaatcacttaatctaattcatttttgagatccggaatcagtacaagaaatttaccttgaagtggaccctgagatcggctcctctcgccttgcaagctgcaaacgcaaaaccaatcgaaaccatttcaatgaatactcattgcatagcttgaggtaagccaataacagtgtagcttga

SEQ ID NO: 6321 - DNA, 2471 bp, Arabidopsis thaliana landsberg
  unsure (1)..(2471): unsure at all n locations
aagtacaaaaatatgcatagatttttttggtaggataaaaatatgtttagattttaattgtaaaattttattttaattttgttcttatggtatatgatcccccaaaaatttaattatcaaactaaaattttaattactataagtttacttcccttattttttgttttgtttttgtgaaatggatacgtatataaacgtcacaattggtgaataaaatctaaaatctatctactaaaaaaaatcaacttcacaagagatccttgggctgattcgattacaggtaacgtctctctctctctctgtgactctctcaattagtttgaaccagtcaactcgtaaagcccttgtttcctgtaattttccgaattgggtcttcccttaatttatcatttctcgccggaaaaactttgagaatttccttgtatttcacggcgatgctataatcctcctgaaagcgacttactgatatatattagtttattaggcaatgaatgtgaaatttaccgagtcaaacatgtttaaacaatgtaaaaggtgaagactttgatgaaaaaaatccaaactttggatctgtttcagagtcaataagctctctcatatttatatatgcgtgtttgattttgataaagaagggctttttgttgttggcttaatctgaatttttgacatatgcttgaagtgttgcaggcgattgttttgtttatcttgttttgggtttggttgtcttggatgggaggaagtagctctaaagagtcacctagaggaggtggaagtggtcgtaggtatgaacgtagtgtgtctgggagctcatcttattcgtctgcttgggaccagagcagctattatcagacaccaaaccatccatctgcgtctcctgtttcatcctataattctgggagacaaacaccgaagaatcttgagaggaagtattcacggattgctgataactaccgttccattgatgaggtttgatgatcactcttgtttttgtttgtttgtctcttaggtcgttgtgtcggtttgtgaatctctctattggtgttttgttgatatttcttttcttttaggttaccgctgctctttcacatgccggtttggagtcctcgaatctcattgttggtatagatgtcaccaagagcaacgagtggacaggttagagaatttatctcaatgttttagtatatgtttctttgacctggaagctgacttgggtgatttgatttaggggcgagatcatttggtaggaagagtctgcatttcattggaactactccagacccttatcaacaaggtatgtccatcattggaaagactttatcggtttttcatgaggataatttgatcccctgttatggatttggagatggtacaaaccctgattgtttttatgtagctgttaagttcctgtctagaatagattttaaggttggtttctctttgactatgcagctacaactcatgatcaggatgtcttcagtttcaatcccaatgatacatattgtaacgggtttgaagaagttctcatgtgttacagagagattgttccccagcttcgtctctcaggttgagtgagatgaataatcccttttcttctgcatgtcttctgaatcttgctgtactttttccttatagtttgctgcttctcttacaggtccgacatcttttgcacctatcatcgaaagggccatgacaattgtggaagaaagtggtggccagtaccatgttcttctcattatcgctgatggacaggtaaagattggaacctaattcgactagagaaagtatttcttgtatctatttgtgtttagttataatcattcccagacatttgtgtactgtatagttaccattggagcttttaactatgacaggtgacaagaagtgttgatacagataacggtggattcagtccacaagagcagcagactattgatgccattgttagagcaaggtaataaatactatttcctttgacgaaaatccaatttcaaactgtgtctctctaacttgtggtggattctgttgcagtgaatatcctttgtctatagttcttgttggtgttggagatggtccctgggacaccatgagacagtttgatgacaacatccccgctcgtgcctttgacaatttccaggtaataatatcaacatgtttctacaatagtgtagatagatcccttgtctttttcctggcaaatgtatcaatttcaaaggtttttgttgtctatttgaatcctttcagtttgtgaatttcacggatataatgtcaaagaacattgatccagcaagaaaagaggcagaannnnnnnnnnnnnnnnnnnnnnnnntgccgtctcagtataaagccaccctcgaactaggcttacttgggtaagtaaattcagatatttgcgttcaccactgcagcatttatgaattgatctaaataacagccaatttcgttccttgtttcgaatttgcagacaaaggacc

SEQ ID NO: 6322 - DNA, 600 bp, Arabidopsis thaliana landsberg
  unsure (1)..(600): unsure at all n locations
caattctttgtttttcccccaaagtaattttcaattctttatcttcaatttcgattttttatttaagttttccttcttttagaatcatatgcactaatacactgttaatctctcccattatgtaattttttgttgctaaataattttgacgtcattgtaagtgtaaagcctcaggcccaacaacaggaagcccaaactcttccccaatctcacaacgggacaaagttacagagctcccctctgcaacctctgcaacaaaagaagacatacacacaaaaggaaagaaacagagcagctacttcttcgccggttgtactctcaaaccgtttcagtcctatcatctcagaagacagtggctagatggtcgacacttgtaaacagatccaatgttgctacaaagatccagaatgttcttttgcttctataagtatgagtctctagaatcaattgtaatattgagttggtgtatcaatgaaagtaagattgagtacaaatctcttttcttctttattcacagtcatcacaagaaaaaaacagatatccctacattntgttgctaaaaaacaggaggaaaaacaaaanaaagtttcaatagtggaa

SEQ ID NO: 6323 - DNA, 527 bp, Arabidopsis thaliana landsberg
catgcctttgaaactctgtccatggactttaacttctttaacatgcgatgatttctgtttctgtatcttgtcgagaacgtcgccatctttagacatgtagcgtttgctagaatgtagcctgccacattcctctcttgctctgtgccttcatattgtctccattcaaagatctcgagatgctccgataaacatttagcaacaactgctggttcttcccagagggtcatcggatcattgtaattgaatttatgtttctgaaacgaaataatgaaacgatcactagtttaaacaggcactatgttcatcggatcattgtaacgtgcactagttcttaaacatcgttcgttcaaaaagaaaagcagaaacaaaaagatgatagaatgaaatagtgattctacaaatcttttttatcatttaaaagtgttggtaaagtttttatgttgctactagtgagcgtgtaaaaacaaatctttagcaaataaagaaaaacatcatcaataaagtgtttatgctatttgattatgagt

SEQ ID NO: 6324 - DNA, 1245 bp, Arabidopsis thaliana landsberg
caatccttgtgaagagtgactttaccttcttcactatacatccttcttttggagttgaggcttccgagctttaccctgaagtcaagtacactagtgttgatgagtttcttaaccggtttatctgaaaaaaacttcgtccattattttgtgtgtgtagctactgttaattcgagtttcgatatggacgcaaatcttatttcaagctagtctccttatttgatagatacaaatacataacataaaaggtccaagtacattatttgactgatataagaaagagaccttgaacagcattacaacaccaacaatctcataacggtgcatagtttcaagggttgaccttgggagcccatccagagatcacatacttttcctcggtcttagttttctcaaaagagtcgagcgagaacagagtcttcatgtagttatggacatggggaaagctctcagggacagaccagcttttgaaatggccaagagcaacttgaaggtggtaaagctttggtgctaagctaagatccaccgcggaaactctttccccggcgataaaaggaccatcgtgactcttgagatggttctccaaagcttctagctcaacaagaaaggcatgctaagagtcatcattggatctttgctcttcaagaaagtcccgaaagtaccgaaaatgttggagccaacagaggcaaattcagcaggagtcttgagaggtggatcaggatacttctcctcgaggataccaacggtggcgtcggaatcagtcacccacttgtcgtcgatcttaagcactggtactttcccttgaggactaatgtcccagaacatctcgtgtgatggagaagagcaaatttggacgacaagcattttgataagagccacttcaaatttgctgaaaaaagaataataccatattacccatcaaatccaatccaatggacagacaaaggacgaatactcttgacactcaaatcaaagttacagcaacaaagtagtagcaacaaaatagtaactcattacatgagtagtacatataattgacaaaaaataaaaatgtagctacagcaccaaagctctgaccctgccccgtttaataccaaaagtgaaagcctaactttcccatttattcttttcttttcattttcaactttcaactacacaatgtatgaaaacgacaaggaggatgaaatcgacacagcgaactcttgaccattaacaaaatgtaggccagtcttaaaaagcagggcattt

SEQ ID NO: 6325 - DNA, 1372 bp, Arabidopsis thaliana landsberg
agtcaaataatgtacttggacctttttatgtaatgtactgtatcaatcaaataagaagcctattttgaaataagatttgcctccatatcgaaactcggataaacactggctacacgtaacataagggacaagggttttttcagacaaattatttaagaaactcatcgacagtacttgtgtacttgacctcaggataaagctcagaagtcttaactccaaaagaaggatctatagtcaaggaggtaaagtcgctcttcgcaaggaccgtatggatcaaacccacaaaaaaatccattggaggctgggtctctgcaaatgcaagtgactcgtttaatactttggagtttggactgatgaatattggatatcagaaactgtttttatggtttaactgatcacctttgatggttttgaggagttcttcctcagaaacataagtcttgtcgagactcgagagtcttaccgatctttacatcccacaaatcaaccatatcgttctgcgatacaatgttcttgggcgggtgaatgtagggttgggtgagattttccaagaatgttcctgggagaaggcagttatagtcgcaccgtcagcagtcgtaaggtaatcggattttattgtggatgaccagcgattttcatgatttgcatcaaattgtttttcctcttcttctgagggattcgtcgtttttcctgatccaccgtacccatatgagcgggaacgtgtaagaggtttctactctgaaggctatccagatgacaactttgttacaccggaggaggaatatgaaccatccttgccctcttcagaatcaccaactgacagctgtcatgatgaccttgaatcacccgattcaccaaaatatcaaccaccggctccgggagaaaggccggaatgtgaaatctacaaagacttatgttctgatccccagacggtagactgggcggctccacctttggtaatttactactacgttcttactcttgtttatgcttaataagccgaaattctacttgttgagaaaatcagagatggaagacaccaggaattgtttcttctgtacgcggaaatcacattgttctcccaccgggcatctatcaagctagtggagtgggcaaagccattggagctaatatatgtaattgtgcaaacctgggagccgaagctgacgatgaaggccaaggcagcgaatgcaaacttctacgttaccttttcaaaccgtcacggttttccctaccatgctgtcataaggagaacaacgactagaataccaaaccagatgtcgcttgaattcaagatgttgatgcgttccaaataacaagtatcctatcgtcccattatgtattatcattttatcgatctgaaagttgtttc

SEQ ID NO: 6326 - DNA, 600 bp, Arabidopsis thaliana landsberg
  unsure (1)..(600): unsure at all n locations
cgatatatcagtttgaattataattctaactttaatttattatgtaatttaaataggatttgatatgacatgtttttattggttaatacaaaagaaggtgaataaaatggtttacccctagaagtgaatccaaatttcgttctaaaagaaatgaggtgggagttggtgtagacttttataaacatctaataccctgctggcagttagtagccccccataggctgttagtacacttcaaaaacattacttaatttcattttccaacactccacatattgcaatcacataattcaaccgaaaccattgttacatatgtggtataattattcacaaaacgttttttaattgctattgtagggtatttttctttaaacaatttagcggcagttggtgtgtccattttaatgatttcttatataaatttatttgggagtctattatatgcttctaaaagaaatgagatgggagttggtgtagacttttataaacacctaannnnnnnnnnnnnnnnnnnnaacttcaaaaacattacttaatttcattttcaacactccacatttngcaatcacattattcaaccgaaacaatagttacatatga

SEQ ID NO: 6327 - DNA, 1424 bp, Arabidopsis thaliana landsberg
aacaacattaccacaccaacgatctcataacggtgcatagtttcaagggttaaccttgggagcccatccagagatcacatacttttcctcggtcttagttttctcaaaagagtcgagcgagaacagagtcttcatgtagttatggacatggggaaagctctcagggacagaccagcttttgaaatggccaagagcaacttgaaggtggtaaagctttggtgctaagcttagatccactgcggaaactctttctccggcgataaaagggccatcgtgactcttaagatggttttccaaagcttctagctcaacaagcaaggcatgttcagatccgtcattggagtctttgctttttaagaatgtcccaaaagtaccaaaaatgttggatccaacagaggcaaattcagcaggagtcttgagtggtggatcaggatacttctcctcgagtataccaacgatgacgtcggaatcagtcacccacttgtcgtcgatcttaagcactggtactttcccttgaggactaatgtccaagaacctgcatcatatataaaaccaaagccaccaatttcaagttccggttaacacaatgctcgcacatgaagccaatccaatttccggttaacacaaagctcgtaccagttacaagtaaaatttcagagattatggctaaacaagttcaaactagaccgatcttaagggtttaggcgtgagagaaactgaccactggggtttgtcagagaggttaatcagatggattttgtaggtaagactcttctcctcgagtgtgagaagagcccgttggctgaacggacctaaaacgacaaacaaacacttaaattagtaaatttaccaacgatcaaagctcagaaactaagaattgcaatatcaaaagcttaatgcaaaacaaaaacagagagagaaagagaagatggttacagtcgccgagatgatcaggagcaccaacagcagctttcacacagatttccagagccatcttgattcttcttcctttgtttgcagagacggatgaatgattgagttaatcagtgagaaggcttagcttttaaactgaattattaccattctccacccaccagtgggccatttttacccgatgtttatcttttctcacgtgttatgcgttgcaagtgacgacgatacgaaacgacattgttactgatagggccatttgatttttggtcggcaggttttggaccgttcaatttagtgaaaatatagtaataaattcgtaccgaataatataatcggtttaatgaaactactacctgaaatatcgaattagatttggttcatatttcgtattgttttggttcgattaaaccatattaaaccactgtaactgtaatttattgtttcgccgtcccggaatgttcctgttgaaatccattttcgctgattttttt

SEQ ID NO: 6328 - DNA, 685 bp, Arabidopsis thaliana landsberg
acattattatgctatgagaccacactgaatctccaaattcttgtataattatcagaatcaatcatacatatagaatttctgttaagaaaaagaaataatgaaacatacactttactatatttttgacaaaaaaacatataatttgttagaacttgtaattattaaaataaattcattttcataaaacaagaaaggattggataaaaatgtacaactatgaatgagaatcaatgcagagatagggatattggaattttatcccaaaagaagacgataatatctcttatggtattattcttttttcagctaaatttaagtggctcttatcaaaatggttgtcgtccaaaatttacttttctccatcacacgggataagttattagaattaaaacaaagtgcccaagagtatcgatcccatctccttcaaattattattatcattgtatattaatcgataataagttaataacaaataaaagttatgaaaaatctctatgaagtttagtacaggagatgacatatcgaatccattaattcgatattaaggaattttctttttcttttcatatcaaacgatgattatataaaaccattttaccagtttaacaaaaactatttcgtatgtgaataaactatcataattcatcgtcttagcacaactttgtacgtacttacattatagcta

SEQ ID NO: 6329 - DNA, 510 bp, Arabidopsis thaliana landsberg
aggtagatggtgaactgatgacatagaaaaagggtggaatgtaggtgggttagctgagggggatgctgtaggtgtgatctgcaagcgcaaaactcggataaagaaagagcacttcccttatgcttaacatttgtttacacgcgccttcagtgcttcagggacacgctgcactcgcatctttgcagagacaacgctctactagcataggatacttcttagagcaaagagacgtacattgactgagaatagaatgtactcatggatacatgtgttataactattggaatttctcatagcgtaatgtaacatttaactacatacgaaaaaacgtgtaattagaaaacatacactattatgacttcatgctaactggtagaaactccgcatgaaaacatgggagaaatcgatcgctgacactggtgtttgtggtattatacatattggaacaataagcgcgtgtaacatacaccacactacttatcgactagatggcaatgggaaaaacaaaac

SEQ ID NO: 6330 - DNA, 2207 bp, Arabidopsis thaliana landsberg
aagaaaatagcttttattttaaatccggataaaacggtcatctaacatattaagaattatatttttttattaataatagagaaagatgtatttttcaaatgaaaactcaaaaacaagatagttttcaaaatatccctttatattttgtgtgctttactcggatgaatttacctaacctatctcgattttttgttttgttttgttaatatcagttattgtttagattatagagtattctaatctaatttgaataagccaagtttgaattataaaaaaaaaataaaaattgaataacataatgtttctgtttttattcatttatttagttttggttctaataaagaaatctgcatttgcatgtttaagccttttcaataattcttgtcgctttgatttgcaaaataacaagcaagcatgcatggtttgaaattttgctccattctttcaagttttcattctcttggtctattttttttttttcatcctttgttataacacttaaaagactcgaaagaattttatttgttggtgtatatgttaacatttataacttagggcttactttgattaaaacaaaaacttaggggtttattatgaaatataataaacttggaagttaaagactgttcttcttgtaaaacccctctcagattgctgcttcaaagagaaaacaattttgtttcgaaaagttcacatttttccgatgccgatcacattcttcgccgagatctgcatctgaattatcaaaatttctaccattttctctgtttatcaaatcctatgtcacgaattaatctccaaatcttactccttccaccattcttctatgataattcggattaatccaatagaatggttcgtgggttggtgaatttcaccggattatcaacgaggttattaaacatttgcgttgattcactctgcaaattccggaaattagagaaagctgagtctttaatcattgacggaatcagattaggtggggatcctgatgtcgtcacttacaacacactgatcagtggctattgtcgattcgttggtatagaagaagcttacgctgtgactcgtcgtatgagagacgccggaattagaccagacgtagctacgtataattctttaatcgccggagcagctagacggcttatgttagatcatgtcctctacctgttcgacgaaatgcttgagtggggaatttatcctgatttgtggagttacaatactttgatgtgttgttattttaagctagggaaacacgaagaagcgtttcgggttctttataaggatcttcagctcgctgggctaaatccaggtcctgatacttacaatgttcttcttgatgctttatgcaagtgtggctatatagacaatgctcttgagctttttaaagagatgcagagtaggtttaaaccggagcttatgacttataacattcttatcaacgggctttgtaaatctaggagagtcggtactgcgaaatggatgctaacggagctgaagaaatcgggttacactccgaatgctgttacatatactacaatcctgaagctatattttaagaccaggaggattagaagagggcttcaattgttcttagagatgaaaagagaagggtatacgtatgacgggtatgcctatttcgcggtagttagtgctttgattaagacgggtagaacgaaagaggcgtatgagtatatgcaagagctagttaggaaaggtaggagacatgacattgtttcgtataacacattgttgaatctgtattttaaagatgggaatttggatgcggtggatgatttgttaggagagatagagcggagaggaatgaaagcggatgagtatacgcacacgattatagtcaatggtttgttgaggacagggcagacgagaagagctgaggagcattttgtaagtatgggagagatggggattggattgaatcttgtgacttgtaactgtttggttgatggattgtgtaaagcaggtcatgtggaccgggcgatgagattttttgagtcgatgcaagtgaaagatgagtatacttacacctctgttgtgcataatctttgtaaagacatgaggtttgtttgtgcttcaaagctgctattgtcgtgttacagtaaaggaattaagattccaacatcgagcgagacgaacggttttgtcgggtttacggatgtctggatgttacggtgaagcgaggaaggcga

SEQ ID NO: 6331 - DNA, 2292 bp, Arabidopsis thaliana landsberg
ttagttatggcgagacggcaagtaggttcaacaagacgtgttggcgatggtggaagcttcccttttgcaggagctttacactcaaagtctcgatcttctccactactatctatttgccttgttcttgtggtatggtttgtgtatttcattgtcttccttgactgattcgattcctgggagatgaatggtatggttctaattgaaatctattgttgttttgtatgtttataatttctagggggcttgtcttctcattggttatgcttacagtggtccaggtaatgtatatgatagctctttttgcattatgtatagctctactagagatttttctcatcgctttcattttttctcgaacacaggtatatttaaaagtatcaaagaagttagcaaagttacaggtaatccttgtttctcattgttcagtacatgtgcttaagttaatacctttatccgcatcgatcaatttatcagcagtttaatccattcaaatgcttgacactcgggtttgatattttttttgtccaatttgttatgaattctcaggtgactattcttgcacagcagaagtccaaagagccattcctgtacttaagaaggcttatggagatggcatgcgcaaagtcttgcatgtgggccctgacacatgctcagtggtttccagtctattgaaagaagaagagactgaagcatggggtgttgaaccatatgatattgaggatgcagattctcactgcaagagttttgtgagcaaaggtcttgtacgtgttgctgatatcaagtttcctctgccctaccgggcaaaatccttctctcttgtgattgtgtcagatgctctggattatctctcacccaagtacctgaacaagaccgttcctgaactcgcaagggtggcttcagacggtgtggttctttttgcaggtaaactatcataaaacttgagaaaaagggttgctaataaatgtctttcaagttttggtttctaattcttgaacttcaactgctctaggtctccctggtcagcagagagctaaagttgctgaactctctaaattcggccgacccgtaagtttactatataccctgttctcctgaatcctgatgattaaatatgaatccaccttcatcgttagtgtttaatggcattagcttagtttatgtagttagtcattagcatctctttatgattaaaacactgtgtagactgtagagttaaacacatgcttaaatgacagttaccaatctttcacaaagtttttcaagatagagactacaagtacaagacttaatacttgcactcttatttttgttggcaggctaaaatgcgtagcgcatcgtggtggaaccgctttttcgtccagacaaacttagaagaaaacgatgcaccaagcaagaagttcgaacaggctgtttccaaaggattatacaaaccagcctgccaagtcttccacctcaagccattacattaaccagccaccaccaaagcctactggttccacaccaaagcatatttacacgtagagccgcacgcgaaaaaaaaaaatagcgtaatcgatatttctccttgtattttggaacaggtcagtttttatccttcaatgttgtatccgccaacacaatttttcctattcaattaaatcataattattatcaccaataatccccacatgaacacttgccatctttgaagcaatgaaaccgaaggttatctcttacaatgatctctctacctgcaaccgcagacataaacttgatagcattgtgacaatccccacatatcctcaaattcttaactacaactaattcttctccatctctagtcgacatcaacccaaaagccaccgctagcttctcgctgtgatgtcctaaccgcatttcttcgtccccttcgcctgcttcatcctcttttaccattgcccatttcttatccatcacatacccaactttcttcatcttcttcatcatctcctctagatattcattcacttctcgtatcatcggatgagaccaatcttctgcgacgaatacatgctttttcttcttcacttcgatccaactacatcccggtttcttccttatccttttccccctcattgatttcctcaccgaggccatctcttcccatttcctggcatctgcatacatgtttgctagcatcacatatggcgtggcagctaatggttgcatcaccataagctcattagctgctctctctgcaagagccatgtttttgtgtttccaacaagccccgagcaaagcagcccaagcaacagagcctggcttataaggcgt

SEQ ID NO: 6332 - DNA, 3826 bp, Arabidopsis thaliana landsberg
ggctctcgagtcaccaatatttccaaccaccaaatcctcaccctaaaagaattcattatgaccatttacagcaattaatacacaatcgatgatggtcttttggttacaagcagatctaagctgagaacctgcttgatcaaagtgactgaagttgttccgctgcagaagcaatcaatagttggatgcattttcagctctttatctatctgctgacaagacttgagcatcgcatgtttaagaggcagatacatctccggaagttcatcgttgttcacatttggatttaactcacaccattgctcatccatagtagtaacagactcagttttctgcacttgttcagactcagttgtctgcacttcttcttcctctgtacatttgatctgaaaaccattggcaccaactaagctgctttgatctgactctgaggtcattttcaactgggttaagagtgtgaagggcaatgtatctcggactttcttggcaaccatatgaccaaatggtccatgtccatcgaatacaccacaaaacactgtatcgtctctcgaacaaaagttctggaaagtgaagtagttttcataagttagaaacttgtcttgatatgtgaatgtaacacaaaaggaagtaagcagaaatagaatctaagtgtcaagtaactagtggtccctgtagaaacaggtcaaagactcaagacagcacaagaacaacacaaatggcaaaacaaagccacctcaatcttcaaagcactaagctttgtaatggtcccagaaaagtgatgaatcattccaagtttctctctctcttactaagcactagcaacaaaagattaatgcaatcatgttctgaagatccatttgatctgtaacaaaacacatccaaacaaatcaagtagcttcctcatacattgaacaacatttctccaccaaaataccctgaaattgtcctcttgagtattgataaaatccaaatgggttgcaaaaaagatgaatttttggaaagataaaagaaacgaacctcaaagacgagcatggcgtcttggttagtccctttcttgccttgctgtgtgtaaagacatgcaatcttacttgaaccattcgaaaccaaacgacccaaaacctgtggaatcccttcgatatcgccgccaccctttaaatctctcggccgccgccatcttccggagcctgatctctcctccacagtctccgccgtagtggcggtggagcttgcttctccaggttccttcccagtagtcctatctactgaataacacagacccattttgaaaataatccgaagaaaaaagagctcaaagcttttaaagaaaaagttcaaattttttaaatcgccgattgaagaaatctacgatttttctgggggttgtcggcaatgattacttgctcggcgaagaatagagcgaaacgagaaaaacgaaatccagaaaagagcttaaaaggctcaaaaaacgaaacttggcatctagaaaatccacactactttagcttttagttttagctttagctttagggacctctggtttattttctcgggaaaactgctattttctcgggtaaaaagactcatacttttgcatattgcgagaattaaaaggaaaaaagagaaagaaaacagaacatcacaatctgttcaaatcagattcttgtgaactgatttaggattacttggaaacagcgacgctaatactttcagacccacaacaaagaccaacgtttactactaactccacttctggatagagagaattaccaaaaaaagttcatagaacaattgagagagagagagaaacgcaatggtcagacaaaggtcatagtttggttccgcacgtgagatctttcatttgagtgttttttcttttcttttctgaacaataataattgtgggaaaatttggttcttggctgcatcgtatcatccatttcacccgaaaataacccaattacgttttgccacgtgtcaaagttgtcgtctgtctgtgtgtaatggttcgaatttgattgttaattaatggttagttaagtattcacaattgatcagccacaagtccttttctgcctttattaaacctaaattctgatttctgaagccagccaagttttggaaaaaaatataataactccgttttgtctttcttccaaaaaatgatataattgaagtatccacttgtgttaacctttaacaaattttaaaatcaaataaatgttgataatatctaatgtgttgtttacttgatttggccttttgggaagtacataattactaaccaattggggttttcaattttggtatgaattaaatcgttttaatttatacagattgaacaacctatgttaatcacatcttcatatatatggtataagcatctaatctataacacaaaatataaataaagatgtacacatatgagcagcattaaaagagaagcaattatgactgtaatagaattcacggattgtgtgctggccaatgcgacacgacgacaagttttagttgtcccactgacttgttgagagagagagatgcattcattcacacgcatccaaaaacacatacaccccattagtttatcaagatgctatgtttttaatcaccatctcacgaaaatgtttctcaataacgctttttgtatcatcaatattacacaaatccttatgtaaccatggttataaatagctaccatggtacataatacatattccttaaacaaacctaaaaacctaaaaaaaaaaaaaaaaaagataacacagaatgatagtagggactagggagtgatgtattttatgaatcaaatgacaaaacatctgaaagcaaatcttaccttcattagatgtattatcttattaaaaatacttattgttgatgatgaaatcaaacttctttacttaagcacatatcttctcaggcttcttaggaaatcaaacctggaattttaacaggcaagtgatgagttttactgatctttgacatatagtggaattgaaaagattgcatataagaacgattgtgtttagttactcatacttacttgggcgtgttcggttttgtatttctgaagctcttcttctgcacaaatgagcctatgaacacacacaaaaacaagtgagaatgatggattttaatctaaactatacaaggagatggtttcgatagttacctccattgcaggtcggttatgtcatggagcagttctttctctctttcgtgtgctgcttcaagctatgattcaacagaagaacagttccattaagctcaaaagtctgaaggaatgtgattcaatacatttttttcttgcaaacaattgcataccatggatttctcagttgggggcacagtaggttgttgtatacttccttgttcaactgcacgtccatctacatcaaagaaataaaggaaatttcaatccagtggcaaggaaaaatgtaatcaaaagggaaaattgagatggaaaaggagtgaagttgcacgaaataaacctgtcaactctctgttggtgagtactttcatcatatgcaaaatgttatcctgtttaagggacaatttcaattatgcaatgaactttcatattgttatgagatatataaagaaaggaagtagcgtctaagaagcaaaagccataccctttccaaaatattagtttgcagaactggatacaccagcgggtaaacatatgagctggttaggtttggcaatgtgacatcagagtgaggtagagaagcagaggaatgttggcagagcacctacataaccgcaagtaaaaatattatttgttttcattaagaaaacttgagatgaatagttgtggtaattcacat

SEQ ID NO: 6333 - DNA, 586 bp, Arabidopsis thaliana landsberg
  unsure (1)..(586): unsure at all n locations
ctctaaagtgttccatgccctctaccaaagctagcgattccttgacttatccattctcggcctccaccaccacnnnnnnnnnnnnnnnnnnnnnnnnnnnnnntttctcgagcaggggcactgtcaaacacctgctagaaccaatagattaactagttgaactggagttgattgcaaataggtaaaccttgcattgaacttacattttgaagtcctttgagagactttgcatacaaatagcaatcaagaagcgtaagcgacccatcacgtgttgtggtgagacctccccacggatgaacagacggatcttgcatctcatccgcacatccgttactaacaactgcgttacagtcatattgatatttggatccccctgatttgttgcaaggagaattccctaatgatccctccggatgcaaggacttcccatgcataacaatctgcaagaaaccttcgagaagcagaccattgcatctggaacaatacatgttcttacgagcttgctcaaacaaagtctgtttgtcaatcttaaagagttcctgcctagctttcggtgacagctcacttcagaactgcacacaagttc

SEQ ID NO: 6334 - DNA, 3792 bp, Arabidopsis thaliana landsberg
  unsure (1)..(3792): unsure at all n locations
cctaaaattccccacaagcgacggcgtgaaaaccatctagggaaatcagaaaaacgctcgaatctgtttcatggcagcgcataagctcaggaaccccgtcactgaatcgatggccgacacgagtcataagaaggccaagcttggccaagctgaagaaaaatcaatttccgagcagttatagcaactaaagatcgaggaggctcgggaatctgcaacaccaactcccgatccggtaatctccatatcccgtgacgacgaaaagcccaagcgatgcgtagaattcggcggagatctaggagaagagttaacaactgaactcaccgctttcctcaaagagaacgtcaatacgttcgcctggtcccgagaagatttgctcggagtaagtgttgacatcgtgtcacacgagctcaacatcgacccgacgttcaaatctattaagcagaaaagaagaaaattgggtcgggagcgagcagaagccgtgaaagccgaagtacaaaaattactgagaatcggctccatcaccgaggcaaaatatcatgattggatcgcgaacctggtcgtagtaaaaaagaaaaacggcaaatggagagtctgcgtagatttcaccggccttaacaaagcctgcccaaaagacagcttccccttaccgcacatcgatcgcctcgtagaatcaacttttggaaacaagctactgtcattcatgaacgctttcgctggttacaacccgatcatgatgaacncgatggttcaagaaaaaactgcattctacacagaacaaggcatcttttgttaccgagtaatgccattcggactcaaaaacgctggggcaacttatcaacgtttcgtcaacaaaatcttcgcattatagatcgggaagacaatggaagtttacatcgacgacatgttggtgaaatccttggcagaggaagaacacgtatcccatttgcgcgaatgtttccagcagcttaacctctacaacgtctaactcaatctagccaagtgccgcttcggggtaagatccggagagttcctcgggtatctagtcacgcaccgcggcatcgaggcaaatccgaagcaaatcgaggcattgttgggaatgtcatcacctcagaacaagcgagaagtgcagcgcctaaccggaagagttgcggcccttaaccgttttaactctcgttcaacagacaaatgcttagccttttacgatgtgcttcggggaaacaaaaagttctagtggacgatccgatgtgaagaagcttttcaagaactcaagaagtacctagcaacaccacccatcctcgccaaacccgtaatcagagagccattatatttgtatattgccgtatcggatactgcagtcagcggagtgctattccgagaagacagaggcgaacagaagccgattttctacgtctcacagactttcaccggcgcggaatctcgctatccacaaatggagaaacttgcttcagcggtcgtaatgtcggctcggaagctacgaccctatttttaatcccattccatcgtagtaatgggatccatcttacacagtccaagccaatcaggacgtctagctaagtgggcaatcgagctcagtgaatacgacatcgaatatcggaacaaaacatgcgcaaaatcgcaggtcctagctaattttatcgtcgaattacccaccaaagaagctcgggaaaacccactcgacacaacttggctcctacatgtagacggctcgtcatcaaaacaaggctcgggtgtaggcatccgcctcacctggccaacgggtgaaatcctcgagcagtcattcaggttaaacttcgaagctaccaataatgtggccgagtacgaagcacttgttgccggacttaatctagctcgggggttaaagattgaaaaaatccacgctttttgcgactcccagctcgtcgcgaatcaattcaacggagaatatacagctcgggacgaaaaaatggaagcctacctggttcatgttcaaaagttagtaaaacatttcgacgaattcaagttaacaaggattccacgaggagaaaattcatcggccgacgccctagctgctctggcctcaacctccgacccgaacctgagaagagtcatcccagtggaattcattgaaaaaccaagtattgagctcggcgaagaagaacacgtcctcccgatacaaatcagcacggatcaagatgacctagacgaatgcagcccaaagtggatggaacccatcataagctatatatccgaagggaaattgccctcggataaatggaaggctcgtaaactcaaagctcaggctgcacgtttcgtcttaatagggaaaaaactttacaagtggcgattatctggacctttgatgacctgcgtagaaggagaagcgacttgcaagatcatgaaggaaattcacggcggttcgtgcggaaaccattctgggggaagggctttagccatcaaaataaaacgccacggattcttctggccaacgatgatcaaggattgcgaagaaatttcaaaacgatgtcaaaaatgtcaaaggcacgcgccgacaatccatcagccagccgagctcttgtcatcaatcgcctcgccatatccattcatgcggtggtcaatggatataattggacgtatgcatcgctcgaagcagaaaaagttagttctcgtcttgaccgattatttctctaagtggatagaggccgaatcttatgccagcatcagggacgctcaagtcgagaacttcgtgtggaaacatatcctatatcgccacgggataccttacgagatcgtacggataacggctcgcaattcatatcaacccgcttccaaggcttctgtgataaatggggaattcgacttagcaaatcaacaccacgatatcctcaaggaaacggccaagccgaagccgctaacaaaacgatcctcgacggtttgaagaaacggcttgctgctaaaaagggctcgtggtccgacgaactcgagggtgttctatggttgcatcggacaactcctcgtcgagccacgggagaaccccccttcgccttagtctacggaacggaatgcgaaattccagccgaaatgatggtaccgagcctgcgccgaagtctatctcccgagaacgaaccagataatactcaaaggctgctcgacgaacttgatctgatcgatgaaagaagagattcggccttggttcgcatacaaaactatcagaatgaaacgcctcggcattacaactcaaacgtccgacaacgaagattccatgaaggatatcgagttcaccgaaaagtttttcaaaataccgccgaaccaaacgctgggaagctcgggacgaactgggaagggccatacctgatctctaaggacgtctgacccggagtatatgagctcgccgacttaagcggcaaagccattccaagatcctagaacgcaatgcacctaaggaaatactacaactaaatccacggactaaacttgaactaccaggtggcttgatccctgaaaagggtacgtaggcagctcgtcttcggacgagttcagctacccccctcccccccattaaaaaaggggggaggtgggtnccgtatatccatactcgcatttattattttgtaaagttttaacttcggcataaataataattcgattcacgatttttgaatgcttcggctaatacgatgagcgacggctcggagtatctcttacgcctgctcggcaacagcgcgctatataaatacaagataaaatccttcagataacttctgctcggaattcttttatcttcagaaacctagt

SEQ ID NO: 6335 - DNA, 3215 bp, Arabidopsis thaliana landsberg
tcctaatttagaaaagattatataaaaccaaaaaatgttatgtggtatgtataatgttactatatataaaattaaactataaaatataaatgtattagagaatgatacaatttgcataacttttatatataaaaaataattcttaaattttaaaaattactactttaaaaaaaaaatcacgggacgggttaaaaaattacagaacgggttttattttggaattgggttatatggtggatgtatttgaatcaatatttataaaattttaaaatattattagtatgctgttttaataggggttaaaacttcagttttttaacaattgtctcatagattcgtggtatagcgttagttaataacaattataaactgtaaaatttaaatattttataaaaataaagtttgcaagttttaatatatattacttttagaaaataaatcgtcccgcggtatatcgcgggttaaaatctagtttgggtttttaaaataacagtatttgttttgccactcatgataatttgtttgtggacatgttgcttcttttaattttaatttttttacaagattcgtggaaatgttagttgcaatatattaaataattttttacaaaaagaaaaagcaatatattaaataatagaggacaatattgattcgttttgttggttttaacataaacagttctcataaatagaatactagcgaaattcccgaacctagttcttgatgtggatggagagcagtcgacgatactgcataaagccgtgacacaaaggaacttggaacatgcgaggaagataatcgacctctgcccttcattcgttagcgttactaacgtcgacggaaacactcctcttcatttagctgccgaaattggaaacgaatttatcctctggaaaatgttgaggtgtggagaagcagactgcatgaagattaataagcaaggacaaacagcattcatattagcatgcctcaacaatcacctcgatgctgcacttaccctcgtagaaaatatgcggtctatgacgatggtggaacttgatgcagcctttacaggacagcaaccaggtttaagattatcatcgataaaagttatataacatggttttatttaagcaaaatataaatctaagccaaaaaaattatttgtgtttttaaaataacataatttgttttgccacgcatgataatttgtttgtggacatgttgcttcttttcatatatattttttttttgataagattcatagaaatgttagttgcaatatattaaataacagaggataatattcattcgttttttttgttttaatataaacagttatcatagataaaatgctggagaaattcccgaacctagttcttgatgtggatgaagagcagtcgacgctattgcataaagccgtgacacaaaggaacgaggaatatgcgacgaaggtaatcgaccactgcccatcactcgttagcgttactaacgtcgacggaaacactcctcttcatttagctgcggaaattggaaacataaatatcctctggaaaatgttggagaccggagaagcagagtgcatgaagattaataagcaaggacaaacagcattcatattagcatgcctcaacaataacgttaattctgccagaatccttgtagaaggaacgagttctatgacgatggtggaacttaatgcagccttttcagaacagcaaccaggtataacatgtttttatttaatcaaaaaacaaaccttagcaaaatattttaatagaatttcgtggaaatgttaattgcaatatcttaaataaatggaggataactgcagatatataatttgataactataatgaaattttgattgttttgttaatgttgatatacacagttatcatagattccatactagagaaattcccatacctagtttttgatgcggatgaagagcagtcgacgctattgcataaagcgtgcaaatcaggaaaccttgagatggcaaggacactattagatgttgatcaagaaattgcagaaaaggtggataaagatggtttgacccctttgcatcgcgcggtgataaagggttcagttgaaatcctcaaggagtttctattaaaggctccttcgtcattcaacacaaccacacaaggaacaatcgaaacagttttccacttagctgcgaaataccaaaaaaccaaagcattcatcttcatggcccagagtgcaaacataggccaacttctttacagcctcgacgcagaggacaacactgtacttcatgttgccgcctccgtagactccacttctgtaagtctatattcttttctgttgcaacaagagatttgaaactgaaaatatgtttcgagtgttaaatttaatagcgactaattaaatttcatgtttattacagctagtacgccacattctttcggaaacaacaattgatgtcaccttgaaaaacaagaaaggttttgcagccgttgacctaatcgacaaagagggtgtagactttcctctgctctctctatggttccgggatgaagcagaaaaaattcaacgccctgcgagatatgttaaatttgcacatgaacctgtagaacgcatccgaaacacaaacaatggggagaagttaagttctgaaagccgtacgatggatttgctacgagaaggtagagatcctagaaacaaggaacgtgaaatgcattcagagagtctacagaacgcaaggaacactattactattgtcgctgtcttgattgcatcggttgctttcacatgcgggataaaccctcctggtggtgtccaccaagacggacccttcatcgggaaagcaaccgcagggagaacattggcttttaagatcttctcggtagcaaacaacattgctttgtttacatcactaagtatcgtcactcttctggtcagcattatatcctatagaacgaaagcactgaagatgtgtgtggtcatagcacataagatgatgtggttggccgtggcatccatggcaactgcttatgctgcatcggcatggatcactgtgccacataacgagggatctaaatggttagtctacaccacttctgctatcgctagcgttgcgctaggaagtatgtttgtgtatgtgtcatttatgatggttaaacacattttgaagaaggataaattgagacgtaaccagtctcacgggaaaaccccaagtacgaccttggacatggaagccgctggtg

SEQ ID NO: 6336 - DNA, 865 bp, Arabidopsis thaliana landsberg
cacaagctctgggagaataagggattcagtgtgagaggcctaatcagggccaggcgaagaggcaatggtttgtgatccagccttcaagccaaaatcgcactttttctcgtccaccctcattcccttttaaacagccaatcattattcgccccaacaatacccccactaccccaaatcagccgagtgccccgggcactcgattccctgccttgcccagctcttcaactgggtgtttcaattgcggcaagtcgggacatttcatcaaagactgcccatatcctaagcaaaatcaatcaaatcgtccgcaaggacctgggagatcagctcagcccaaaggaaatactgtggggaaaaatacaaagaagacggggcgtgtatattacacccaagtggccactacaccggaaggagagccggtgatgatgggtacgtttcccgtggccagtcaccctgcaattattctttttgattctggtgcttcacatacattcattagcaagaaatttgtggagcaacatcacattgcatgccatggatcagaggatggattgataattcaggcacctgtgtgacacatttatactagagaagtggcctatggagtgccagtaacaatggccgtgcggaactttcctactaacatgagtgttctgaagggccaggatatagatgtaagtttgggtatgaattggttaacccaacacgaggcaattctcgacactgaactcagaaccgtcaggttgagcttataacctaagaaaagattctttttggctctcctcgcaaccaatctagccaaagcttctgttagagtagacgaaggcattggaccgtagatctagaacatgccggtagtatgtgagtt

SEQ ID NO: 6337 - DNA, 454 bp, Arabidopsis thaliana landsberg
tcatagatttcatgacgaatcgagtatgtgtcataaaatctatgacgatttttttatgattgtcattgtagtccatttaacacgcactttttgtgacaatgaccttttcgtcataatggcgtcaccaaaatataacctgtgacaaataaacactagttagagacatgatcataatgtcacagaaggcctaaaaggttgtagtgtatgcattaaccaaagcgaatatgtgctaactaaatactgaaatactaaacactaaatagttaacaaagtaaatactaactaaataataaacactgattaaccactaactaattactacagaaatactaactcattaccttgcagtggcggcgtgtaggacggaccggcggtgaagtggttggggccgaacggttggtgccagcggcagtcgcgcctacgcggtgcgcgcgacgcttggctcgtccgcggg

SEQ ID NO: 6338 - DNA, 615 bp, Arabidopsis thaliana landsberg
ctttgatcagtattgagtgttgctttatgcttggccaaccaattcatacccaaaataacatctatgtcttggcctttcaggacgatcatattggtaggaaagtcccgtccggccaatgatacgggcacttgataggccacttctctagtaaagatttgtcccccgggtgagtgtattttaaatccctcttttgattcatggcatgcaatgtgatgttgctccacaaatttcttgctaatgaacgtatgcgaacccgaaaatcaaaaagaatgactgcagggtgattggccacgaggaacatacccatcattaccggctctccgtccggtgtagtggccacttgtgtatagtatacgtgtcccgtcctcttgaaatttttgcccttaacatttcccttgctttgagatgaattccccgatccttgctgattattcgactgattctgcttgggataggggcaatctttgatgaaatgcccagacttgccacaattgaaacatccggttgaagaactgggcaaagtagggaatcgagctcctggggacccggctgacttggggcagtgggggcaatattgggacgaataattatggctgcttgaaaggggaggatggt

SEQ ID NO: 6339 - DNA, 397 bp, Arabidopsis thaliana landsberg
tgcgtgcgagtctagagactccccatcctgtcattcagtcctcgcatgaaacaattcttcttcttcagatcggtgttcacttgatcgattgcatactgtgacaaatgattgaatttattgagatactgattaacagtatcccctccttgcttcagcttcataaattcttcttgtgtcatgtgaagtgcaccttctggtatgtaatgttcacggaaggccaacttaaattcttcccatgttatctgacgattggccggttgaacggcataaaatttccccaccaagtgctggcaggaccgcgcagttgctgggctgcgaacaagggcttctgggtttcagaacaacgcagaagtccagacttttgctcgatgacacgaatccattcgtctgcgtctaa

SEQ ID NO: 6340 - DNA, 583 bp, Arabidopsis thaliana landsberg
ctgtcgcagtatgccatcgaccaggtgaatacggatttaaagaagaagaactgttttatgcggggactgaatgatcggctacaaaggaagatggccacatgtattgacctcacctatggaaaggctgtcagcacagccttatctgtggaagcaaaatatgcaagttctgggaagaataagggattcagtggtgagaggcctaatcagggccaggcgaagaggcaacggttcgtcatccggccttctagccaaaactgtactttttctcgaccaccaacattccctttcaaacagcccattattatccgccccaacaatacctccactcccccaaatcagccgggtgccccaggcactcgatccctgccttgcctagttcttcaactgggtgctttaattgcggcaagtcgggacactttatcaaagactgcccataccccaagcaaagtcaatccaatgctcagcaaggaactgggaagtctactcagcccaagggaaatgctgtggggaggaatccaagaagacggggcgtgtatatacactcaagtggctactacactggaatgagagcccgtgatgatgg

SEQ ID NO: 6341 - DNA, 1610 bp, Arabidopsis thaliana landsberg
ctcaaacctgatctcacttaatattaagtaattaatattcacgtttcttgtaaaaagttttgttcacgtccaagaagataccaccaacgagaccaaaatctccaaaactcgggcgaaagaagactgcttctggagcagattctgaagaaactcaaacccctcgccttggtaggctaagcctagatgagagagcttctaaagataacccaactgcaaagggaattatgccaacagttgatctgaagaagcaacctgtgcgcaagtcacttccaagattgccatctcagaaaacagttctccccgatggaaaacccgccccagcaaaagctgccataatcccagcaaaggtaagacctgagaaaaagaaacttgaaaaagatgcagaaaccgtaaaccagacttcacatcccacagaagaggaagcacaagtgacagtatcatccaatgctgatgtagaagattcacatgagactgtatctccaaggatgaatgaagacagagccgacaagtccattgaggtatctgaagcggttgctgttgagcattaaaaactctgcggtacgatcattactctcaagactcatcatatctcttgcattaagtaaggaggacaagagagaaagaaaccgtataatatttatatatatcttcagccaaaacttatatgagaagagatgggtaaaaagagtggacagaatcatgtggatttggttctaaaggttgctgtgcttttatatattcctatgtttgatggtaatgtttttaatcttttaaggggtttttttctttcttttatgtcaagatcttccttctttttctttttgatgctttcaatcctaaaaggtgaatattcaggagatactgctttcgttctgtctgtgtattcttttcttttccttttttcttatttttgctattatggcttatgtgcaaattcttttgttatataattgattctctgctttccaaaattttgtggctatccatcaaagtgtaattagtaaacatgatattgtaggagatggattttgagatttcgacaaaaacgtacatgaagatattgtagctaagaggttgaattagtggtttgtttgcggataacctctagcaagaaagttttatgggcaaattgcaactgtcaaagacataacgacagttgagcgtgacatctctcgtaaccattgatcaataattgattcgctcacaagtctcattttcacaccttttttagctctaaacctaaggacacaaaccactattatcttctttgcaatccgcattttgcaacaataatgcggctttggaccttttgatacacattagcatcaatctacttcaatgtgtgcagaagatattttcctgattaaaccggacctttgagttttcattgtattacaccggtttaacatcagcacaaagagtcaagacacaactgatacagatgggttataggtagagtcagagaaaccatcctcatgatgtttactctcttcctcttccacttcttcttcagcatcccatagaaaccgagcatacgacgcaagaacattactgcaataaataccattcatatatcaaaattataatttttatctatcaatgattacgta

SEQ ID NO: 6342 - DNA, 1723 bp, Arabidopsis thaliana landsberg
ttaaacattggccgagtccgggtgattataatttcaatgttatccgtggacaaccaagaaaacatctcaaatatcttcttgattgcgcagtaaaaatgggagctggtggaaatgaatgtaacattgaaataagagacgtattttctcggaacaaaagtttttcgaaagattgttgtcgggtgctagtgaaaggtggcagaaaatgctacacagaatggatgaaattattttttcaattctatcaactcaaccgttttagttctaacgcgatgatcaaaactaacgaaacatggaacaaatgttctaatggaactgaatctatttcaccattttctggttaaaatcgtaactaatttaattgttgttaaacaatggtttagattgattgtattgtaccaactatttaaacaaaaatattatgtcaaatttcttttatgttatttagtgattccttttgtcaaacattgtcaccgttgaactgagagtcttgacagcattgtgggtttaaacaacgcaagactggcttgtgtagttgggctcagccctggacacagcaggatgaaacatctgctgtggcccccatttttttccaccccaaaattcaccttttaagtataacatatcgaaatgaaaaaacagatcttgacgacaaaccaaacagaattcaagcattacgaccaaacatcatgcgacgcaattgaagctctcatgaatgacatatagaagcaaccttgtggagcacaccatcaattttgcatctctgtctttcactctttttgtccatcttctgattaaacagtttgatttcatccatttttcactgtttcttgttactgttcctttttcgctccttaactagtacatgaatcataccgtaggttttaaggctcaaccgcaaccacttccactaccatgtgagattcgtttctgtcttcattcactcttggagcttgttcttgtgaatcttctgggtcagcattgtcgtctacaggacttgactggcttagggcatccacatctttatctggtttctttctttccgactttgcctttgttgaggctgttacagcttttgctggagccaccttcccgttggacagatttgtcttttctgaaggcaacctgggaagtgacttgcgcactggtggcttcttggtctcaccgggtacacttccttcaacaaccgggttatctttaggagttttctcatctaagctcaacctaccaaagcgaggggtttgaatagtaatggcttcttcagaatctgctcgagaattggtcttcttccgcccgagttttggagattttggtcttgttatcgctatctacaagtatatagcatttcacatgatactatgtacttacgacatgagagaaaatgagaaagtaccttctttaattgcagagatgtaccttctttaactctgttttaggtagctgaggttcttgatagaaggtaggcataggtgtggctttgaagttcagactcttccttagcatcttaagctcagcttcttgagtttcctgcaagtattccagatgatatttacagtagaagactgagcatatagacactttaaatgaataataggacattttaagaaaaacaagagggcatagaacacaaccttggacttagcttgtacgggattcttttcttcttctttcgcatggatcttttcctcaagctttgaatagagctgcatcgacatgacagagaaat

SEQ ID NO: 6343 - DNA, 1110 bp, Arabidopsis thaliana landsberg
gtttccagaactttgatgtggaagattcttataacaacttcattaatttgaatatcccaaaggagaatgaaagaaacagaacaaacttttatttcatcttagaacaaaacaccatatccctcacgcattccgattacattcatcaaatccataaatcaaaacaaaatagataaatccaacacacaatcacaaaacaaactcaagcaacttgaacttgaattgtctttggtttctttggttccggaggaggaagtttctgaacagtaaccttcaacacaccgtcatgacaaacagcagagatcttgtccaaatctgcattttcaggcaactgaaacttcctcatgaacttacccattcttctctccatcctcacatacttcacaccttcgttttctttgttctctctctgcctctctccactcaccacaagcacattgtcgttctcgacctgaaccttgatctcatctcctttgattccaggcatgtccacgacgaatgcatatgcgttagggtgctcgatgacgtcagcaggtgtagcagccattgccttagcgtctcgcatgtaaactcgtgaagggttgttgcgggtcttctcgttgttgtggtcttcggggacttcaagcatgtcttcgaggattgagattattggaaaccttcctaaatccattgttagttgtgttgtgtttgctttcctgattctttgattcttggctttttgttttctttgatgagtttgatgtgagaaatgtggggacttaaataggagtggagatggatatttctagaggattgtcgagagagcgattgtcgcggtctttagaagttcttccgtattgttcgagaaacgtcttggtcgttctggtttttgtgaactctgtaactcaggtttgataaaatatgagccataactttacagaatttttaatatctatatgggcttttaaattaggaatatatcaaggcccattccatatgtgaaaatagttcatgattcataagattagtgttttagcaaattaaagaacaaattttgtgatttaaggaatccgaacaatattgctcattttaaagaatacattcaactggaaagtacatacaattgctgaagac

SEQ ID NO: 6344 - DNA, 4718 bp, Arabidopsis thaliana landsberg
tgatatcagtacacaagttttatatgatatttgcctttttccatacctgctaacccagttattaacatagttttgtttggggttatcatatattttcatacaagtcaccttagtatgtatctattattataatcgcttataattatacatgtaacacaactattatacagttgttaccaatttaagttgtagatgctaacattgattcatatgattattagcacatatattatcccgtaatcagtaatgttcattttattggataatgttgtatcatacttttcttataatgtgtgtgtaccattgcctcataagatttattgatttccattgtaacatgtttgttacgctccggttacgaatattgacttagctgggtttagctatttaacatcgtaaacaaaagtactaaacaatatgatagcatttaaccgaaggattaacataatttatcacattcatacaaagaagtttgatggggatctcccttttcgtaatattacatttgtaggatcagatttcgtacgtatatacattgaaaatttcctgatcctccttcttcaatatttatcatacattctccgtttccaactttcctggcaccattatttcaaacctccctttactcaaaaaaactccttcactccccaaaaaatttctctttatcccagctaaggaccctacacgaaattacttgtttggttacaatggttgtgtgtgtggaaggagttagtgtatccatgtcggagacgggcatgataatacgccaatctcagatatggaactatgtggtagacgccaaccatcgtctctacacatatcctttccttgatcgtggcttctatagcatgggaacatggaattgtaaggagctgaaattctctgcaggtgcatgttcgctcccaaaggtttaccgtaaatgccgaatcttctttgtctcgcacttcataaaatacatcaccaatcttaagtacaacataacctgccccttttcaaaattttctgtgaccatctcattcacctttggaggttaatgattcccctcgagctgtgcagcttcttgcctaagagaaaaccatgaaataagagttgttcgaagagtctctagtagtgatattactggataatcccttgccatggttaagacattgtttagcgactcagctatgttgcttgtcatgaaaaaaatacctatctcccacaaaatgcgaccgcgtccaatgctcaaaaccaatgccttcgaggtaatcagcacaagctgggtgcatagcccttacctcgacgaagatgcgattgaagtcgcttggacggtaagctcgggccgcactagccacgagaaagctcaacccttccgacttgaatatcgagacaatgtttctttttagatgcaccacgcatgccgcgtgcgatgacatcggataaacctagaaattagagccaatgtatcagtgttattgataaaacatactccatggataaaacacaaactataaagaaactgacgttcgaatattctgttagcaactaatagaaaacgtctcagctaacactgctgcgttattttaacgacactatttacaaccgttgtcaaaataaaatataagttatcctgtaagatcacactatcaatatgactagggaaattccacagacttttaagtatggataactccttagttaacaggtaacagtaaaatttatatatcatttaaccctattgttaacgattgataaatactgcataatagtggggttatagattcctataaaaataactatattcatatcgctgtaatattaatattatccgttatcagtaaataacttaccttccgcatgcttgcatatatcgatgagtgcctgtctgaaacgaacaccaaatccggatcatttggtatggcgtccgtgagcctctccatgaaccatgtccacgcatcgtcattctcgctgttcactatcccaaaagcaatggggaagacttggaaattggcatcttgagcgcttgcagctattaagcagcccccgtatcggtccctcatatgcgttccatcaatgactatcacctttctcatataagcatatccttgtacagctgcatctagggcaaaaaacaattacctgaattgctccacacctttcttatctttctccgtatcaagggcaactagagagttagggtttgttttcagaagaagcatgaaataaggctggatcaaagcgtagctgcccatcaccgaatctatcgcattatccatagctatttctcgagcccttcatgccttccagtacgagacatttaggctgaactcatctcggagcatcttcctcaactcgttaggccttggcctcctaccaaccccaaaatactttgttctcatcagtttcccagtcacagctgtagatgcttgtttgtgaaagtctcctctggtgtctacactgcaggtgtgatgttaacttgcacattttatcttgaaccggtcactatcctccaattttgtcgcataaacacgccacaggcatgtatgacttacgcacacagtgaggacaatgttagggcaagacttggcggtaatgaagtgaaactttcgccgtatcgcatgtattgcaagttttgttgcacagtcttgattattcttgaacagtctgcctatgaagatatcgtctccttcatagccggcgtcctttagagctcgatgcaaataatctgaaatttaccatatggaagatatgttaatgtttaccgaggtaaatacccgaattactcttaatatcttagcgtctgacctaatggtactatactatatcgtctaaaataaatgtcatatattatcattaaaatttgtagatacattaaaacttaggtgccaatccattttatatcctaacatgttttaccttcttctcccggatcgtcaaaatatggtggggcgtccttgtcatacaacacggttggcactggtgtttctttcaaatatatatctgccaacctccggcgaacatggatatttaactcagtaacttgttcttgagttgcaacaacctcccccctaacaatgttgttgactatacttatttttggtgtatttatgggtgccatacgcagcggtccgtcggggtctgattagtagtgtgccacatcggcttcacctgtgtatatgaataagaagaccgttatcagattgtttcctttttgttacaagtcaacatgtatgttattcgataatgtgaactgtatttgataacttacctatcctggccaaacaattgttactagatatttcatcttcgcccattagatcctcactagagaagcttatactattcgacggtgtcttgaatgtcgagtcagtgaagataacgccactattgataccacgtcaagagctgggtccgcattgccaagtgtaagacgaatggcttcctccgggtttgaacttgtgtgccttctaacctcgttatccttagcattagccggagtcatgtcgagttatcctaccatagagccagccagtcgtatttctctttcctgcatctctctcagcattactgctgttgggttttcctccaaactgcgaactccaagtccttaatgctcttatcgtccaagacacgttctttccctttagcggttgcacttggttggccttgggatatggttcttggtgcgacgtttcctacactagtctcccccgtattttctcgaatagttatgcccccactccttactatgtgggttcctacaccatacttgtcaagtccgagatcaccaatcacactattaccagcgacgttaccaaataacattctcgttaccgccgaatcccaagctgctcttgtttcactgctattccaatacttatcggatatcgcttccgaggtcatacctcctatatctaagacgcttcggtaggaatttactgttgacgcccccaacatcttttgtatggtcttgacctttaggtgaacttcctctagatcagatcgaatcgccataaacaaagtcatatcctcgtcatcgagaatatggatcgggtttgccctctgccaatctgggcccatcatccattgcggccactgataggatagttccacttcatcttccggtcttagcgtcagtctttccttcacagcttcaaccactttagcgaacgtgtctctctcacggagctttaccgccaagcataacccatctaactcggctacgtgttcatagcatccggattcatgttttttccactctcctcgaaccagtctaacgaccatcgccatggtgcttgtcgataaacaaccataaccgcaacgttagcagacaagtatgacagaagttacaaaccctaaggcagggtggactatttattaccctctatcgaagttgaacaaaataactcgagaattaactgcttatctgagtctctaattactttgatcttgttatcttcgcaatagtaaatgtaggttcttttccgtcatgtgtttctacttttgttgttgaagcaacaatgatagtggagtaacaaatagccaaacacgcaacccaaataatatcatggctcatcattacgattctttttctgtaacttacgccggcgggattttttggcaggtttttgtcgccgcattaaatgcgcaatatccatatttcctaaatcttttttcagtcccctacaagtatcctgaacaatagggttaaaataggaatattcgttttgcatgattta

SEQ ID NO: 6345 - DNA, 1286 bp, Arabidopsis thaliana landsberg
aatgaatattattacgatcgctagatttgcggctacgaaaagtgtacgactaatgagattgcgacactttagttattatggaaatagagaaaggtgcgaaacacttgatcttgccaggttggtttttttaaatttgaaaatatggagaaagaggattttcgcgtagtaaaaaatgtgaaccgtagcgtgaaaccggcacgtggggttcacgtgaagagctgaccttcacggtatctttattcaccggcactcgcaatggtttgggcgattaagagaaagtaacaaagaacaatgctatttgcatttctcaaacttttttaacagaaaaacactttttggttaacaaaattcatttagcagcatataaagtttatatgatcttgcttctcctcaccacgaagttaacttgtagcagcttcgaaagtaaagatatccttagttttcgagctagaaaaaatgcataatagatatcgaatccacttttaaaccacgaaaatcagggcctgttcaataaattaagagttccggtataattctttaaaattagtattttcagactaaattttttcttaaacaatttttcatgctaaagaaatatttaaaattttaatcattggctttttcttcgtactaaaaaatgttttgaacttttttcatgctaatttttttttaaaatgatcatttcttcgtattaaataatacatttggacctttaaatttatccacaaaaatgtggacatagaacatttgctcctctcgctctcctcaagagccggccctgacgaaaatatgtcacaaaaattaggaactacgtttctagatgtttcccatttcttttttttttaaatcgtttcatcgttttgaatgtttcacttctgcaaatctgtttccgtttacatgcatcttagataaccacatagttctggtattcttaattttaatactgtatttccatctttatgtggttactcttatttttcaataagtgattctggatgcatatttattaactgtgaactgaataatgccggttacaaaaatttgattatctaactaagaacagcagtctatgaaacaccataatctgaagctagcgatgtcaaaatcgtaccttcttatttagttcaattgcaaagatgtttctgttagaattgagtccatgattaaaatatcatatatgctatagtttatatttaaaggcaatggatgttatgtgttacatatcatatactacgaatgggtgtgagtaagagacgtaacttatcggagaagttaaactgtacacg

SEQ ID NO: 6346 - DNA, 571 bp, Arabidopsis thaliana landsberg
tgacggtgtaatcattttttttggtttatcataagtatttgactaattgttaatttaacttagttttgacttgaggaaaaagaaagacaaaagtgattcaaccataagcatatagttggaatattcattgttaatttaaatttctgatgggtttacaaaatttggatttaaatcctccaagttatttatatacaatgaaaagaaaaatgagttatgagaaggaaatttggtatagaagaaaaagcttttagcctttaaggctttaaccaatagaagcaacatatcatgtgttgacaaaaaaaatgaagcatatcacgtcacgtgatcaatgaatttaggagggtatactaatactattcaccaaaattatcttatagaacttcattaagaaattgaaaaaaaaaaaccatacattgttatgttccgattgggaaagttaggttcggtgcaaaggcctaccccttatatgaatccgaaggcgtctgatcatggtgtgatcatcaaatattcatataacaaaatgcttaattgttgatatgagaacaactatatgaaaactatttcatagctt

SEQ ID NO: 6347 - DNA, 2454 bp, Arabidopsis thaliana landsberg
  unsure (1)..(2454): unsure at all n locations
aggcaccgactcatgtgaattctagagagatctacaatttttcaaatatagaagatttctttatatatataattaaatatttgaaatgtaaagtgatattctgttaagtttatttaatatttttttttttaattttgttaattttaatttattgcatatatttttaattaatagtatattatatttgttagtatatgtatgcactgtttgttattattgtaaattattgttgtagctcagcggtatattgctccatatgagtccaataggtcatatgttcgtgtcattgtggacgcggattttgcatcattattttctaacgaatcgatgtcgttttggagatctaaaaacgatgtcgtttcgatttaacagaaatttctaacagaaagttaacgctgttaacggaaatttaacaacgtgcccaaaatggccaagtcaacgaaacttgacaattgtttaaaaaagtcaaacgaaactttgtgaattaaatgacatttcaaaagttcatgcttttttatccaaatttgaaagttcgcgctttttttgacatttttcccattatacatatatcttgcatacaatatgaaaatttgtctacgtgtaagtcatgacgagggtatcaatttcaatttatcttgaagatagcaatgtcacgaacgttacaatactagaatgagatttttgctccaaatttgacttcaatactaaattcataagaatactgaaattatgttggattagtagttacttaaaccaaataatgaaagtagtacatgtatgtgttatactatgtatatataacttataaggatgtgatcatcatgaaaagatgcttaaaaattgacaatttattatatcattaaaaatttcacattttagaatgtttgaagtgaaaaactttatgaataaatggtcattagtaagtaactatcagtatcatttttatcaaaacgacatacatcttttattttgtagtatgcaatatgcattaactaatcacaacattttcgacaaacttgagaataatgtattgattgccgccacgagactaggcccacataaaaagaatgggtgaacagaggcccatgaactagattaaccaatgcataataacaaagtgatattagaattgaatggagacaagtgtgctgcgtacgaggtcagacaccattcatgaactacaacaagaacattgtacgaagtgagagaactagtcattagtgttatgtatatctctttaagaatgattgatgattttacagttttaatcttctatatttctatttcttcgtgtggaaaaaaattctcaaaccaatctgcatttgtattgccttatcgttgttccccagcggaaaaggatatgctcactgcatcagtttcagcaaaagagataaggggagccttattctcaatgccaaatgataaatctccgggtccggacggttacacttctgaattctacaagcggtcatgggatataattggtgcagaatttgttttggcagtcaaatcgttttttgaaaagggttttctaccaaagggtgttaatactaccattctagctctcatcccaaagaaactggaggcaaaagaaatgaaagactatcgaccgatatcgtgctgcaacgtcatttataaagtcatctcaaaaatcattgcaaatagattgaaacatgttctcccgaatttcatcgcgggaaaccaatctgcatttgtaaaagacaggctcctaattgagaatctgctattagccacagagttagtaaaggactatcacaaggacacaatttcgggtcgatgtgctattaaaatcgacatttcgaaggcttttgattctgttcagtggtcatttcttaaaaacgttttgtcggctttggactttccaccggagtttgttcattgggttatgctttgtgttactacggcttctttttcggtgcaagtcaatggagaattggcaggctattttcaaagttcaagaggtctacgtcagggttgctctctttccccttatctatttgttataagcatggatgttctatcaaaaatgcttgatcaagcaacagaagcaaagcaaattggctaccacccgcagtgtaaaagtattggtctgtcccacttgagctttgctgatgatctcatgatcctttcggacggaaaagttcgatctatagagggtattgtgaaagtttttgacctttttgctaaaagttcaggtttaaaaattagtatggagaagacacccatatatctagcgggaacttcagaagtgtctcaccaatggatcaaagaccggttcagttttgatgtagggactctaccggtgaggtatttgggactccctctagtaaccaaatgcctannnnnnnnnnnnnnnnnnnctcttatagaacagcttaaaaagaagattgggtcatggacagctagatttctttcctacgccggtcgcttaaa

SEQ ID NO: 6348 - DNA, 1662 bp, Arabidopsis thaliana landsberg
  unsure (1)..(1662): unsure at all n locations
agacgtaggtaactcggttactcctaactcggagactcgggttttgactcggaaacctggtcaacacggttcttcttcgtctcggtctcttacatctggctcaacgagatctaacgccagtgggagttacacgtcatcgtcaacgacttcgtttagagccatgcagttccgtaaactctccggatgttacgaatgtcacatgatcgttgacccgagcaggtaatgacaccaaaaattaattatgagtaagtaaatgttcttctgaattatatttttgtaatttcattttcatgttcttgaattttaggtatccgatttcgcctagggtttgtgcttgttcccaatgtggagaagttttccccaagcttgaaagcttagagcttcatcaagcagttcgtcacgcaggtaaggctttttttttccttttaacaaaaattgtttgactttatcacttacctcaaattaattaattacgctttagctacaattttttattttttggtgtgtggtagtcacatttttaaatttaaccctaagtatctagtgagattttcgtaaatgcgaatggcttggcaaagtaagattatgttttgtatccttggaaaaaaacttaagatctcagtccatgatttgacttgtgaatgatgatacaacctttgtttgtttagtattgattgaataattagcattaacacatgttttccggcgtataggcccttggatttatcgatagatttaccataatgctaagcaaataattaacgaacatgctttcattaatatatatcttagacttcgttgtttcttaatggaatcaagatctcagtgttattgtcggtgattatatcgatcaaataagttaggatgatttggccgtatgttacagattgtttttggaatagagattcatacgtatttttagagaaagatacaaaagagaataggaatataactggagaacaagatatattctatggtctccaaatccgtcgttttgcttggaaacacttaccatgcgatgggaccattgtactataaaaagaaacagctgtctctgctcttaactaaattcaatgtccccctgaaatattacgtgtcatttttcaattcgacagtatcagaattaaaacccctcacctgacaaaaaccgaattatagaactgtctttaatgtcccaaaaactcagatttttgttttgacttgcatatttttcctgattttatgagcaaaaacgttgtcgtttaattgcagtttcggagttaggtccggaggattcgggtcgaaacatagtggagatcatattcaaatcaagctggcttaaaaaagacagtcccatctgtcagatcgaacggatattaaaagtccacaacactcannnnnnnnnnnnnnnnnnnnnnnnnnnccgagacgcagtgaaggcgcgtgcacttcaagcaaccagaaaagatgctcgttgtgccgccgacggcaacgagctcttacgttttcactgcaccactctcacttgttcactcggagctcgtggctcttcttctctctgctctaacctccctgtttgtggcgtctgcaccgtgattcgccacggtttccaaggaaaatctggtggcggaggagccaaaaaaacaaacgccggtgtgaggacgacggcgagcagcggaagag

SEQ ID NO: 6349 - DNA, 1598 bp, Arabidopsis thaliana landsberg
ggtcttccctaagcttgaataattggagcatcatcaagcagttcttcacgctggtatgcatcacttaattgtatatgggtttttgtatgaaagtagtgaaacttgtatatatattacatttgataacatagatcaaaatccataaaaatatgtgggcactagtaggtattatgccgttatacatcagacataaaaaaaattcttctttctaaggaaatttttaaaatctatttccccttttggatcagacataaaaaaaaattgataaagcagacatataaagttcaatttaactcaaacctgttttggtttaattaacacaaatcttttatcaaaaataaaattttgatttgtatcctcttttggatttttctttttgattacttttgaaataattaaataatgtaagcaattgtccgtcttttagttttctttatctcgtaattggggccataaatctggcatgtcctgtcgttgtttttggatttatgtttttttttccttcagccatttttggatatgtatttagttatgtacagcagcagcatacgtatattattattacagattcattgtacaaaaattataatatcttagctcgaaatcacatattaggtgacaaacaacatcattaatctatcactctataatggttctgatttttcttttctctaggggttttaaaatattaatttcaaccaaaaaaagaaataacggtttagtggcttttccaaatatattttggaatttgcagatatagtagtgaactagcttggaaagaaaaacagcctaatcatacttaaccaaaatgatattcagtttttatttatatggatatagagcaaatgaaatataattgaagaaaaacaaaaccaaaaccaaaccaaatgaaaatatatatgataagcttttagtctttttttccctttgttaaaaggcttttatactcttactagatggattaatcatacggaaatttatatcgaccatgtaatattattacaaataaaaacgttttgtaatgattttgtagaataatttatgattcttggattccttctagttgtggtgaatttaaggatatccatctctgatctctatatcgacaaaaaaaaaaaaacctatgtgaagatgtttttgtaatgtagttaattttgattacagtgtcggagttggggccagaggattcagggagaaacatagtggacatcatcttcaaatctagctggttacgtaaagacagtcccatctacaagatcgaacggatattaaaagtccacaacactcaacgaacgatccaacggtttgaagattgtcgcgacgcagtcaagtcccatgcacatgcctctaccagaaaagaggctcggtccgccgccgacggcaacgagcttctccgcttccactgcaccacagtttcttgctccctcggctcacgcggctcgacctccatttgctccgccatccctggctgccgcgtttgcaccattatccgccatggcttccacgccaaaacggtacgtgtaggcaatggtgaaggaaaagaggagattaagggcgtgaggacccctgcaagcagtggaagagcacacgatgcggta

SEQ ID NO: 6350 - DNA, 634 bp, Arabidopsis thaliana landsberg
  unsure (1)..(634): unsure at all n locations
agtgaaaattagatgaattgtccttgtttacacttaatcatcttcgcaagtttttgttactatagaatttttatagaaatctctttcttacaggaatcatttgctcctataccatcaagaaggttcggggcaatgtcttttagacgatctcagattgaacaacaaccccatgtatgtgcctaactaatacagcagtcatagtactgtgatacttgtttgaattggtcaattacttatgtcatgttgttattatgcaggaatttgttgacgtcctactcaaatgtgtttnnnnnnnnnnnnnnnnnnnnnnnnnnnnnnnnnnnnnnncatttacaatatacaaatgtctcatacactggaaactattcgaagcagagaaaaccagtgtctttgaccgtattgttcctatttttggttctgctatagaggtaacctggaagtttaaatagtaatcgctttatagtgtttatggtcaaagaatcattggaaatatggcgtcttgaatactacttctcagaaggtttaatcaatatgcgttgatatatcttcagaacccagaagatgatagcaatttggcttattggctaacaaacacatttacactgctgttcttgcttcaaagaagcttgaaatc

SEQ ID NO: 6351 - DNA, 1701 bp, Arabidopsis thaliana landsberg
cattaatgaatatacacatatatactaccaataatagagctttgctgatcacatgtagaattgggatcatatacagtataagtgataaatttgattgtatattaatattctactgctgcaatattagctgcatcggattgtaaactgacgaaagaagaaattaaaaccaagcttgcgtcaatcacttggtgagtttcaagtgaatgtgggtttgttttgtgaattgattcaatttgaacgagctctaaagttatgtttatgattttgtttttctttccaggaaagtgtactttctttcttgttatctggaaaattctccgggaagtcaaaccgcgatttcgacggattcttgtcggctttgaggattctgatcaaactatttcttcttcacaatatcacacagaattgttttcattttataggttcgcatttatataagttgaaccaaacagaaaacaaagcagttgaaggcaaagtgtgttcaatacaaagagtagacgacggtctctgcacgagatcaagacagcataggagaagacggaagcaaaggaatcgttcgtggagaagctcaatgcgatcgatagatgccactatagcgttggaaagacatttgtctcgttcactgttcctgaaaatattgattcaaaactcagcagaatcttagagattcagctaaatgtgtctgtgtcaattacattttatttgctctatgtttgaattttctgcttctggacactctcaagaatcatactgaaatgttcgaacaacagaaattccactcctgtctggcaacagcttcttcatgtaatactttgatctcctagaaagattgattctttcccgtcttgcctctggtatcatctcgattggacattcctgaaacccgcgtctcacaaaccagtccgcggttctcgttgtcagcagaaatagcatctcaagttcaagagctgacgctttcttctcaatgtaatctgcaaaatttcacagtcaagaaaccggggtttttcttaccagtagattcgaaacacaatgctcaaaagttttgtgattataccgagcaatttatctccctggccttgtccacggcaatctgatgcaactgcgatagctgcaacttctccacatttttcttcaaagaaagggaacaaagccgcgcaagcgataatctgtccttccctttccacaaccacaaacgaatccaaagctcgcagaagctgaacaacaaaatccaattatcctttgatgctaacacctaaacaaaaagaagtagaatctaagctagggatatggctaaaaggcgaacctcctcatcagttctacgaactaaagccccagattcttccaggggtttgattatttgtctaattccagcaagatcttccactttcgcctccctgtttccttcatatacatcactgtgacaagaatggtccatagttttgtaagaaagatcaaaactttgcatgattcgaaactgaaaacagttgtgtataccttgccaccatagtccccattccatctcttttgaaaagctctaacaatagcactccacttatagtaccatccaataagtgaactcttttgacaccacccttcaacaaatcaacgaatcagaactggatgtaaaaaacaagcacaagagttagctcaaggactcactctgcaaacgaacgctgctgcagccagttcagagagatatcc

SEQ ID NO: 6352 - DNA, 1586 bp, Arabidopsis thaliana landsberg
  unsure (1)..(1586): unsure at all n locations
caatagcactccacttatagtaccatccaataagtgatctcttttgacaccacccttcaacaaatcagggaaggagaactggatgtaaaaaacaggcacaagggttagctcaaggactcactctgcaaacgaacgctgctgcagccagttcagagagatatccattcaaacggctaattctctcctcaccgccaatagcaaaaccttgctccccagaccacaaaccatttccgttgtcaaatccnnnnnnnnnnnnnnnnnnnngactgagtttttcccaaattggtctcccaatatgattgttgggagtcgtcaccataccattgtaaccaagtggttcaggaaaactacttatgcctccatccccaacagccttcacgtaattggcagcgatctcgctttgctgtgcccgttttctgactaatgtatctgcttcctgaagagtcaagaaccgaacaagatgtccattctcatcaagaattggaccatccattatgcaaataagcttatctgctcctatagctaaagcacatgctgtagcaacctcataggtactgcagtgtagaagtaatgtcccaatatcagggtgacaaaaacctaatgtcgtcaagatttagcaagtaaattattaccaataaagagagcatacttgcaatttaagacttctccggtactggaatggcccatgttcctcaataaaactacagaaccactatcaagcctctcacggattcgatctacatctatcttcttcactaaaccagttgctccaaaatcaacaccatcaacaacacctcttctctgccatgacaattaattagatcgaacatgacaagaatctacatccaacctaacatatgaagaaagtgaaaaactcacctttgctgcaaagaagttaccagtatctaccctaacacctgtttcatgcaaacgactactatcaccatgtcggcgtatattgtaaatagaaggtccgggagatagtttggcctcaatcattacagatattgctcccgcagcttccttagcagcctgaagagatgctgagtctgtgactctgtaacgacccacatatgtaggctcgcgtcctgaaactcacacacctttaggctccatctgaacaagctcaaatgttcatatttatcacaataaggttgcaacttcgccatcactaactgatgacaaaccattcactatttatcacaataaggttgcaacttcatatatatctaaacaagccaataagaagataagtggcaaggttaattttttctgacctctctcagctagaagctggtcgatttgcacttgagttccaggaactagaacaaacttaatgcccagatgatgaagaaatgctatgtcctgcacacatgtcataatgatttcactttggaatcctctgtacaagaatgtaaatctaaagccactggtcataaactagcttcctctcgcacactcaaatctacatagttgcagatgaatcaataagacgattctcactatagaaagacaaattacatgttcaagtttaaagcaagacaaacaatcaaacaccttgcgtgcataaaccaacaatgagaaat

SEQ ID NO: 6353 - DNA, 1222 bp, Arabidopsis thaliana landsberg
ctctcggtacctccaccatacgacgccgctatcctccgctactcgtcacctatgcgccgccgcttctcccgaagctcgaacgaagaaactcgagcgaatcgccgacgatttactcaaactgaatcggattgagctttacgattactcactcctcttcagccataaactaggtctcaatcgctacggttccgccgtagctgttaccggatctgtcggcgacgcgtcagcttctacggagacgaaaacggcggagaagactactttcgatgtgaagcttgagaaattcgaagcggcttcgaagattaaagtgataaaagagatcagagcattcacggatctgggattgaaagaagctaaggctttggttgagaaagccccagtgattgtgaagaatggtcttactaaagaagaagctgagaagatcatggagaaactcaaagcggttggtgctattgtagctttggaatgaaactgagattgagatcaaaataagtattttgaatttttcgaaatcaaacaatgttgaaagcttttgagaattatgaatattgtttttacaatatggttctgtgtgtttgcttaatgtgtgtcatcttcttgcttagattctcataactgaaatgccacttatatcagggattagcttcttcatgtaatactttgaatttcttgaaagatagattctttgacttctactctctggtatgatctctattgagcattcttggaaccctcgtctcacaaaccaatccgctgttcgcgttgtgagtaggaacagcttctctaacccgagagatgaagctttcttctctatgtaatctgcagaaatagattgtgttgatgcattgaggatctctggctttgctttgcaaatgtaacagaaagggtttgagtttattcaccgagcaatttatcgccttggccttgaccgcgacaatctgatgcaaccgcgattgcagcaacttctccgcatttgtctttgaagaacggaaacaaagccgcacaagcgatgatctgtccttccctttccacaaccacaaatgaatccaaagctcgcagtaactgcatttaaagatcaaaccctttagcagcgtttttaaaccgatgaaacaatgagatgttgaagatagtaagggttgatacctgctcatcagttctgcgaactaaaatccctgaatcctccaagggtttgattatatgtctaatttcctgctagatcttc

SEQ ID NO: 6354 - DNA, 740 bp, Arabidopsis thaliana landsberg
agcggaagtgagattttccactttttttattgttcatacgttttttagtcttattaatgtcgttcataatgaccgatgattatcttgggtcttgttgtggcagagaagaggtgttgttgatggtgttgattttggagcgactggtgaggtaaagaagatagatgtagatcggatttgtgagaggcttgacggtggttctgtagttttgttgaggaacttgggccactcgagctccggagaagtcttaaattgcaagtatgctcgctcttctccagagaaaaatgcttcttccattaaccttagaaagattaaagttttctaattccactttacttctgcagtacctatgaggttgctacagcttgtgctttagctataggagcagataagcttatttgcataatggacggcccaattcttgatgagagtggacatcttattcatttcttgacacttcaagaagcagatatgttagttcgaaaacgggcacaacaaagcgacatagctgcaaattacgtaaaagccgttggagatggaagcatggcttatcccgaacctcctaacaacaccaatggtaatattacttctgctcaaaacgggagagccgtttcattttggggaaacggaaaccacactccgatctttcagaacggtgttggatttgacaacggaaacggattgtggccttgtgagcaaggttttgctattggtggtgaagaaaccctaagccgcttaaacgg

SEQ ID NO: 6355 - DNA, 533 bp, Arabidopsis thaliana landsberg
aagaatcacaagtctcaagaacctaaatctaccaaacaatacacaaattaatccaggtattaacacaatctacaaaccctaatttcaactccacaaacccgaaaccccaaagaaaccgccaaagatcaaaaacaaacactgaccttataaggagacctaagaatcttgctcggagacttaacaggactagggctaacaccagtaaccacatcagaatcaaaaggcggatacaaattcaaagacctgtgcgtggccgtcttaaacctaaaaatattccccgacggagaaaacccattaacaacatgacttttatccggcgtcaccggaccaaaaagcgccgttttcaaaagactcgcataagaaccagccccatcttctttcccatctttcttattcggcgaagaagatgccaaatcgaaaagcgcgaaattggaaccagatctacttggaataaacctatctgagtaaataggtttcgaaggagagcgataatgattcgaatcgattaaacgggtgattcgtgactcgagtga

SEQ ID NO: 6356 - DNA, 10292 bp, Arabidopsis thaliana landsberg
  unsure (1)..(10292): unsure at all n locations
aaaatgagcttggttctcacgttttaagagaagagtctgatcaactgaaaatcttgaaacttagccacatggccaacaaatacttaaaggaacggattttgcaaatccgctttctataaaaaaaaaacttgggatcatagttatgaaggtttaaaagcctcctcaagcaaatacttgttcgaaaatgaagcctccttaggcgataaatagattagttcaaaaaataactttaagttttggttatttgggacaatccccatgaaaaatggacgcatccattacgaatcaccaggcgtctcaaactcggcgacagtcggttcagggtcgaccgtctcagcggctgctgactctagcccagtcgtttcaccaatagggggttgcttagtagaggtctccagttcaaacccggaaatgtcctcatcattcgcgatgatcaccgtttcgctatttaccaccaaagggacttcaggcaagatgggagtaggctcgggagtnnnnnnnnnnnnnnnnnccatctcgggttcagtgggcaaacattttgaatcagaaaaatgcgagtacaactagttttggtttgatattaaagtttgaagttttaaaacttaccatcctagtctaaacctgactcactcaaaggaggccattctgtaaagaattcctcgaattattgttgaaggatgaggaaggaagggcagctagacgacttcgcttttctgttaaaacagcctccagttcggacctttcttgttctacggagaagtcctcatcgtgagtttgatccagaaggaggaggttgctttcatactccttgatatctgattccaatttcgtcctagttttctcggtttggatgaaaacgattgccctttgaatcagttccatcccgcgaccctttacctctttcctggcttttgatgccaatctcgctaacttagcatctcgaagtttggcaattgctttgtacttggcctgcagttcggatagctggttggacaagtcgtaagcactgaatctagattccgagagtctgccccgagcattcgagagttcctcctggatcttgtcataccgctgatactgatcctgcaactcgccgttcgacttcatgagttcggaaaaaaggttgtctagttgatcttccagtttttgcttgacttcagtggaagagcagagatcggactcaagagaagaaaacttgtctttccaggcaataacatctcgttccctatcaagcagcattctttcgtaatactcaatcatgtcattgagttcgctgtttgcctgaagcaaagattacaaaggtgagttagtgtataagcaaagagtggagataaaactttgcaaaggaaaaagagctaacccgagatgagtgatgggcgggaagtaagaatcgctcgcgaatcgcaggacgccacttatcaaaggttggtaggattgtgtctttccgagtcttgaagcgccggaagacgtttccctctgttttcatcgctgttaaagtaagggatgaaggacgcattactaagggtttaaacgatataccaaataaggaaaataaacagtaatttcttactagtgagtgatttagtttgaggaaccaaaacggccttgggtttagggttagcatctcgggctcagcctcttcctgtcgaggatttgcactacagccagtctattcaaccccaggtctagaggagggggatgtgatgactagaggattggaacccatcaagccaggtgggggagatgattgaggaaaacgatcggttcgggctctcgtcttatctctcttaggggaagaactgctatgggttggtctttttctcttcttctgaagcaagtccgcgatcggttcgctgctcaacctattccaagaagaaggccgaggtgagtcacgacgaggtgatcagtctctctgaggtgaacgacgaccatgaccttcactgtgaggtgtgggtctgaaggcattggcggatctagctccttcggcactgccatcatcaactagcagggttctgctgtactccttcttgtcaataaccgacgtaaggaacgatttgttcgcttcacaagcctccacgatcgatttggacatcgtctttcgtcgggaggcgatgactcgagtcgaggttccatgaggtaaaggaggaggtaacggaagttgaagaagttgtccagggggactcatcctgagcttgtggttggcctctatgaatcagtcgagggtgaaggaattccaaagagtttccccctgaagaattcagcaaattcggcagtcggaagagttggagcgatgaaagctgcgaagtggatattaaaaggtggttagataaagcaagatgtatataaaaatcatatgcatgacctaatatctaccagacttagtagtccacttcgatggaagcaggtcggaaagatttccgattgaagcaggggtctttttaattaggaaccacgggtgctgctagttctcgtccttgttaggaagatgcgagatgagattcctgttggcgttcggataagccgagaagtatccggctttcttcgaagaactcctcatgctgagaagttcattcagtttaggaaccctgataacaaatccggcatccgccgcgatagtaataatccctaagatagtccggagaaggttaggggtaagcaggggcagggcaattttgagggccgctaagtaccgaacgagggcttcgggaaggggaaaggtcaaaccgcaacccttgaaatagatttcgtacacgcagaagaacccgggacggtggtcttccggcgactctatgggttctggcatctgggagtccctcataatttccgccgaaattcgacaaagctctctcaatcgattgagggattgcagagtgcatgtggaatgataatgtggaccggcgatgtcattcggccgggtgcaaatatcgttactaaaaccgccttccttgaaagacagagattcaggcctttcattttcagaattcatcgtaaaaatgaatagtctgagggttcggaggagagaaagtacagagaggaagaagagaggagcttctgttctaaaagaaagatngagcgtgacagtaataaaagggaagtaaagtgaatttacctacacgcgaaccagtaatgatgacggaaccaccttgggagtcgtggaggaagtggaagagtttcctcgctttaatagtaaataaactatatacggtcataattgtgacaggtgtcacatcattaactatgggaaaattccgagatcaatgcaatcacgtaatttaggcgggaaatcacaagaatcatttggtgcaatctttgcccttatagcattaaagccttccgaactggagtagtactttgaaagacttgggggctaattgttggtgtcggatcccgcaccatgggctcggatccggcgaaagattgctacgtgggtaaaagaagcccataagataaaaggcccacaagtttcctcgaaatgagagtgtggatgaggtgctgacctacgaagtgagggaagaatcgaagtcaagattactcggattgaagaggccgaatgggccgaaaggtgaagtcaagaaggcccaaagtggattcaaatttaaacgttcaaataattaattcgaagattggaaacggatgcgtttaagatagaatgattgagattaaataagaattaaatgtattctttgggtatatattgtgagccaaagatcatgtaaagacacacgcatttcttggtgcaaattagctatacactttcttttacaatactcatagttttctctataatcatctatttattttctagtatatttatcctcaagaataatccttcccactgagtaaataaatacttgagtgtgaatccgacatccacattttggcgccgtctgtggggacggaggattcttgagtcatcagattttttctgtgcattacatacctgaagtgatccgcaatgtctggagaggatgctaccaacgtttagatagccgaaaccctcaaggccatgcaacaagctatgaccgatatgacgcaaaagtttgcaagcgtggaaaaaaccgtcgaaacattgcaaacaaaccaggtatcactcagccagaatgttagtaccattcagtctcgtgtccgttctttaaatgcagggaattctagagtttggagaaccatcttcggatccccaaattatcttccgcgaaatgcaacaagagaccaaacgaccccggatggtacaaacgcggagaatcaaccagaagatggagaaacgcatcctgaagatgataaccagttcggtgaccaacacgatcaggaaaacttcgaccaactcgaaaccatgaaggaagtaagtcgggagttgaaagaaatgaggtcgaaattcctccaagctacaagctcggaaccggatatcaaccgggttatcgagaaagctaggcgaacaccattcactctgcaaattacaagtttgagaatcagagattctcgaaaactcaacttagaatcatacaatggtttggaagatccgaaaggttatctcgcagcctttctgatagccgctgggtgagttgacctaaacgaggccgatgaagacgtagggtattgcaaacttttctccgaaaatctgtgtgggcaagccctgatgtggttcactcagttggcactagggtgattcagcaatttcacgagcctttcgtcagtatttttgaaacaatactcaattcttatggataaaagcatttcggataccgacctttggaatttatctcaagggccgaacgaaacacttcagactttcatcactaaattcaagaacgtactctcgaagctcccaaggatctcgcaacagtcggctttatcagctttgcgaaaaggattatgacatgattcgagattcaaagaagatttgatactacccaaacttgatactattcaagatgcggtattccgagtgcacaattggatggaagtcgaagatgacaaaagaaagttttgcgaagagaaataagcaagcaaaaccagcagtcattttccacccaagaagttcgaacctcgggagaatcaaggaccaaggaagtttggttcacaaccattcaacaataacgtcgggaaacaattacaaggaaaaggaaggtcaaatacttggattcgagatgaaagcttgtattgtgatatacatagagtcgccgggcatctgaccaaagactgcagtgtactcaaaaggcatctcgcggaactatgggcaagcggagacctttccaaattcaacatagatgatttcgtgaagaaatatcacgaagcaagggataattccgaagctcaaaattctaaaaggccaaggttgactaacgaagaggaaccaagaagttcgaagggatagatcaacgtgattcttggaggttccaaactctatcgtgattccgttagcgcaattaaaaagcataggcggaaagttctacttaaatcaagtttgagtgaagaggtggattaccaaggcgcttcaatatcatttgatgagaaggaaacgcaccacctcgaaagacctcacgatgatgctttagtcattacgttcgacgtgactaacttcgaagtatcaagaatactcgtcgaaccaggtagttcggttgatttgatctttctaggcactttggaaagaatggaaatcaacagggcggatgtagtaggacctctgtcccctttgatagctttcacgagcgagtcagcaatgtccctcggaataatcaagttaccagttttagggggaaagacgtcgaagattgtggattttgttgttttgacaagccaacggcttacaacatcatcctcgaaactccttggatctaccagatgaaaacggttccctctacgtatcatcaatgcctcaaatttccaaccccaaacggagtggaaacaattcggggagaccaagaagcttcgagaacatgttatttagctagccaccgtttgaagatccaatagcaattaacgaagccaaaggggtaattccaagatttcctagtgggcagaaggtggatgatgtcgtgatcgaagtaattttaaaagaaaacaaaccagatcggaaagttcgaattggagctactttgtccgacgagataaaagaagctttgattgaactattaaggaagaacaaagcatcgtttgcgtggtcggcagcagacatgcccggcatagacccaagcataatctaccacgagctgaacgtggatccaagcttcaaacctgtgaaacaaaaaagaaggaaactcggagtggaacgagcaaaagaggtaaacgacgaagtgaataagctttaaaagatacgatctataagggaggtgcagtacccggattgggtggcaaacaccgttgtggtaaaaaaaagaatggaaaagatagggtgtgcatcgatttcactgatctcaacaaagcttgtccgaaggacagtttcccacttccacatataaatcatctcgtggagtcaaccgccggaaacgagttgctaacttttatggatgctttttcgagatataatcaaataatgatgaatcctgaagatcaagagaaaacgtcattcatcacggaaaagggtatctattgttataaggtaatgccttttggcttaaaaaacgcaggagcaacttatcaacgactggttaataaaatgttcaatgaacacctagaatgacgatggaagtatatatcgatgatatgttggtaaaatcattgaaaaaggaagacgatgtcaaacatctcgaggaatgcttcgtgatttcttaatcaataccaaatgaaactgaacccggcgaagtgtacgtttggagtcccatccggggagttccttggttatatcgtcacaaagagaggaattgaagcaaatccaaaccaaattaatgcctttctctcaatatgccgtctccaacaaacttcaaggaggtgcagggattgaccggccagattgcggcgttgaatcgtttcaagatcgacggataaatcattacctttttatcaaattttaaagggaaacaaagagtttctttgggacgagaagtgtgaggagggattcgaacagctcaaagcatatctaaccacaccgcctctattatccaaacttgaagcagatgagaagctttacttgtacgtttctgtatctagtcatgcagttagcggagtcttggtccgggaagaccgcagagagcaaaaaccgatttactatataagcaaaaccatgacgtatcccgaaatcaggtatatgatgatggagaaacttgcactcgcagtagtaacttccgctcggaaattacgtccgtatttccaatctcatctagtttaggtactaacgaatgagccacttcgaacaattcttcatagtgaattaagtgagtatgatatagaatacaagtgtcgagttgccatgaaagcccaagttttagcagattttttaactgaattaccagtattgggcacacaagagcaaccagagaatcaaatttggaagttacatgtagatggatcttcgtcgaaacaaggatccggagtggggatcaaattggagtcacccacctcggaggtctttgagcagtcattccctttattattcactgcttctaacaatgaagcagaatacgaggccttaattgtagggctcaggttggcacaaggagttggagctcacaaagtggttgcttattgtgattcgcagctggttgttatcagttcaatggagattatgaaggtaaagattcaaggatgcaagcatatcttgaagtagttaaagatttggctaagaatatcaaaaaattctaattcattcgcatgcaaagaggagagaatacttttgcgggtgcacttgcagccctagcatcaacatcagatcctgaagtaaaaagagtatttttggtagaatgcatttcagagcgagcattaaggaggaaaaagaaaccttcgtcaatacaaggtctcgagctgcggcacgggctcgtggtgaacccgagatcgaactgctacctgttaagagaagaaaatcaaagaaggtagaagtacataaacccgctacgccaaaagaaagtaacatcgaagaacccgccaatacaatagaagacacggttccagaaaagattatagaagctgaaactgacccgttggtccaagtggatatccttgaaccaaacgagcaccccgaaccggaaacacggatatttcatgaaaccacgaaattcctgctaaagattggggggctgattggagggagccaatacagcattacatcgtgacaggcgagctcccaaagaataaatggcaagctaggaaaatgagaatcgttagcgcgaaatcccatctatccaaggatgctttgtatagacaaggtgtcagcgatccttatctactatgcatttgtggacccgaagtcgagatcgccttgagcgaagtatacgaaggtttgtgtggcagtcattctttaggaagggtcatggctttcaagattaaaagaatgggatattattggcccactatgatcacggattgtgttaagtatgcccagcggtgtaaacgttgccaattccatgcacctcttatccatcagccttcagagttattctcttccatctctgccccatacccgtttatgaggtggtcgatggatatcgttggaccattgcacagctcagcccaaggcgtacattatcttttggttttaatagattacttttcgaagtggattgaagccgaagcatacatgagcatcaaggactcggcggtaaaaacttttatttggaacaacatcatatgttgacacggcatcccgtacgagatagttacggacaacagaccacagttcattttgcacgaactcgaagctttctactcagattggagaatcaaagttagttattcaccccacggtacccacaaggaaatggccaagccgaaggtgcaaacaagacaatccttagcaatctaaaaaagcgcttaagtcatttgaaggggggggatggtatgatgagcttcaacccattttgtgggctcaccgtacgactcttagatggtccacgggtaaaacaccattttctttggtatacggcatgtaggcagtggttccggccaaactcaacgttccccgattctgtcaagccgaaactcctttaaacgaagcagaaaactcattaatgctcgacgattcgctagataccatcaatgaacggcaggattaagctttgatacgaatccataattatcagcaagcggcagcccgatattgcaataccaagattgaaagtagacctttctttgtaggagattatgtcttgaaacgagtcttcgacaatacaagggaacaaggggcgggcaagcttagagttaattgggaaggaccctatatcgttaccaaagtggtccgcaatggtgtttatacgctaaaggacttagaatacagaccagttcaacggccttggaacgtggtcaatttgaagaaaaaatttgtataataacacgcattttttgttgtacatgaactacggtattgcttgatcccggaatgggtacgtaggcagcttgaaaacgagtccagctactagtaaaattttttctatttataaacgagttcgactgtgcaacgtataaagtaaagaggagtttgacttttcgaacgtgctaagtcgaaaaacaaaacaataattattcaatgaaaaacaaggaaggcgaagtcatgatacactttggattaggatatccttgatatccttctcaatgagcagaacacttcaaccccaaatccagctaagtcaaaaactggtatcatgcaccccgagatatccacgaattcagcaataccaagggtgtgaagatcacttgagatctttgtaatcctacgccccatctgatgaaccttcctccgaagtttccttctctcaagcgagagcctctagtatcaaaccacaagctccttgatgaacaccatcacaatctcttggtccttttcgggaagatcttttatcaaggcgcatggagtccggagctgagagcccgggaggaggtgaaggtcgcttgtctggaacatttgggccatctctgtccatcatcccaactgatgagtactccggcatggtttccttgcacgtaaggttgaattccatatatgcaaggaagagatggggaatggaacaaggttaaggcataatttatagaacatattatcccctgaaatccgtccattattccaaaaagagtgattggcagagaaattcacgtcgtccgactgatccttcatttaaacacatttcccaaaatctatcgaatcaaggaaa

SEQ ID NO: 6357 - DNA, 1052 bp, Arabidopsis thaliana landsberg
gatataccacgcaagattaacatcaaacccaatatttaaagtcccacacgtgagaacgactgacgtcggcacgctttagccacgtaatttcggtctccaaaaattcaatattaatccgcgaaaattcactaaatataaaagaaacccataatataaggaggataaggaaggagtcgaagataagcggagagagagagagacagagagagattcaaaaatccgattccagatccattcctgggcaaacaaaggttggtgtttctctaatctcaaagcttttttcaaattcggaaaaagcaaatcgtgggaagagattcatcttctctctgtgcgttcatcggatctcggagcttttggttcgtcgtcaatggcggaagagacggagaaaaagtacattacgaacgaagatcttaaaaaacacaacaaatctggagatctatggatcgcgattcaaggcaaggtctacaacgtctccgattggattaaaactcatcccggaggcgacacggtgattctcaatctcgttggtcaagacgtcaccgatgctttcatcgcatttcatcccggaaccgcttggcaccatctcgaccatctcttcaccggttaccacatcagagatttccaagtctccgaagtctcacgcgattaccgtcgtatggctgccgagtttcgtaaactcggtctcttcgaaaacaaaggtcacgttactctctacactctagccttcgtcgccgccatgttcctcggagttctctacggtgttttggcttgtacctccgtcttcgctcaccaaatcgccgccgcgcttctcggtctcctctggatccagagcgcttacataggtcacgattctggtcattacgttatcatgtcgaacaaatcttataacagattcgctcagcttctctccggtaactgtctcaccggaatctcaatcgcgtggtggaaatggactcacaatgctcatcatctagcttgtaacagcctcgattacgatccagatctacaacacatgccctgtcttcgccgtctccaccaaattgcttctcctc

SEQ ID NO: 6358 - DNA, 757 bp, Arabidopsis thaliana landsberg
  unsure (1)..(757): unsure at all n locations
ggaaactccgttagatccattcgcgagattcttagtcagctatcaacactttacttattatccaggtatgtgcttgggaagaatcaatctcttcattcaaacgtgtctcttgctctgctccaagcgtgaagtaccagatcgagctttaaacttcgccggaatcttattcttctggacttggttcccactcttagtctcatgtctaccaaactggcctgagagattcttcttcgtcttcacaagcttcaccgtcacggcgcttcaacacattcttttcacgcttaaccatttcgctgctgatgtctacgttggtccacccaccggtagcgattggttcgagaagcaagcggcgggaacaatcgatatctcttgtagatcatacatggattggttctttggtggattacagtttcagcttgagcatcatttgttccctcgcttacctcgttgccatctccggaaagtttctccggtggttcaagagctttgcaagaagcataatcttccgtataggagtatgtcgtggtttgaagcaaatgtgttgaccattaacactttgaagacagcagcttatcaagctagagacgtggctaatccggtggttaagaacttggcttgggaagctttgaatactcatggctaaatgattttaatcaaaacaaaatatgcttttgtttgggctaaattcgatgtgttgcttttatgctctattgaatctttgaatttcgttttggtacttacttacatgnaagagatg

SEQ ID NO: 6359 - DNA, 434 bp, Arabidopsis thaliana landsberg
gtctggagtctaactggtgcataattcgcccaatgctgtgcaagcttatgttgatcacagctgtcttcatcactggagggctacacataggaaaggggtgactatcatgagccagaatacaggcgatatcattgccttcttgtttagtcgggacgatattgcaaggaggggagtcataagaggaatacttaagggtcctgtatgtattgaatggaaatcgtgttccactcaggccagttatctatcattctttctgcatgaagtgacgggatattcatacgaatgtgatcttcttgcattgacaacttgggtacagagggagtcctagaccactaacggaagaggggtcattgtggtgagcatacccgtttgaatccttgtttgtggagcaaggatgctcctattatgcgctctcccagattggcaatctggga

SEQ ID NO: 6360 - DNA, 2317 bp, Arabidopsis thaliana landsberg
  unsure (1)..(2317): unsure at all n locations
ctttttatacttaaacgttgataatattttaaagtttttgtaaagtttaaatatattaattataatattttaaattttttaaaactttagaatttatgatatccggtataattaaacggtttgactaatttttaaaaaaatttgggatcaaattttaaatcttgctacacagagcttcaacccaaaacgaatatatacaccaaccaaaaagaaagctaactaaccaatagtgttatttactaacagaacacaagactaacagtctgcaactacgcccacttgaatgtgtcgatataaggtaaagagataacgttaggatgacaagacactgaacattgaacaccataaccaactaatgtgttgattcagataatctaaatccataaaaactattctgtggtgtttctcagtaaatagcgaacatatgaacaatcaaattttcatgcttcaagttgataaacactaacgcacaacagagagttcgttagtgtttggaaagttagaatcaaagtttaagaaacttcatttgacaacgttaattagaacacaaaaagtgggttacaagatttgcactcacggcagtaagattgaagtattccacacaatcaaacattttttactgcatcaaggaaaggaaaaaaaaaaaaaattgaaaagaaacaaaaaaatcaaacaaaccacaaacaactccacatttgatcacaaagtaaattatttctcgtcatggctaacttcagcttcaccagagagttcttcgagggacttgcccttgggctcgtgggacaaggaaggtgaagagcataccgatgaagttaagaacaccaagcacgatcaatgagttcttaactccgatacctggtgggtatcctgcatccaccttagccttgtcttgagattgagccgcatataggaacccgaaggctccaatgatggctccagccttaccagccgcagctgatattccatgacatgttgaccttagcctggccggaaaaatctcagcagggacaataaaagtggttgcatttggaccaaaattggcaaagaagaaagtgagagagtacataatcacgaatccaatgcggttgtctggttggatccagtggttgtaagggaatgcaatggcaaacataaacacggtcatcatgaaaaatcccattagctggatcacaaatcttccaatgatatcaataaacgcaactgtgaaccagtagcctgggacagtactgcaaagggcgataagagtttgagccctagcaatcctgaaaacttcatgggtggcgttcatggtggctgcctttgggatccatccgatnnnnnnnnnnnnnnnnnnnnnnnnnaagttttggctgtagaaggcaatgtcaagcaaaaaccaagtggaggtagttccaaggagatgaagtccatgacgtctaaggaattccttggagaacaagccatagttttgtctggggtctttgacgtcatcctccaccctttcctcaagctcgagatctgtttgtaagaccttggacatgtcggctgtggcttgtttgatgttcttggcaaccaaagcggtgtaacgggcagtttcaggcatcttcatacgccagtagtaagtcaaagctgcgggtaaagcaccaaacatgacgatgattcgccaaatgtaatcaacttgaggaggcgttgagagggccctgtttactgcatatgttggagctgggaactttttgtcgaatatagaagatactgcgagtgccacgaaacctccagccaagataccgacaccttgcatggcgaagacagctgcgatgaaagccccacgggtcttcttgtttgcgtattctgacatgatggtggcagaaagtgggtagtcacctccaataccaaatcccagccaaaacctacataattgtttatatattaaaaaaaaattcttcaagaaaaaatacctatcagttcgaagcgtgactaacttttaaaatttgcattcgttatgagattattggtttatcatgtgtatatataatattgtaattcgatgaaaattttacctgaagaagcaaagggtggtcatgacacccttggcttggcggccaaaagagaggccagaagcgacagagcacaagatcatcatgaccaaagtaagaccgtacacttttttccgtccgagtttgtcaccgagccaaccgaaaaagagttgaccagaaagggttccacaaagggccacacagttgacagcgtccgcaacatgaggggcccctgaccccggacttcgctgactccggattgaaatagagaatgcggccaaggagctttgttaccaaggccacgc

SEQ ID NO: 6361 - DNA, 586 bp, Arabidopsis thaliana landsberg
caaaacctcgaagcctctgccgcaaagaatgatcaagctacggttttctctgtctagttcggcttgatctccatgagggtcgggggtcttcactgactccacttactcggaacagcctacacatggttccttctcgacatcgatttctacagccaaaacttgttccagaaggatatcttcaccaccatcggttggttaccttcggttaaaaccatgaacgcaatccaagagctctacatgatcgctaaggctcaaaccataatcgcttgttgcagcaccgttcccggttactttttcactgtagggttcatcgattatatgggacggaaaaagattcacatcatgggtttcgctatgatgaccatcttcatgctcagtttagccataccgtaccatcactggaccttaccggctaaccggattggtttcgtggttctttactctttcacatttttcttctccagttttggacctcacgcaactactttcattgtcccggatgagattttcccggcgaggataaggtcgacttgtcacggcatatcggcggcgtctggtagagccggtgcgatggtcgggtctatcg

SEQ ID NO: 6362 - DNA, 509 bp, Arabidopsis thaliana landsberg
tttcccagactatatgatctcttcgtgatatctctcatcacgaagctacttggccggatcaactatcaggttcctgtctcctcctctcctggaagcctccctgacggaatctctgcagccgtgaggggtgtggccttcgccggaacgtttctcggacagattttcttcggatgtcttggtgacaagcttggacgtaagagagtctatggttcaacactcttgatcatgactatttgctccattgcttctggtctttcctttgggaaggacccgaaaaccgtcatggtaactctctgcttcttccgtttctggctcgggtttggcattggtggtgactatcctctctcggctacgatcatgtccgagtatgctaacaaacgtactcgcggcgcgttcatagcatcggtttttgctatgcaaggagttgggaaacttgccgcaggaggggtttctttacatgtctcgtatcttttcgagattaagtttccgactcgggcctatatattgga

SEQ ID NO: 6363 - DNA, 770 bp, Arabidopsis thaliana landsberg
  unsure (1)..(770): unsure at all n locations
cctttgcgtactgtcccaggctactggttcacagttgcgtttattgatatcattggaagatttgtgatccagctaatgggatttttcatgatgaccgtgtttatgtttgccattgcattcccttacaaccactggatccaaccagacaaccgtattggattcgtgatcatgtactctctcactttcttcttcgccaattttggtccaaatgcaaccacttttattgtccctgctgagatattcccggccaggctaaggtcaacatgtcatggaatatcagccgcggcaggtaaggctggagccattgttggagcctttgggttcctatatgcggctcaatcacaagacaaggccaaggtagacgcaggatacccaccaggcatcggagttaagaactcattgatcatgcttggtgttcttaactttatcggtatgctcttcaccttccttgtcccagagcccaaaggcaagtcccttgaagaactctctggtgaggctgaggttagccatgacgagaaataattatgtatttttattttgttatttggagtgcgatgtttggttttgttttcattttattggctcgttgaccttaagttatgatgttataagaatatntatgatatcatttaaatcttgttgaatatttcgaaatcgactcactattctggaaacaagcttatatattcactccaaaagcaaggttaaaattagatctagtcgtttacttattaatatattagaaaactaatgaatttcattcaaagttg

SEQ ID NO: 6364 - DNA, 398 bp, Arabidopsis thaliana landsberg
  unsure (1)..(398): unsure at all n locations
atatatacacatgactaaccaataatctcataacgaatgcaagttttaaaagttagtcacgcttcgaactgatatatgtatttttctttaagaaaaaaaaatttaatatataaacaattatgtaggttttggctgggatttggtattggaggtngccccccactttgcccccccctcttcccactctccccctctcccgaacaccccgtggcccctcccctcctctcgcgcgcctcccctctgcctcccgcccgcgccccctaccctcgcccctcgccgtcctctccaccagccctctccctccgcttgctcctatcccccctcgctcccccgcgcctccctttccccctccctctcccgccccccgtcccccccccctccctccctccttctcccct

SEQ ID NO: 6365 - DNA, 3501 bp, Arabidopsis thaliana landsberg
  unsure (1)..(3501): unsure at all n locations
acgttcgacaacaggacacaagtgaacacataagggcgcatgatctgaagccaagaagggtagatgtgtcactcgcgcatcctgtcacttcaacctcgcatgagcacaacacataaccctatccaacctctttgccacaaaagtattttccactctccctcatttccatgtgtatttattcccactgaaccccatgtcaatcagcgagaccctgttaatccattcgccaaattcaagggaatctggagacatgctcccattgcctcatgttctctcatcaagccgaacgattttattaaagtcgcccccgatcacaacaggtccgtcaagcctttctattacctcagttaacttatcccataacccactcctccttgaagcagacggagccgcataaacagcgataatatttaaaacttcagaatcactctgcaaccgtacaacaacaaactgatctgatgactctatgattgttaagtctccaaaacccgacctccataacaaccatataccaccactttgacccaccgcatccactctataagaattatcgaagcctaacccccgacagatcctctcagccctgttccatccagaatgagtctcaaacatagcaagaaaatctgttttataattcttcaacatatagcgaactgctcttcgaaaattaggtttattcgccccccggcagttccaaaatagacaatccattaaaaattgtagatttaaacaccaaactaccgaggaatagcgtcacgccatctccacaccagtactctccacggccaatccttcctacaccacgatcgccgtatcgcacaacaattccttactttgttgtatttggttcatattctagggcaactccatgctcatgtccatctcacatgaacgcgtctcaagaccactaacaaagactccaccgggtcgaccaacactcctctgttcaactctcaatcttttcccgttagctgataacgcatcgccaactagatttgagctttcacctttcgtgggcccaaaaattaaccctctaacaggcttatttacagacccttgtttctgtcttggcccattgggctccataattttcaatcctccatttcgtttccattttggcccgccttttcctttttcgaaggtcacattaacttgagcttccttaacttgcgtgacacccgactccttccgcatattcttccctttatattcattctccttattcgacccttctaaaatggcaacttcccctatctcagcagataccatatcttcttctaacccaccaaaacgatttgatatcttcaccccctgatttttaggaagttcccttaaactgcgatttgaacgaccaccggaggaacccgccgcaaacaccatcttttgcgccgatttttccacccgtatccccgactgtctcaccactgtgaatccttctttaacttctggtgatgaaaccaccgccgctctctccgtactcggctatgctctagccggactccttactgacacatttcttggacaagtgtgcaccaaatgcccatacaaaccacacaaggaacatatcttggacaaaccttcatacgccacaaagtacctatctccattaattaacactgtccccttcaaaggtttggctaaattaacttcaatacatactcttgcaaaccgtcccctaccaaaagtaatcgtattcagatcaaccttaagaagcttccccagcccacgagcaatctcctccaataaacatctatggtaatagttaactgggatatttgttaacctcacccacaccggcgttgtaacgatatcatccctcaatggatcaaaatttggtgaccaatcttgtaccatcagataattaccaaaaaccctccatggtcctccggttagagccgccaaatattcttcttccaactcaaatctaatcataaaaaactgacggggcaaatccatcaccgtcatagccccctacggttttcataactcctgtaacttacgactcagcaccgaaataggaatttgattccctagcaccttaactatcatacatctcttccaaagcccattcatggcttccaacacctcttcccctatggtgataactggctctccatcctccccattcggaaactccaacctcaccctctcacatacaaacgcatcgtcaatcacattctccggtttcagaatacctccaccaacactccttctcactttcgacgcccacgaccccatactatccggcggatctcctagtggtcgctccttctcccccacatccatcagcaaaacatcaatctcacccaatctcccattcgcctcccccgctcgagagctcatcttttttttggcgtttgttgatttttttttccacaaataataacacgtgttttagtttgaggtgaataacacgtattttaatttgaggtgaatttatagcatatgatattttttatggggaaatagatttattaccctcaattttccaaccaatcaaattttcctttattactaacactcatataacgaaggaaaagtcttacaggtcattttatttcagtgcataatcgtacgagcatttgccttttttggttacaatattttcaattacctaataatattaataaatattatagtgtacaggtaaaaattgacttgagcatcagagagttctcgaaattaacaaatcaagtggtagaatacaaacgtcgtatttatattcatataatcactaacatctccttaagatttagtttgatcatagcacctataaatatcaaatcaatttcttgaataaattctcaaccaccttgataagtcaaatactctattcgtgtctttacgcatacaaatattagattaagaaaaaataatatttctctattttgtatatatctatttatatatgtgaatttaaaatttaacgattttattgattttataacatacatctgttaacggctgataaatcacggatttgaatatactaataattaaaagatgaagtatttttagaaaaatatctttttctaactaaaaagttaaggtattaaacgttcaaaaatgaatacatatgctttttgttattatttaacgatgttcattgattccataatgttcgttaagtcaagggtttaaatatatcaacaattcaaaaaagatgtatttcggaccaaatataattcaatgaaatacttttctttaaactaaaaaataaaagtattaaatattcaaataaaatagatgggataatttttgggttttgtcgtgtacaattatagtttaaattatgaatgaagttatattttacacatttgtagaattcgtttattttttattattattactttntttgaacaaggaattggtttattttattgggtgaattaaatttctatgcttagatgaatgcgaaattaggaaagtatgagtgatgattttatgtttagttctttctcctcccgacaacannatctgacatatttatccctactgagc

SEQ ID NO: 6366 - DNA, 5007 bp, Arabidopsis thaliana landsberg
tttcgtgtcccgtggttgattccacgagtcggtcaatatggggaaatggaaaacagtccttcgggcatgctttattgaggtcggtgaaatctacacagacacgccactttccgttctttttcttaaccactacgggatttgcaagccattcgggatacttgaccttgcggattagtcctgcttcgaggagtctaacgacttcggcattcactgcttccgcgcggtccggaccaagtttccgacgcttttgcttgaccggttaaaagtcgggtcgacgtttaactcgtgcgagatgacttccgtgctgatcccggtcatttcgccaacgctccaggcgaaagttcctttgttttgcttaaggaaaaggataagtttgcttcggaaactttcgcctagattagctccgatgccgacgggctgatctggatgctcctcgctaattatcacccgttcgatgaggtcgtctcctacttttttaatcggattcggagcggcctcgagctgtggttgctatttgactttgagtttgtgtccagtcatatagcacattctaaatgtacgctgacttcccaagatttgctttactccggtgggagttggaaacttgacacattggtggtaagtcgaagggactgctttcatctcgtagagccaaggcgttccaagtattatattgtaagcggcaggtcgatcaaaaacggtgaattcgatcattttcacaatcccttgagcgctgatcgggagtgtaatcgttccaagtgacattgaagtctcgctcgtgaaggaaacgagagggctcggagctcctttgatattcttcttagaaattcccattcgaacgagggtatccagaaaaattaagtcaactgaactcccagtatcaatgaggattctttgtacttcgcagtttcccacgtcgagcgatatcacgagggcgtcgtcatgcggtttatctaagtcggaggtttcttcctctgaaaacgaaatttcagggcagtcaatttgattggtcttaggccttttcgccaccggagcgaccaccttcctttcgtgctgcttaattgcgctgacagaatcccgaaagagtttagatcctcccataattactttgaccatcttcttcgggccttttggagtgacgggagctggctcgttcttttgctttttgttgggaggtgaagatatctcgaaatctaacacgtcgtacgctgtctgagccaaatcgattgttgtgacatcgatatcatgaatttctcccgaagcaaattttgcagccaacaaccttcccaaagccttataatcctttgtcgcatgaccattcattttgtgaatctcacagtatgcgttaggatctcggacccatttgttgctcgggagagctccattcttgccttttggagagaaaggcggtttcgatggtgacgcttttggggaagttttgagcggctccttctcaacagaaaaagttcctgctgctggctttcggagctcggagggtttcttcgaggttgcaggtggggaggcttttggtgcagcgttaaacttcgtagccaaaaaagcccgttcttcttcggcattgatccagttcgttgcttgatgaagggcgtcctgaatcgattcggggcagtttacagttagagattcacggaaatgcgactcatgccacaaaccgttctgagggcggactgagctgccgaatcagacaggttgggtacttggaccatgatctctttgaaggcagtgatataagttcgaagtggatcgtcagctccttaagagaggttccaaagatgatcctcagtgacgtcacttttgataaagtacccgtactgcttaatgaaagcagtggagagttgcttaaagttatcgatcgaaccctcttctaactgggtgaaccaggtaagtgcgggacctgacaaactttctgagaatagcttgcagagccctgcatcttcttcatgtggctcaagcgggactcgacctgcgatgacctggaaaaaagtcagatattcttttggatctcccttgccgttgtaaccggggagtttgaaatctcggaaatcgcgaatacgaagctttgagattctcgaagtgaaaggtgtcctccttgttgcttcaataactttttccacttcgggggccgacgtggtagcctgatgaacctttgcgttcattgcccacatttgatcttgaaggttctgcagctccgagttgactgtgctcggctctggtcggggattagaattcgggagtctgatggcgggatccagtggagccggcgcccgagctattgtctcatctgagattgcagcaagacctgctgacggagactggatgactggattttgtgtcgacgttgctccgacgtcaaccggaggcgaaggagattgctgaccagaagcttcctgcgaattctggacgcttgggctcgcggcgccctgaaaattgagtcgtgttcgagctcctgtagtccgtgccgttcctgcagaaagagaatcaacctgctcggcatacgcattgtgtgctgacctgatctcggaatggtttacagctaaagcggcgagctggccattgcaacgttcttggaaggacacgaacttatcgaaaagcgtcgttacggcgagctgctgtctgtcggttttctcggaaagttgctgaagcagctgcttgatgtcgtcgagagtggaggcttggccgccggaactctgatcgtcggtgttgctcatggtggattgatcgttgctctgaagtaaaagactaaaagccccctccttctagcgccaaattgtggatgtcggaatccgcaattagaatcttgtggttgtttttacggggatctttggtcttgttaaacgaacaacgatcgagtcgaaaagagaagaaaatgcttttgaattttgtgtatagtactcgtgtttattcaatcgtcgtctttacaaatgtcatcgactcgtatttatactcaatacatcggatctaacgtattaaattacttgctgacttcacgccgcggatctcgcgttattaacgtcgtacgtcacgaatcttcaactcgggactttaatgcgcggtttaagtcgtgatccttccgtttctatattaatgtcggatcgttctataaacggccaggctcacgctgggcggtgaattgggcccaattcaccttgaagcccattgaatgcggattgggccgaaatggaccgaatccgacatccacaatttgccccccaagtcctcgaagtgatccagttcggggacttaagaaaatccgaatcgtattatcccaagaatcacggatcgtcacctcgagaacgaaaatccttgacgtaaaaaaaaaaaaaaaaaaaaaaaaactaaatcgcgcgattaccgagactttcctcgaatagtgaccaactccaagacgagctgagcttgaggacgagctgaggagcttgaagagcttaacgaagaggagcgagctaacgagctacttgagaagctcgtcctacttgagttttgcagtcgagagatgagccgatagctagatgaggagttggacgagctgactagctgacagctaggcgaggagatggtcgctgagtgatgggaagagcttaaaggcgagctgaagagcttgacaaagaggagcgaactaacgagctacatgagacagacgagctacttgagacggacgagctgactagcttcgtgagacgactcccgcccttcgcctcgctcatctcgtccccgacttgaggagaagaatactggtgcgggaaaaataaagaagacccgaaagaggttcctccaagcctcgttctttcgtctcgggaatctgaagctcgcaggtcggaacctcgcagcactcccccagaacgtatttttattccgaattgacatgacggtatactatggcatctcacattgttatgcttttgccgtcgctaccccgtcttcctttgcccacatcatgaggactctcttggcccccagttctgccatcgcccccttcgacgaaatgagggaggtgaacaaggataacttcgcttcgctgggaaactcggcaaggcaaaagcctcgtttgatttaccaggaaatccgacgtaaaaccgagactaacgtcacctttgatcttgcagctaatcttggaattcaactccgtctactgcagccacgaagatcagctttctgacaaggatagcgaacttgacagcttttaggcgaaatgaagacgagaacgctcatacggtggagagggccagcatggtgctgaagcggatgaaagacgccgagctgcgggtccaggaactcgaggtaaacaatattgatctcatggcgaaactggaagtaggtaaaaatgcctatcttgctgcggtcgacaacgagagccaggcccgagctgaactcaaggttcgcgaggagaagctaaggaaacttgaagaggagcaagccgcaaaaattgacgtcgccaggaaggaagagaggaagaaggtcaaagctcggtttcacgagttctcgtcgaagtatgggaacttcttccgggagtccgaagaagttgaaacgctgaaggtcccccacttgttttccttaaaacttgaatttgtttaaattggccacggaggcccttttgtttttaaatacttaattttatgttggccacggaggccttttattttgaagtacttgatttttgaggtcatagagaccatttattttgcttgattttagcttattttccgaattacgagctaagctcggtttatccttcgtatagaaaattaagcaaaacaaagatgacttccctaacgaggtagactcggtgttagtagggacgtcatttatgaccgcgaatcacaagtcttggacttagttcgggtatattcgaagcaaatgatgacttccctaacgaggtagactcggtgttagtagggacgtcatttatgaccgcgaatcacaagtcttggacttagttcgggtatattcgaagcgagggtttggacgtgaagatatccacccgaagcttat

SEQ ID NO: 6367 - DNA, 877 bp, Arabidopsis thaliana landsberg
aacacctgtaaacactttccaatgtaagacttttcctccaaaccaaggaaacattttgacactaaagattcagagaaaaccagagcgctaactgaaaaacaaaattcaaatcgtcaacagtcaatggatctagcagaaacatgagaacagacaaccggaacccaagaagaggcagacacccgaatcaattgttctctttgaatcaagaaagcagtcaagaatcatcacattagttacgagcagaatttttctgagacaagaatgaagaaattggaatttaccaaaataccgataattaagctcaaaatgtcagttaacttaacacctaacgataaccaaaaggattcaagtgataaattcgatattcgagacttcaattcaatcttcttcttagtcctaaagtacaaaatcgaaaccaacgagaaaataagtaacagcatgattatcgttgatcccagagatataggattcagtcagagtcaaacaccattcgcgaaaacataaaaatcgagtctttgcatgtgaatataaacagagagaaggagagaaggagagaaggagaaaggaacctgtaggcaacggtcgcaggtgaaaggcaagaaatcgatttgcttgcaaacatcgacggagcagtgtttccccagatctggaaattccggagtccccattcgaattcgaacaacaattccgaccaaaaatagggtttatatccggcgagagagagaaactcaaggaaaaaaagaaataagattctgcagatttagatgagctgaaatatcgcagaagccgtgaaagctttcaaatatgtgggaaatgccaagctgatttcttcttctatattatcagtcaatctcttttgtctatgttagaacaatcc

SEQ ID NO: 6368 - DNA, 3370 bp, Arabidopsis thaliana landsberg
  unsure (1)..(3370): unsure at all n locations
tggcgtttaatatctcttttgaggtctttatgtatgttaccattaagggtttcttcttcaactcggggtgtctcggggcatctatattgttcatatcttctgatacgcttcctcaggtcttcaggtaacattctatgagacatccactgctctgcatctctctttctcaccctcatttcctcttctcgaactgttgttgactccaaatatttctgcaacagcaaacaaaaattacatgcgtgtcctgagtaacttatatgtagcattatggaacaagtccagaaaatgagaagcgattatttgaggctaatacctgcatattgccgataagtagagcaaataagactagtccagatatgcagattgatatagcaaatatgatttcaccaacgaatttgctagtttggagattctgtcccaatgcactgcaacaacaaaagcaacttgtgagaatgatgacttgtttaaattgtgacagatatatatgcttaagatgcaaatataaacaggtcatttcacggcttaaaatctccaaatatagctagttagttattgtcaacagttttatgtgtgtcttacaaacctcagatttcgaagaccccaccagaagcagtagaagaatttcttccagaaatcatgtgattcaacaacgccactcttaagagcatcagtgaagatgccaaagttgaagatggttgagtttgttatatcaccagggtcgagaaatgggcaagaagtggtcaggaaattgttgctaacgttacgatcgttttcacagtagaggaatttcatattacaaccttttgtcttctcgcatgcctcttgccagcatctgtcttctcgttctactgagattaagtaccataaagctccaaacacctgaataagtaagtttaacatataacctttaatatgcatttacatgtataaagattcagtcatcaaaagatccgaaactcacatgactggctaacatatagagagagaggttccaagcagctccagcccatgctgtttcagtaacaatgccagatgttcttgtcacttcagtgtaaagcggatacatacggagaatccgaggaacatattgagcaattatggaaaatttaaggtagtcttttgttagcaaagagactggctggttgacgctcggaataacggctaaaactactatctgcaaaagttaagaagccagaggattcaaaaagaaatgatcattgacattttgaacaagtaatcaaactagtcattaacctgtgggagaggaaggatagagagtagatcaatgatgaagtaagaagagagatactttaaggctattgccttagcatcatctaccagttcacctcttccaaaaacccgcgaagaaggagcgatgtaagctgtcctgaactgaaacacaatgtgaataatgtaaaaggcatcgatgagcgtacgaagcaaactcgcagctatctccaactttgagtccaaagtaagacagtgccttgcgctatcgacaatgggaatgtagaaaaacaatggatcaatcgccaaagcaaccacacaagcaaataaaaatattttgttccagttctggagaaacgaatcctgcgggtttatgatgttcttccgagtaacactagatgtttccttgtggtcaggatccttatgtgaagggaaactcaatggcttcttgaatccccattttacattcttgaaaactctatctaaagaaggtctagctnttcttccataaccatattcagaggataatggtatgccttcatctttgaacctaaacaaaatcataagaaaatgagatagtagaaaaaatcattcaactatgaactcttttcaagatttctgtaactaccaaccttacacgattgtcatggctaattgccatctgtcaaaccttggtccatgtagcttgttgaagctcaaatcactggaaagtggaaactagacacgagttacttacatcatcaaagacccattttacaagctaaagcagatatcaagacaacaatttccatcggttgaacaacaaactctaagcaaaagccactatatccagaagttagaaaattttaaagtgtgtttttgacttacaattttaaagccactataatcaggtaaccattataaagtgtaacccgtcttccttctgccgtaatctcactgcacaacaatgcttaaattagtaacacactctagttcatacatcaaacaagaaaaagaggaatctcttaagtgtgccggatatcaatttcctataaaacacacacctaggagaaaatacgtgcatcaagctagaaaaacttgaagaaacactagttaaatctgcgatagacaatgaatactaacttgaataaacactaattaaatcttcttccaagagatgtacgtgacatgaacatatatgacaaatccagtgagattcaacacaaattaacacaaatccatcatcaattaacacatctactcaaacccatcatcaattaacacaaacctagaacctcaaagggctaggctagaagaacttacaatcgacgtgaccaccgccttcgagaaggatgaatccggcccaaccattgctcttgcgcaaccactgctcatacaacatatcgactgcttaaattcaacccgcaatcgtcggagcaaacgaccggctccgtcgccatcaccagcgttttcattgtcgtttggtttcgagagagtatcgcgaaaaatagaaattgacaaagtattttccttcaggcgttttttttttttcagttttgtcaaacaaaacatccaaaacgtgacacgtacacgtctctcttctctttcaaagtttctctcaagagagacagctctctctgtaaaaacgatttctgatttaatttttcacaattttattctgagaacccactgagagaactctaatatcaagccattggagatgctctaaggtgaagaatcagagattagaagagagaaaaagaaagaagaagaagacaaagataacccatcgggtccaaatgtactccgggtcaaataacccatcgggtccaaatgttaaaccggaagtttatcaaaccgaatctgaaccaaaattgataatacaaacacacacactctcctcaagtctctctcacaaagaaaagactcaaacccattttcctaaaaccctcgtcgtccatacaaagccatggcgaggtttccgacttctccggcgcctaacctcctcttgagactcttctcgtcgaacaaacgggcgtcatctcctactgccgcgcttttaaccggagattttcatctgattcgtcatttctccgccggaaccgctgctcgtgcggtcaaggatgagaaggagccatggtggaaagaattcatggacaagctt

SEQ ID NO: 6369 - DNA, 2135 bp, Arabidopsis thaliana landsberg
ttatacaaataaaacttatctcagtcatagtcatacagctagctagaaacagaggatctaagctgcgccaatacatacaatgaaatccatgatcgcagcgaaattgcgcgcatatgacagattcactcacttaattaaacgcaagagggtagagttggtccatggcaagcaaaggccacaccgatgtatatgatcaccaacaacactagtattaagagtagcctacaagagacagaacacacgagaatgcatcgaaaagattaaaccatttgaagtcatgcttaaggtgcaaacatggtaaggaattacggttgatgaaaacatacgtaagcttgcaatttctccaccacaccgtgttgttgaaacgacgtgtttgctttctgaatcggaaggtattcccttgcatgttcgcggttttatcgacaagaagctcaagacgttcacctctatcaagaatgttgtcaatgttctctatcataacatccctcacctattcataaccatacaaaacagagaatccgttgaagccagcaaaacataaccattgcactatatatgtttcaaattatggagaaacacaaaacctgattcatttcacccttaattcgacttatcgtatcggcattaggatcattagagtaatactcaatttgttggttaagaactcttgagaactcatcattcatagcataagcttgtgccgaatgaattgcgcggccataagtccgaacaaacctctgatgaatatcctctagaaacgaaaatggaatcctccctgaaaataacactcaaaacaagtacattaacacataacaacaaactaaagaaagaaagaaaaaagaatctcaatctctactacttcacaactttgggaacattttaaagactcttcttatttcattgtctctgttctcaaaggttgttactcatcataaacaccaaattcataaaacctcaaatttcaagaatttggtctctgtcttctaaactaagtaatgattaatttattgatcattaaccaaaataaggaacaaaatattgagtattagtgttatcatagtaacagactaaaagctcaaaagacttacttccggcgtcttcatcagccatacaaagaacggtgaggccatcagtacgttttacgtggaagacgtaacgatcctgagagtatgacacgtggctgtcgccgttaccagggatcttctcaaggatctgcttcgcgatcgtgctagcgttcgtggacgtagtgcttaactccgcaagaaccaccgttccacgcgccaccaacgcgtataatatcgacatcggaagaaatactaaataaatggttaactgtgaagaatcgaactaaccaaatgaatcagagagataataaagagaattcattttcatatgtctgcaacacatatgacctctttctctatctttgccacgagtcttcatggaggtagagccacgaggttgagacttttgttgacatactattaaaatatgtactagtactaatttctatatggcgtatcactacattgtataatgtttgaaatcagtcatcatgattagaattattttgttttttttcatttcatgatgatgatgagattactttcaaagaactgtagatatttgcctatttggtatatagagaattattaataagaatattacatattagtaaaccttcagaagagaccatgcatgatatcttgcaagtagtaactatatcgactttttaattatcaattaactctggaaactcaaagaaacactgcaaggttttcgaaatgctagcctccacccatgaccatacggtaagtacttttaatagagaaataaatctgataatcgacattaatttggtaaaggccgtaaaggacatgtgatttcttttgcttatattggatcgaaggatcaagggcatataataataattcatgtcttagatagttagattgttgtcttgttggatatgaaattagtctctgttttttttttatatagtttattatgaattttatattaatcttatttgtgtttctacgaattttttttattttaataaagaggcatgatttttttagatagtggcttggcatttagatatatcggatcagccaaactactcatactgacca

SEQ ID NO: 6370 - DNA, 1785 bp, Arabidopsis thaliana landsberg
accaccatccaccaatttgccattaataagcttgatagtatggaatttttaaccaatgaggcatttttatggacatttggaacacagtatcatgcatctttgtccgtgatgagctgaggcaattgtataacctctcggggccaaatatcatgcaccaccattcacctattggattaggatccgttgttttaactgaggcatttgaatagacaatcaggaatcaagtatcacgcatcacaccagttcccgttcacatgattagcttacaatgtgtattttttaaccgaggcatttgtacggacaatccgagacaaagtatcatgcaccacactctttgccaatcccaaactttatcaagattagcttccaatgagttttaaacagagaatccgggaccacaatttctcatttaagaaaaagcttatttaacttagcttgcaatatggtttttatgcaaggtatatgtttgaacaatcggggagccggaccgtatatcatgaaccatactctctccccccatttataagcttattataattagcacaatggggttaaaaccgaggcatttgtattgataattcgggaccaagtaggcaagtatcatgcaccacactctttcacattcccaagttctttaagattagcttccagtgggtctttactctttagtcaaggcatttgaatagagaatccggggcctagtattatgcaccatatatactctttctcatttataaaagcttattgatatttagcttgcaatatggtttttacccaaggcaaatgtttaaacaatatgggactgggaccaagtatcatgtaccaggtttttttaaccgaggcatttgtatatacaatccggatctagtatcatgaatcaaccatactcttccccatttataaacttagcttacaatagggttttaaccgaggcatttgtattgacaattcgggaccaagtattatgcaccacactttttcacattccaagcgtaaccaaggcatttgactagagaatcaaggatctagtatcatgcaccatactctttttcatgtttaaaagcttattaacattagcttgcaatgtggtttttaaccaatttttagaacaatttgggactgggaccaagaaattatgcaccacactcttttccaatcataaccttgttatgagcttacaacatgttttttaaccgatctatttgcatatacaatccggacatagaaacatgaaccaaccatactctttcccatttttaagcttagcttacaatgagatattaactgaggcatttgtacagacaatttgggaccaatgaagtcatgcaccacactctttcacactcccaagcttattaagtttagcttacaatgggtttttacttttgaattgaggcatttgaatagagaatccgagacagagtatcatgcaccatacgcttaatcattcataagcttattaagtcaggcaattattagaacaacatcggaccgagaccaagtatcatacaccacactctttcccaatcataagcttatcactataagcttagaatgggtttttaaccgaggcatttaaacagaatcagaccaagtatcatgcaccacactttgtcccaatcataggcttatagtgataaccttagaaaataacttttaattaaccgaggcatttgactagaatcaggacactctttcccaatcatataatgggtatataaccaaggcatttgaatagaaacgggaccaagtatcatgcaccacactcttttacatcattttaat

SEQ ID NO: 6371 - DNA, 2208 bp, Arabidopsis thaliana landsberg
tgagccgaggccaggggtagcgatatcagcatgaacaggggcagagttggctcaaaaatgaaacctggttggccggagcctagccgggtcgtccgttagcgggaccgacgccggagttgaccagccgaggcctcgagtcgggctggcgcccttggaagatggttggccgaggcccaggggtgaccggccgagccgcctgctcgggccggattcccggagaagaccctggcggcgatggcccgggcgtggtgatgacgtcgtccttcggagtggagatcttcggaccgcgtcaccgtccgaggctaggtcgaaccttgccgaaggtgtcatcgatgccgagggtgctgctgcccccttccagcgttaagacccgagcctgcaggatcagattgtcttgtagcgtgttccttttgcggccgccgaggccagaacacacacccttgctgtgttgtaaagctgcgtctcttttcctcttgtttcgagtatctggacttttttgtcggtaacaaggttgtttgtgcaagcgagagttgcttctcgcggaaggtgatgagtgaggtatccgtatcccggaggcgtaggaatccctcggctcggtcggccttgctgcttacgcgcgctcttactcgtccatagggttctgttaccgacgcagtgagcaaggcccaaaaaatcatttcgacagaggagctctcgagcatgaagacttgttcggtccgtgtagtcacttatccgagcgcgagtatacttatcgcagaaggtgatgagtgaggtatccgtatcccggaggcgtaggagtccctcggctcagtcagccttggctgcttacgtgtactccatcgttttcaggatccacttttgaagtaatcgaagagcacgaaaggcattctggcagaaaagatttttttcttttttcgaggaaaaatttgacgcagagggggtctccccccttttagcccccgagggagggtcgggctttgcgcaggctaggccgacccttccttgacgactaaactttgcgtggctgcgaggtatatgaacaacttgaaaacatcttaagggtagaagcgacgtagctgtttgatgttccaagcgttgccgtagatctcgccttgattgctggccagcttgtatgttccgggcttcagaactttggcgatgacgaacggcccttcccaggggggcgtgacgttgtgcctccctcgggcgtcttgtcgcagccgaagcaccaggtcgcccacctggagttctcgggaccggacccctcgggcgtggtagcgtcgcagggactgttggtaccgcgccgagtgtagcaaggccctgtcccgagcttcctccagctggtccagcgattcctctcggctggcttggttgctttgttcggtgtaggccctcgccctcggggagccgtattccaggtcagtgggcaagatagcttcagccccgtagaccaggaaaaacggcgtgaagcccgtggcacgactcggcgtcgtccttaggctccagaccaccgaggggagttccttcatccaccgcttgccgaacttgttgaggtcgttgtagatccgaggcttgagcccttgtagaatcatgccattggcacgctctacttgcccattcgacatgggatgagccacggcggcccagtccacccggatatggtgatcctcgcaaaaatccaagaattttttgccggtgaactgggtgccgttgtcggtgatgatggagtttgggaccccgaagcgatggatgatgttggtgaagaacgccaccgcctgctcggacctgatgctattcagaggtcggacctcgatccacttggagaatttgtcgatggcgaccagcaggtgcgtgtagcccccgggcgccttctgcaagggaccgacgaggtccagaccccatacagcgaagggccaggtgatgggtatcgtctgcagagcctgagcgggcaggtgggtctgttcgcatagaattggcacccttcgcaggtgcggacaattctagtggcgtcagccgccgccgttggccagtagaagccttgccggaaagcattctcgacaagggctcgaggcgctgcatgatggccgcaagcccccgagcgtatttcttgcaggagttcctgaccttcgacgatggagatgcatcgctggaggatacccgaggggctccggtggtagagctcctcctcatcgcccagcaagacgaatg

SEQ ID NO: 6372 - DNA, 3766 bp, Arabidopsis thaliana landsberg
  unsure (1)..(3766): unsure at all n locations
agtagtaagtatagttaaaataagagatgtgtgccttgtgtccaacatagatcatcacctcagaaaaattgggttttataggttgtgctaattatttattattaatggaacatttattgaggaaatttgatcctctcattttgctcttaaattttgtgttctaattaaacattttattattgattcaatatttgattattatatatgcggaataaacttatttatctctaatttgagaccaacttaataaaaaagaggttgacaaaaatattcttacaattttattcataaaaaaactaaaagagaatttaaaacaaactcgatagaggaaaaaaaatatgactatgaaaagacacttataagcgctcccaacaaaaaaagaagatatatattatgaatttcatatactttattttgaagattagtntgtgtgattttgactctacattcaacactacataatctcttttcgttgcatgcatatatcacattaagctaatcgtgagtaaaaaaactccctgcaaatcacttggcactacaaattagtgatgatgtgcacagtttgcacatttactcgaaatatttgctaaaatacttgtaacattttttttaattacaatttaattatttattggagatacaagaatttttttaatatatatttgaatgttgaattctgaagttttagataatccatgaattctgaagtaaataattttgtttcacctctgtgttgatacgttataaacgcaccatttgataagcttccaacacaaaccaacatcaaactacatcgatatatcacttcttcacacacaatactctcgattagagaagatcaatattgaaaaaatcaaaagagaatatagagactagaatcttcagcaccatctttagattctactcttcccaagtagtttcgtaaaagatataatccaatattgtatagtttagtgtatttaaatttctatttgattttatgttttaaataaatatatcactttggtattcaatgtaaattttttaagaaacagatatagattttttggttcgatttttgatctgaatcgtttaaatcgatttttttctttttaaaaccctaaaactaaaatatctattcttctcaaaaaagacttttatacccataaataaagtctaatttgggtataaaagtcttttccgaataatagaaaatgaccaaaacacctttttcttcacaaattggtagcaatttatctaaacttggaagggtttttacgtaaataaacaagaataaaaagttcaaatgaccttaaagtttctaaaaattacagtaaaaccagagaaccatataaaccgtgaggtgtctccccagaaacgaagacgaagacagattccagtcaaagaggcagttgggcatcgacgtgagctttgacggtaccctatctcctccgtttcctctctctgtttctccgaactccggtgagtttccgacgctctctctgtctctctctcgcactctctgtgccattctcttactcttcagtgcggttctgttttctgaaatcgattagtctttggttttgtcaaaagcccataattttaccttcatttctgagaaattcgacgctgtttctcatgtcttacttgaatgtatgtctttgttgaaaacatgtttggttctttcgttttcttttgcttttgacagtgctgaattcgaatttttacatgtagggttttagcaagagaatagcttgaaaatttgggattttttttttttggtatgagcaacaaagatgtctgaattgcatgtcatcgttggaaaacttgtttggttctttggtttttgcatttattttaacagtgttgaatttcgaatttctctgtgcagggtttagcaagagacgagattgaagaaatctgggatatttttaaagtatgagcaacaaagatgaggctctacgagccaaagatttagcagaagattggatgagcaagtcagatttcacaactgctcgtagaattgcgataaaggctcagaaaatggatgcaactctggagagtgttgttgctcgcatgattatggtgtgtgatgtgcattgtgcagcattggagaaatctggtgatgagactgattggtacaagattcttcaagtggagcaaactgcagatgaaaataccattaagaaacagtataagaagcttgctcttcatcttcatccggacaaaaacaaactccctggtgctgaatctgctttcaaaactattggtgaagctcagagggttcttttggacaaggataaaaggaggtttcatgacatgagacgaaaacctgtctttagaaggcctgcaccagcaccagcaccagcaccatcatttcaaccaccccaacaagccccgaccacaccttttttcactcagcgtggtttccagacaaatgttaatgtggcaaggaagagacctgaaaaccagaagaaacctcaagctcaaccaactgggtttgatggtctcgccagctttacgacctcatgcgcattttgtcacaggaagtatgaatatcaaaggaaattaatcaacacactgatgacttgtttgaattgcggtaagcaatacgttgcttttcaagaaactttccaaccaccagttcagccgactttctccttcttccaacagagcaaggttcctacacaagaggcaggcaaggcagtggagaagcagccagaaagttgtgctaaaagtttttttagtaaagagggttctagagcaaaaagctctggtgtttctgctgagaacatcaatggaaagagaaagaggaagaaggtcgttgaatccagtgacagctcttgcagcgagagcagtattgactgcaatgaagttccagctggtggacaagattcggggtccagcggtgcacagcattctcggaggtctgtccgtagcaagcagcaggtttcatataaagaggataaagaagaggatgcagaaagtgctgaggagtctgatttcagaaagaagtcacatgaggatcaaccgtttacagaaaccttgccaaatggtttaaacaggacaaagaagagtaaagcagcaaaaaattcaagttcagggagtgcgtcagatgcagaaattcagtgtactgatcctgatttcagtaactttgagaagtcgagggaagtgacctgtttcaaagctggtcagacatgggcaatctatgatgacatgggtggaatgcctcgatactatgccatcatcagaaaagtcataaggaaacctaggttcatgctcaaaatacaatggctagaggctgaaccagatgatgagaaagcaaacctgtgggttcgtaaaaacttgcccatctctattggcaagttcaaacttggtggaaatgagaacatagagaaaactccatgtttctctcatatgatctactttaaggtaggaagcatgaaggatactgtcagagtatacccaagaataggagaaacatgggctctcttcaagaactgggacatcaattggtcctctggtcgtcggcgttcttcccatgagcatgagtatgagtatgaatttgttgagatcctgtcagaatatgttgaaggggttgcaatacaggttgcgttcttgcgtaaaataaaaggctttacaagtgtattctgtcgaattgcaccaggtggtggatcagacacaattcagattccgcctcatgagttgcttagattctcccacagcatcccctcaaccaaattgacaggaaaagaaggaaatggcgttcccattgttcctatgagtt

SEQ ID NO: 6373 - DNA, 1050 bp, Arabidopsis thaliana landsberg
aaataataattttaatatgttcacatggtttcatggaaggaaccagtgatactttaaatccaagtaaacacaagtttcaaggtgaagtgtcttttacttttgcgtcatacaaatttcgtattaatacttatttcacaaagaatatttatcatgcggaataaacatgttttgtggacattgtttccttgtctagattaacagaaacaacaagagcaaagcagtcgaatcctagcttggatcagacttaataaattccagtaagtttcttgattagcattatttatgtggtttatttatagtcttatatgcttagtaattgctcttagaatggttttgtatcaagatggagaactcttaagctgaaaataactaaacttaggaaagtgattcaattgcctcggaaaaaggaaggatcaggtagataaactatcttcatccctttttagagtttttgtaaacaaattatggtcttgtgtatatactgctaacataatggttttgtacaaagatattcgattcttaagcggaaaagaaccaaatttaagaaagccatccagtctcctcgaataagaaaggccaggtatatatataaattacacacactgatacagtgtttttggaaatctctgacgtgtttgagtgtttttttaacttggacgaactaataaggcatatcacatttctctactagatcttaattcccatggtacaatactaacgaaatcagggatcagattcttcttgttagaaaatctcgtgcaaatgtgacaacaaatatattcttcagtgctaaggtgattaaaatttttgatcacctcttacaatagttggcattctcttgatattttctaacttaaagggttatgttttctattcggattttttgttatagaggatgttccgcgaagattatagaacaagagatgaaaaaccagtcagcctctgtaagattcttaccatattttttctgggcattgattttgtagttttcttatatattgtttgctctgcacataatgtttgctaacaaaattcattgaattttagaga

SEQ ID NO: 6374 - DNA, 1032 bp, Arabidopsis thaliana landsberg
ccccattcgcctcttggctactaaaccaaaatttcacctgaaagtacaactcaatctataaattgaaaccacaaatcaatgccaaaagaaataaaaaaacactaggtaagagtcttactgagccaaaatctgactgcatgctactttacagatcatgctttataatgaagaacccaactgaaaacataactcttcaagttagaaaaacaatctaactccagaggaatataaactgcaatatcgtaccttggaaatcgagatctatatgatatgtttttttagttgatatcacttaaacacgttagaaattagtagaaaaacattgtatcaaagtgtgtttatctacctgacccttctttttacggagagattgaatagctttcttaaatttggttcttttccacttaagaatcgcctatcctggtacagaaccattatgttagcagtatacacaagaccattagaaaactacaaaaactctgaaaagagatgaaggtagtttatctacctgatatttcctttctccgaggcaactgaagtactttcctaagtttagttatattcagcttaagggtcgtccatcttgatacaaaatcattctaatagcagtaactatatacataagactgtaaaattaaatcacaaaataatgctaattaagaaacttacaaaaaatcttacaaattctgatccaagcccgattcgactgctttgctcctgttgtttctgttaatcttgacaaaggaaacaatgtccacaactgaaatactgaacatgcttattaagtttgaataatacaagtttttacgagtgcatttgtcctttgtgaagtatgtattgagtagaaatagataaacttcaccttataactctagcttttatcttgcatttttgaatcatcaccgagcttccctgatatgtctaagtcatggaaagaaacataaataatatcaaaataaatttcgtatgcaggacaccgcttctgctttagtgggcctagtgtctttgatgagttttcttttgaatagcatc

SEQ ID NO: 6375 - DNA, 516 bp, Arabidopsis thaliana landsberg
ctaatggcagtactgtaccttggaaatcgagttatttgatttgcttttttagttgatatcacttgaacaggttagaaattagtagaaaatcattgtatcacagtgtgtttatctacctgacccttctttttacggagagattgaatagctttcttaaatttggttcttttccacttaagaatcgcctatcctagtaaagaaccattatgttagcagtacactatatacacattagcagtacaagaccattaaaaaactacaaaaactctgaaaactaccactattttatccggtagtttatctacaaaaataaatgccaggccttacagagccaaaatctaactgcttactaatataactatcaaagttagaaaaacaatctcactcatgagaacacattaagataatagaaagagactctaatgcatcatctaggcaacaaattatactttaaaatagagtttcaaaacttacatttgttcccgtctccaaattgagatatgcattgcaacttga

SEQ ID NO: 6376 - DNA, 702 bp, Arabidopsis thaliana landsberg
cacactgatcgaaattttgcgcaccttcttcgatttggtagtactatcacacgatccaaatccaatccgcgtatccatttatcgattatcacagacccaaaatcgaaacccttggatcccgatttgaactagcccaacgaatcagacgccattgaacatgaaattcaattgatcggagaaaagaatcagaagaagatagacgaacaaaatcgcttctccactcaaattcaaactcgatttgaagaaattagaaatgaattttgaaatttgaatattcgttgacggtttatttgtggaagaagagtttaagttgcgaaattacgaaaggtttagagaaagcgaggcagctatttatgtgattcttcgaaaccaagagcacgtagatttacgattatccccttatgtgtatatgctcgaacggtattatttttaaaattgtgtttcccgctttggagatttttggttagaatcccataaaaaaaagatggttttgctaaatttatttattttaaaagttattcacatctcttgatgatataataaatgttcatttttctttttctttctttgggaatttggtgaataaacaaaattggtaaagcaatttcgaatatagctatgaaatgtagaaaacaaaagcaaataatgatttgcatttttctttgtcagtcgtcacgtcgatggcgtcatacactgatacaa

SEQ ID NO: 6377 - DNA, 656 bp, Arabidopsis thaliana landsberg
tgtactatcacacgatccatatccaatccgtgtatccatcgttggattatcaccgacccaatttcgaaacccttggattccgatttgaactaacccaacgaatcagacgccattgaacatgaaattcagttgatcggagaaaagattcagaagaagataaacgaacaaaatcgcttctccactcaaattcaaactcgttttgaagaaattagaaatgaattttgaaatttgaatattcgttgacggtttatttgtggaagaagagtttacgttgcgaaaatcagctatttatgtgattcttcgacacaaagaacacgtagatttacgattatgcccttatgcgtatatgctcgaacggtattattttcaaaattgtgtttcccgctttggagatatttagttagaatcccattaaaaactttggagataataggttcaatttgttcttaaaaactagagttgaagatgaaccctttttttaattagtagcaaattatcatttgcttgctcttatctttttttttcgccatttaattagcaaatatacaattgtttatttaggtttccattttttttaacttaccaattaatattatttcccaatattaaaattaggggaaaatttttacattaaaaaaaaataatttcttgaaaaa

SEQ ID NO: 6378 - DNA, 1961 bp, Arabidopsis thaliana landsberg
  unsure (1)..(1961): unsure at all n locations
gcattcccttataggcaaaagttccataaggacatgtgaaagtttttttctttttatcattagggtgaactggtattgggaagaaaggattatatccatcaacaaagcaatagtatgggtgattagctaagcgttcaagcatttaatcaatgaatggtaaaggaaaatgatctttcctagatgcatcatttagcttattataatcaatgcacatcctatgtccagttatggttctagtggggatcaattcatccttttcatttttaacaacagtcattccacctttcttaagcacacaatgaaccggagaacccatgtactgtcagaaatagggtatatgacatcaacatcaagtaattttcaaaatttcttttttcactacttctttcacgttaggattcaaccttctttgtggttcaatgttagaataggattcgttttcaagatggatcctatgattgcataaactagatgaaattcccttaatgtcatataatgaataaccaattgctctcctatactttttaagttcagacaatagttggttcccttcatcatcatttaactcagtattaatgatcacatgataggtagagtttgaaccaaggaatgtgtacctcaaaccttgaggaagtggtttgagatcaaccttgggtgccttgaattcagaccagtcatgtgaagttggaatgatcagctccacagtgtcgctgacagttgcgatcgagtgattggtcgagtatgtccttgagtgagcaggttgaacctgtgttgacccttcttcactcatcgtcactacctctgttgttgccccattcaattactcaaagggttctaactcttccatcgctttatgtgagtctaacaacttctggtagcctaaggtgatctttggtcaaagcactattaaggtgatcttcttctgcaagctcttccagtaactcgtcagctaactgatccatttcttcgatccaaaagagttgcccttctatggtaggcttcttcattgcatctttgacgtcaaaggtcatcttaaagtctttgccaaggtttagatcagtcttccctttcttgacatcaatcatagctccttcagttgctaagaaaggtctttccaaaatcaaagggtctttgggctcttcatccatctccagaactacaaagtcagttggtatctctacaactccaatcctgattggtaggttttcaagtaaaccgtgagagatccttactgatctgtcagctatgataaggaatatgttgtaagatttgtattgagtgaaccccaatcttttggcaagggagagtggcatgcgactgactgatgctcctaaatcacataggcctgttgaaagccaatggacctaaagagcatggtagagtgaatgaaccaggatcactaagcttctttggaattatcttcttctgtataatagcactgcatttgtgactcaatactactattccttgcacttcttgaattctctccacgatcaacctccttgatgttcttggcaaacataactctatacttatttaccaatgctttcttgtgaaggcaaggaaatggaagatggggtttgtaaggaggaggaacaaagaacttttctttattcctgacatcaactggtttcgaagcagttggtgatgttactaggaatggtggtcgagtaacatggtcgagtggctgctcaagttgtttgtcagcttgatctttactgagactgaattcctccccatcttgatatacactatcctcagtgactgtcttaggttcctttttggttggaagtgcttttctattgcgcagggtgatagcatgnnnnnnnnnnnnnnnnnnnnnnnnntgacttgattttcttggaagttggcttgactgtttcagagcggaagtagatgcagaattttcctccaggtatctgacttcggaatcagtgtctccacctggacatttagatcat

SEQ ID NO: 6379 - DNA, 2391 bp, Arabidopsis thaliana landsberg
cagatcaaatgtcggcatcacgggtgtcgatcaccgctaatacggcggcagagactagacggacgccgattcttgcaggagagaaaaaatcaaactttgattaccctcaaagcgaatcgcttgcgaacggtggtgttgggaaagccggtggtacgagtagagatctgagccgcggtgaagctacccttgatcgatctcagggacaagatttgggtcctgtgacgagaaggtctgtttccgctgcgacggggactaataccaccgctacgcagcgccggacgcggaaggttgcgactcctaagtctgagaaagcgcggtggaagacagtggtgaggatatttgcgaagcagcttggtgcgcttttgatcattgttgggttaattcaattgacgaggaagatgattctcaaggcttcttctccgtcctctccgatttcttcttatgaaacggagatggcgttttcgggattggaaagccgaattgcggaagtagatggtcttgttaaggctacgacgaattcgatgcaggttcaagttgaattgcttgataagaaaatggagagggaagcaaaagtgcttaggcaagaaatcgagaggaaagcttctgcatttcagagtgagttgaagaagatagaatctagaactgagtcactagagaagtctgtagatgaagtaaatgctaaaccttgggtgacgaaagatgagttagagaggatttatgaggaactgaagaaggggaatgttgatgattctgcttttagtgagattagcattgatgaattgagggcttatgctcgtgatattatggagaaagagattgaaaagcatgctgctgatggccttggccgagttgattatgcattggcttctggtggtgcttttgtgatggagcattcagatccttatcttgttggtaaagggagtagctggtttgcgactaccatgcggcgcgctcatacgaatgcggttaagatgttatctccgagcttcggtgagcctggacaatgttttcctctgaaaggtagcgagggctatgtgcaaatcaggctgagaggaccaatcataccagaggctttcacattggagcatgtagctaaggtaatgatactcttgtactgcaaactatttgtgttggtatcagttttctttcttgtgtgctcttattactacctttggtgtttgcatttacaatggtttgatattgagatgcctggaaaaaatgacgccattttctttgtgactgttgatggcatgaaattgtttgaatgaggcttgagattagtttagatcggttgctgcaaaagatctgaactgaagaggattatggttacttaataagtttcgtcatcatccagtaggtctcgtcatagttctccaattctgtgtgtgccatatgccattgacctttaggagtttgtttaagatctgttttttctggcattatcttttgaaattgattacacaataccactctatcgaagtatctcaaacctttgtcaaagagttcaatagtatgcataaatagatcctttgagggttttgggttatcttctgtttctatttgcaacgactggaactagactattttgtttgtttggggttatttcaatgacaataaccgagtaaaatgaaataaagaagacatttggatacgctcattacttactgtctctggacatttttgggtcattcttattttggggattatatatgtactgacctgatggattgatgcattgtgaaaatgaacagagtgtagcctacgacagatcgagtgctccaaaagattgccgtgtatcaggatccctgcaaggaccggaatcctcagcggagacagagaacatgcaacttctaacagagttcacttacgacctagacaggtcgaacgcacaaacattcaacatcttagagtcatcaagctctggtctaatcgatactgtcaggctagacttcacctcgaaccacggaagcgactcgcatacttgcatctaccggttcagggttcatgggcgtgcgtcagacccggttcctattgtgggaacgaatcttgatcaggactcttcacctgaaagtgaataaaacctcttctgttttgtaacattccttcatccacatctcttttgttgcctgtgttttttatggaaagaaaaagaaagcatcagattctgtgattagactagtagagagttgtttgatttgattatgtcttctttgtgttaccttttggtttatttggttgcagaatacataaatcaagaaatccaatttatactgttaatctttaaaacgcatcttacctatcttctagtctcgatatgataataacatcattttaaaagaatatctccaaattggttttgttctagcagaaatatacagctacgttcaaacg

SEQ ID NO: 6380 - DNA, 1530 bp, Arabidopsis thaliana landsberg
aaacaatccaacaatgaggaaaccaaagacgaatcatgtgaaatatcgattaatactacacatttaatacatcttccattacttaatccgtgttttactcgtagttctatcctcgaaacgtatcgcataaccaacatcttctccaagaggtacatcaagctcctgtgcgactcgcctgaaaaccaaatcccgaaaaggcggttaaaatcaattctgtcatcttaccggaatcaacaaaaacgcaagatgaggaatcatgatgaaacaaacggaaaataacctggcaacggaaacggcagcaacacgtcggggctgagtgatggcgatgacgccggactttgtgtaaccatgtcgatgaagtatctgagagagctgagtactcttcccagaaccggtttctccaattataactaccactgaattcttctccactgtttccacgatcttctcttcaaattgaaggatcggaaggttcgccatatcgcagagaaacactcaaagaacctatcaagttcagcaatcgatcgacgaaaggaaactgtaacctgcaagttctgcttaggttcagtctaaaatctgtgtacaacgaaattcattctccgacgaacgacgcgatagattcacaatacagaaccctaatcgctcaccaacacttcgagaaatctcaaatcaacaacacatttttcctaaaccttttccgttcaaaatcttctctgtatattatatgaaaatcgaaaaatagaaaataaagcgagaaaaatcaagcaagccacaagtgtacttaagaccctctcctttgttcagcggctcttggtcttatcttttatgaatttcgtatctcgtcctttaatttatgacaaagttgctttcagagtaaaaatatttctcattagtagttataaaacctacacacaacaagtacattgtaatttgacaatttgtataatcagaacccaaaaatccttggatataaactacatacctatacaagcttcttttctctttacctccaagactttcaaaaagagatataagtcttgagatggggaaaacaaagtacaactttacatcaactaaaggtaataaagacatgactcaacactggtaaactgagaagctcttacttttccatagaaagctgaatgctcttcccattttctttctcgaggctgatttacactgcggttttgtctctgttacagcggctgaagcaacagagaatccgtcctcggggcttgtgacttctgtatgctgcggttctgtgagatgggtttgatccctttgcctcagttccctgaatagtgtcagtagcttctgtgccctttctcttccacgttgagtaccgtttacggagatagataccaaagaaggtatcactccttcttgtaaaaccatctcgctacagatctcactgtgattgcataatatcagaagcaaagaaacagcttgttcttgctcatttggttcacccgtgtcaagaatggtgcagagattgctcacaaggctaggtgctgaaaccatctcgtcttt

SEQ ID NO: 6381 - DNA, 2389 bp, Arabidopsis thaliana landsberg
taaaattacaaaactttttaaccatcaaatggtttgtgggtttaccaattgatggaaaccaatgaggatgcttggacagagttaagtcaagtttggaagatccaaaaaaagagtggaaagttaaggacctgtagtactcaaacaaaaaactaagtggactaatgatgaaaagagactctaaaattcatttccaaagctgtaggtgttcaatgttcacctaaaggaaaacataatgatctaagggacggatttgactgagtaaataccggacagagttctcttgttagtttttctaaggtcattttctgcttttcacgaatgacctgatcaacagagagccaaaacaatttaagcttataagtaatgggaacataaaaagattggcatagcatcaactaagaattataccagaaaagcaacagcctgcctgatatggtccaacttatcccaagctaagccaacatactgtaagagatgtaaacagtaaaggcgtgtggcgataacttgtggcttacttcatcggtagcttctacacaccatttttttttagttcagccaaacctgcttcaacgtactccccatttcgtggtgtgcaagattcacgacattgaagaaaactgcacaagtttattacagagaaatctttacgtcaaaattggattgagagaaacaaaaagaagttattactagtgagcatgcctgttgagaagatgaagattgatgaaggcaaatatttgtgtgaatacttttctgactaagaatggtggaacctgcatcatgtaaacatagaatataatcacaattttaagtagtttgagaagccattagaattgaacaatgcatgtgctttttctctttttcaaagatgggattttattaagattgactatatcatacaaaggcttaaacaaaagccctaactttagatttacaaaagcccaagaaaggcccatcaaataactaacttttgcagaagcaatctatctgaacttcatccattgatacgtttccaacaatgcatgggcttgtcacttataatcgtggcttgtgtcttcaaattataatttataaagtcacataacaaaaactacatgcagtctattgtttttctccttcgtcgacgaactacttgccgttaatagataataaacaccacacatttctaccgtcacagtgacaacacttcccaattcttctgattatggcgcaggggatttgccggaagatccaatctgtgctgattttgcaagaatcgatgggctcctcaaattatcggacgctttttacgacactgcaattgatcgaaaccttcgcacaaaatcgtaaagtaaaaatcctctttttatttttacttaagaccctttagtttatcaacaagtaaagattgcattttttttggtacatgtaatttgtttcagaatttataaaatgagaattgctatcaatgtatttgaattttaactttggaaaattcaaactttctgatggatggttgtcaatacaagtttcataagaagattgaaaccaaaatgactagacaagacgtttggtgtatgtcgaccaatgtgttctgttttgggtagcactttgccttaactctgtttacacacacacgtttatgtgttttgactgttgaaaaaaaaacgaaagatatttcaaaagtctacgcagtacacaatttgtttgtttgtgaccatttgcaatgattttggaccgcatttaattgccccacgactgtaatggggatcacagtttggattttacttcttgtttaccttaaacttcctttcattttaatgttgaagcagaagaacctttcttttatctttttataatcgacatgaagctgtccttttcacttgttttcaatgctctcacgttgcttcttcaagtttgcatctttgctcaagccaggttttctaatgagactgatatgcaagctttgcttgagttcaagtctcaagtttctgaaaacaacaagagagaggtcttggcttcatggaatcactcctccccattttgtaattggattggagtcacatgtggccgcaggagagaaagagttataagtttgaaccttggaggattcaagttaaccggtgtgatctcaccctccattggtaatctctcctttcttagattacttaatcttgcagacaactcttttggaagtaccatccctcaagaggtgggaaggctatttaggcttcagtacttgaacatgagctataatcttctcgaaggaaggattccgtctagtctttctaactgctctagactgtcgaccgttgatttatcgtcaaaccatcttggacatggtgttccttcagaactaggttcactttctaagcttgccattctggatcttagcaaaaacaaccttactgga

SEQ ID NO: 6382 - DNA, 1072 bp, Arabidopsis thaliana landsberg
aaatggctttcaaaaatatataataagaaatatatgaagaaatgctgtgattttttgatgcggatttatgaacaaattttaaatattgcttaacaaataattttctagtgttttttttttgtcactcattcttttgtttctcttttttttttctagtgtttaaaaaaacttagtttttaccaatcaaacctagtaacctaccatctagtaaatctaagtatacaattggtcaatttctacatcatctcctgactcctgttacattttaataaataaaatagttcatttgctagttgctacaaaagtgccaaaatatttcattctgtagccaccgcttgatgtctgaagaaaagtcataaagattcgtaaaatgtctttgttttttgttcctttttagataatgggatcccataaaacgtgtctttgttgacgacttgacttaatttttagaaaagtggcagtttaatatccctattttttatttcaagttgcattatcactacaggcattttaatttgcaattgcttcgcctcttatatgttcattttcctacaaaacatgagaagcatcaaaagctttttaaccacctttttttttttttgaaaagcatgagactgtttcttttacttgctctcatgctacttgaaacacatggttttacctctgaaactgataggcaagctttgcttgagttcaagtctcaagtttctgaagacaaaagagttgtcttgtcctcatggaaccactcattcccactctgcagttggaagggcgttacatgtggccgtaaaaacaaaagagttactcatctggaactcggaagattgcaactaggcggagtgatatcaccatccattggtaatctatcgtttcttgtatcacttgatctctatgaaaacttttttggtggtactattcctcaagaggtgggacagttgtctagacttgaatacttggatatgggcataaattatcttaggggaccgattccattaggtctatacaattgcactagattgttgaaccttcgtttagattcaaatcgtcttgggggaagtgttccttcagagaa

SEQ ID NO: 6383 - DNA, 567 bp, Arabidopsis thaliana landsberg
  unsure (1)..(567): unsure at all n locations
ttaagtttgaaggaattgctgaagatccttttgctcgaactttcttggatcatgngatttttaccctgcttatgngaagaacaagagttggcccattgtgattatcagaaacttgccgatttttcagtctctttagtcttattgggattgttagtcttcatttctaatattctattgtcgttaatctttacttatgataaataataaagtgttgtctagcaagtagtattagtggtcttattgggattgatagttttcatttctaatatcgttaatctttatttatgctagataataaatgttgtctctcgagtattactatcttattgggatcgttcgttttcttttttactgctgttaatctttatttaattataacaacaaagttgaagcttcctagtaagtgcaaaagaaaaagggtaaaaaacattaagttctttagtctagtgatttaatccttgatttccttccaatttaatttgttagtgtattaatttctccgtttatagaaatacatacccacaattatttcaaagtanggcatattcttttcactacagaaaatga

SEQ ID NO: 6384 - DNA, 619 bp, Arabidopsis thaliana landsberg
  unsure (1)..(619): unsure at all n locations
actttgcatataaccagatgagaggtgagattccagacgaagtagctagattgactcaaatggtgtttttccaaatagcactgaatagtttttcaggtggttttcctcctgcattgtacaacatctcctctcttgagtctctatctctagctgacaatagcttttcgggtaatcttagggctgattttggttatcttctaccaaatctaagaagacttcttttgggaacaaatcagttcactggagctattcccaaaacacttgccaatatctcaagccttgaaaggtttgatatctcatctaattacctgtctggtagtatccctttgagctttggaaagttacgtaatctgtggtggttagggattcgtaataactctcttggaaataactcgtccagtggtcttgaatttattggggctgtggcgaactgcactcaattagagtacttagatgttggttacaatagacttggaggtgagcttcctgcttttatagccaatctgtccactacattgactagtctgttccttggacaaaatcttatctctggaaccattcctcatgacatcgggaantcttgtaagcctgcaagaactcagcttagaaacaatatgtt

SEQ ID NO: 6385 - DNA, 1890 bp, Arabidopsis thaliana landsberg
tgaagaagacattgcaagggacaatcatgaaagaacaataaccaagggatcattaccacattaacttagaaaaactgaacccatcatttgcctcacgaactagtttctaaacaaaaattctacaaaatacagtaaacaccttacatcatctaaggagttcatgccactcatttttcaagttcaaaaaaagaacaccaaatgaatatccattacaagattttaccgatttttatgaagtaatcagcccaaacgatacccttaaactccctcatcacgttctcggttccattgctcaattctcgccctcctttcctcgcttccttctctcacatttcgtgggcttctgctccgtttcgggcttccatgtctcctccttccaccaccatcccgatcatgcctctctgatctatcactgctccttttcccatttccatgccggtcacggtccctaacgtcccctctctctcgctctcgcgaatgctctctcttacgtcgagggcttatactcctgcttcgacttctgcttccccgacggtatgaacgacgatacctcccaaacaatttcctcctaagctccctcgaaatctgcttcacatgcatgaaattacagtacccaccacggttacagctgttttcttcatactgcctacaagtagcttccctaaaatccgtcacaggagagaaatcagcaatgataggacgaccggaataaaatctcccctgcaaagcctgcaacgcagcagctgcgtgatcctcctccttaaacagaacatacacattcccaatcatatgatcagcaagattgtcacaaacattgagactctccacttcaccaaacttgttgagttcttcgaaaatatcttcgtagaaatcctcaaagtggtcttggatcttactcgggtctaacggctgtccctgaggatccacacctggagttatcatgtcaggtctctggtacatgttcgagaggagaagcgtcggcgagatggtgggacggttatgaagccgtgagcaccggtcaccgtgacgacaagcaccaatcttaaagtaaaacggacaattcactctatccttttcagtaccaaagattgaagctaaatgctctgccattctcacctaaacataacaaaaatcaaattcaactaaacacaaattgttcttctacgcttatctgataaatcaaatcactacaagaacgattcagaatcagagacgagaaccaaatctaagcttataaacgagagttaacacaaaatcaaagagaatcaaatcaatgaacgaatcagaatcatgaatcgttgtcaaatctaaaacagatcgagacgtttcgagtcatcgagtggagatgagaatccgaaacggagagagagattgattagaggaaaaagaataccgaagaggattttcttttagtggaagagaagctatcgccgacgaggaggtgccgttgccgatcacgatctagggtttaggtttatttgattagcgactcgtgtggccggagagagagagagagtgtggtgaaaaaaagagaaagagatattaatatgggtttattttgcaaataaactattctacaaggaggaataataaaataaactatagaaagttacaatattggtcctcgtcaaattcgtcataacataacgaggattttaagattgatccttttgttgctcctgctcagaaccgaataaaccaaactaaactgaactggattagaaggaaacgaacagaactagatagttaatatctgaatgattcttttttaaaagatatggtaataaaattaaaaataaattaaaaatctagtgaatgtcaaatatcgagttaaaatatctggatatttttatttaagaagtaaatatcaagtgtgttaataaataagaa

SEQ ID NO: 6386 - DNA, 3133 bp, Arabidopsis thaliana landsberg
tggttaatgaggtcttgctctttgttttttccactcattgtaatgaggatttgaggcaagctgggcttcgctgcaagagataaaagaggctcttttctctattagcgcagacaaggcacccagacctgatggttttttggctgcattctatcaggcttacggggatattattggtgaagacatttcccgggacatccggtctttttttgaggataatggtttatcgacccgagttaatgaaacccatgttactctcatccccaagatttcagcacctaggaaagtagcggactataaacctattgcactctgtaatgttcaatacaagattgttgctaaaatacttactaggcggctacaaccttggcttgctgatttgatctcgtctcatcaatcagcgtttgttccggggagggctattgtagataacatgttgattacgcatgaaatactgcaatttctaagaatctcgggtgcaaagaaacattgttcaatggcaatcaagacggatatgagtaaagtgtatgatcgcatagagtagaattttcttcaagaggtgcttaagcggcttggttttcatgataaatggataggatgggtgatgcaatgcgtttatacagtctcatatttattctttatcaatggctcgcctcacggctgtgtaatacctttgcggggtttgcgtcaaggtgatcccctctctccgtatcttttcattctgtgtacgtaggttctctcggggttgtgtcgcaaagctcaagaaaaaggggttatggtaggaatccgggttgcccgtggaagtccccaagtcaatcatcttctatttgcggatgatacaatgtttttttgtaaaacaaatcccacatgttgtggtgctctcagtaacattctcaagaagtatgaattggcttcgggtcagagcattaatttggccaagtcagccatcaccttctcctctaaaacgccccaggatattaagcgcagagtaaagctcactctacttattgataatgaaggaggcatagggaaatacttgggactgccggaacatttaagtagaaggaagagaaacatcttctcgtcgatagttgatagaattcgacaacgctcacatagttggagctccaaatttctatcaagtgctgggaaacagtttctgcttaaagttgtgctatctgccatgccatctgatgctatgacatgttttaaattatctgcatcgttgtgtaagcagattcaatcggttctcacgaggttttggtgggatacaaaacaagatgagaagaagatggcgtgggtgtcttgggacaaacttacactccctaaaaatgcagggggtctcgttttcagagaaattgaagagtttaatgatgcacttttagctaagctcagttggagaattctcaaggaaccaaactcatttctctctcgagttctacttgggaaaaactgtaactcttcatcctttttaactccttcctctgcttctcatggttggaggggcattttagcaggcaaggaattgttaagaaaagggttaggatggtctgctggtcaaggggataatatcaatgtctggtctgacgcttggctctcacctctaatcccatttttgcccatcggaccaccaacgttggacaataaggcccttttggtttctgaccttatttgtcatgatttgaagatgtgggatataacagctataaaaaacatttacctcaatatgaggatcaaattcggaaaattaccatcaacgtcttgcctttgaaggattgtatggtctggttacctgtgaagtcaggacaataccaccaagacaggttatgcgctagccaagctaaactcacttccggactcacgcttggactttaactggcagaaaaacatttggaggctccatacttcgccaaaagtgaaacatttcctgtggaaagcaatgaaaagcgctttgcctttgggcgaggctctagcaaggagaaatattattgcagatttgaactgtaaaaggtgtggtagtccagagacctccctacatttgcttcttctctgcccttttgctaaaaaggtatgggatctaactccggttttgtttaagaggagaagagaccctttagaagttctcaagtccctgttcttaaacttaaatttccaggatttgggacacatcagtttttacatcttcctttacaagtcgtatcttcttaaaagagcttgtgatgcatgtctgatctgtacaaacaatctcatatacatgttcccatttttaaaccactctccaacttcaaccattctcacagctcttgaaaaagtaggtttgagtagtttttagtgctcccttttatatttatacatccatgatttaagagacaaccccattttcttccttcgctggattcgggtgcttcgaaagagacttctattgaagtgtagcgtacccgcaacaaaatttacgccttgaatatcctttaggttattactaatgaaccatgtgtcttctagccaatctgcctttacactcgccaccttctgaaaacgtggacaccattgcttgttctttattctaacaccattgcaaggcatattatcaaatatttgatgtgcgtcctttgcatgattgacattttcaacaccaacatgtggaacctttaataaactttgcctccctttgaatttgaatctccaagtcttgggaaatatattcttatgtccctttgataacccttgtcttctcagtaaaattgtatcgaacactaggcaggcatttgcattgacgcctccaaaattagaatgtgactgagcttgatatctcctcccaatcccataatcctcaataacatccaaaattggtttacaaaaattaaggccatgttacaaggatgagattggaacctgatgttgtgaaatcaagctcgtatgttgaacacaatgcgattcaagaactgaatccatcttctctgtctccatcttctctgcacattctctccactccagttgctggatagattctacatgattcgacgaatcagttttcccaacttccgatgtttgatcatcatcattctcgtgtctgttgatcacgctcattctgatgttgtgtcaacctcagttttaatcacaatttctaccactgttt

SEQ ID NO: 6387 - DNA, 774 bp, Arabidopsis thaliana landsberg
atctgattcaagtttactgatttcttaccgctcttgcttttgttagtgaatggccttttgatattccatttcctgattagcattagatacgcttaattccattggacccttacccattgtacagatggaagttggaatcgaggactgtctgcatatcgagtttgagtacaataaaagcaagtaagataaactgattttcgtaactttgggtttcgagcgatgtggaaaatataaaacagtagctaattctgtatgctctcgatgcaggtatcacctaaaagatgttatccttgggaaaatatactttcttctggtgagaatcaagataaagaatatggatcttgagataagacggcgagaatcaactggagcaggagctaatactcacgtcgaaacagaaacactagccaaatttgagttaatggatggtgctccagttagaggtatgtatattcatcatatgttacaaaactcattcggacctattactagtttctgtaaccaagtattgagaccattgttgcaggcgaatcgatacctgtaagagtgttcttgacaccatacgatctgacaccaacgcataagaacataaacaacaaattcagcgtaaagtattatctaaatcttgtgctggtggatgaagaggatcgccgttacttcaagcagcatgaaatcacgttgtacaggctcaaggaagagacatcttgatgtgtccaaaacataagagaagagaaaaattatttttcagaactttgtaaagccttttcaagactt

SEQ ID NO: 6388 - DNA, 758 bp, Arabidopsis thaliana landsberg
ccaattaagttgactccattggaccttccgatgtggataccatcggtgttgagactctccggaggtgcatcaataccaatatccgaaagagtaatgttcttgcagttaaggatgttcatgtggaaaagtttgctgtttgttgatgtaatactattaatctttgagtttgttagaccagtgaatcggatgttctgttacaaaataatcataatattcatcaagtcattccatgaaaataataacgtttttagtgtaattatgtaaaattgaatgtgcttacgatagggagagagttgcatttgccagttttggcacaatcattggccttccaagcgagggacccttgaccgtcaaaaatagctttgtttccattcaaagtgaaatcagctatattttcgaaatcaatccatccggcatgtggcttagtggtcttgaccgtagccggagccttgaaattgccattcaattccaaagtgactggacctttgcatggacctttgaactctaggctctctaccatatactcaccttttggcactgtaattgtgctccctgctgcacaagcttctttccatgcaaccgcaaatgcctatatatacatgcatgaatcaatgtgaaattctttcttaaacaatacaaaaacgaagtataatataaaatatacaacaaacatttggtacgtaccgcactatcatcagttttgccgtctcctttggctcctgatgcttaacatcaactgctgcgcctgtttggcacct

SEQ ID NO: 6389 - DNA, 684 bp, Arabidopsis thaliana landsberg
aacttcagtgcaagccgctgaaccaactttccgctgagaataggcttgatgttagaacatgccgagacagctggtccctctttgccgttgtggaccaagttgatgtcagagagagcaatattggtgcaaggcactcctttgctgcacattagcttcacagccacctttgttgctgatgtacccttaatgcccttgatagtcacgtctgacaacttcacttgcgatggtaccttcatgtaaattaattggagtgagatttaacaacttgattgatacatatactatcaaacaaaccaaaatatgtattttatgtattagattcgattcggttacataccccagctttgcagtggccataaggacagtactcttggtcgatgagaacgggaaggctaacattgtccattgtgatatcttcgaaaagaatgttggaggcgatgccggggggagatcctggccatgtcttgatgcgaacaccattgtcagtgttcttgatgaggcatttcctcacggtgactccttatactgattgctcattagggtatcttacaagacttgcaatggaaatttcgtgtcctggtccacattctacgttctcaacaatgagatttttctgtaccatcttcaaatggagacgcaatcatctgtcgttttgatctttgccccaattaagttgacttcatt

SEQ ID NO: 6390 - DNA, 1577 bp, Arabidopsis thaliana landsberg
aacctatgattaagcgtgaacagtgttagtctgcttgtatagaaactgatattgggttgtgaagattcccaatgattgctctttgagacataccgtaatatctttaaaatctgacttgactgactgtccagactgaagataactgtactttggaccagctctcaatccaagagccatggccttctttggatcaaactttcctttgatttcaggtaattcacatacatatataactgctgtttcaccaggtttgctgccagattcctctaagcgacttggttctaggagaatggcggatattttcacaacttcgtcatccacaagaacataggcatcatctttgggtttacttaagccaatctgaggcgcagagtcagatatattcaatgatggaccaaaacttcttgtatgaaccatggcagcacgagggataaatgacctcatagcatcaaccaaatacttaagatctgaaggaccccatacgttgacctttgtaacaaaagagattttagaagttgagcaattccactcatataataattgtcataagctcaggaaaagcagacaggaaacatacaaagagatcatatgagaagaacactcacggatagtccttgttccccgataccagctagggtcagtagaagacctaaagcatttaaaataggaacaacacttatcactgtctaacgatctagcagcaaacacaatgcagctgatgcctaaatcaaaagaaaacaaacctggaagcccgcctgctgtctctgagcacacacgagacaaaaatatatgatctacctgaaaagagttaagcgaatcatcacatattaaactcgtctcatcacagacacaagtagtagtaagtccaaaagaagaagtttggtcacacctttgataacttaattttatgttcagtacaaaaacgttgcaacccctgcaattcaattctttaaccaataaaacactaacaaaaagctacacactttataataaaattgcagaaaaacttacctctccagcattaaagatgaatctttgtttgtcaaagaagagtaatacagaaggtgacgtatcctgtgtatccattccagtcccaaggatctaacaaaacagatgaatagttcaaaattatgcatcatctttcacagtttaagattggagtagatatgaaattgaaacctgaacataggcgatggtattggtagggttaagggtgcgagtattcctcttgagattcttcttaggcttatcgaccttatccaatccctcagctcttctcttattaaactcgaaagaatcagaagagtgattaaagctaatagctttatctttctccatcggagacctaccttttctcttctgctcctcgaaactactccatttgcgtctcggaggagaagggccactgcgacggtaaccggcggtgcgaggaggacgaccactcggagccggagaagaagaagcgaagattggtgggtagagagacaagggtctgagaataagagcgaacgaagaagacttgagaggagataatccgacaaggcttatgttttgaggcattgatgaagttaacattt

SEQ ID NO: 6391 - DNA, 2510 bp, Arabidopsis thaliana landsberg
atcaattaagcactatacaataactagtgtaatcatcatttatataaaatcactcgtctattctacatgtaatttaacattgatcaaccaaattcaatatcaaaaaatttaattcaacggtctttctcttaaactctagctttgattagaataatcaagaatttaagatagctgaaaatggaatatttccgtgtaaaaattaaattaaaaccgttaatgtcggcgggacataaatggtaataaaaaaaaaactcgtgagaaaacataaatttcccaatcggacttacttctcctctaaccgagaacacaagaaattctataaaaaaaaacctaaaaatgggttgctttagcagcaaacaccgaaacacagagagtgatatcatcaatggcagcgtgcagagctcaattccgacaaatcaacctgaaaaccatgtctctcgtgatgttctcaagcctcagaaacctccttctcctcaaattccgacaacaacccaatcaaatcaacatcaccaacaagaatccaaacccgttagtcagcaaatcgaaaagaagcaggttctaacacaaccattgaaaccaatcgtttttagagaaacagagacaattctaggcaaaccctttgaagaaataaggaaactttacacgttaggtaaagaattaggtcgaggccaatttggtataacctacacttgcaaagagaattcaacaggcaacacatacgcttgcaaatcaatactcaagaggaaactaacgagaaagcaagacatagatgatgtgaagagagagattcagataatgcagtatttgtctggacaagagaacattgttgagatcaaaggtgcttatgaagatagacaatcgatacatttggtgatggagttgtgtggtggtagtgaattgttcgataggattatagctcaaggacattactgtgagaaagcagctgctggtgttattagatcggttttgaatgttgtcaagatttgtcatttcatgggtgtgttgcacagagacttgaagcctgagaatttcttgctctctagcaaagatgagaaggctttgatcaaggctactgatttcggattgtctgtctttattgaagagggtaaaataatcagacttttctttagggtttagtacattttgatgaagttggttgtctctaggacatagataggatacgtatcaaggttctggttatattggtatcttgtgtctcttggttccgtgaattgcatgaagaagttcagacctttcttgatatacggactaggctagagaccgctgtttttgttctctgatagagtttgatgtttcttactcttcatcatttggtgtttcttcttcttgtctttgcaggaaaagtatatagagatattgttgggagtgcatactatgttgctccagaagtcttacgtcgcagatatgggaaagaagttgatatctggagtgctggaatcatcttatacattctactcagcggtgtgcccccgttttgggctggtaacgcgatattctctcttctttgttcctttcccttttgagatttatatgttgtgaataaaaagctgaaaacagaacattggatatgcagagactgagaaaggaatatttgatgctatattggaaggccatatcgactttgagagccaaccatggccgtcaatctccagcagtgccaaagatttggtacgtagaatgttgactgcggatccaaaaaggcggatttctgctgctgatgttcttcgtaagtaccttttgaagacattttacagagccacaacacaatgcaaagttctggaagattccattatcggttccttcttgattctgagatttgctctactgttttgtgcagagcatccatggcttagagaaggtggagaagcatcagacaagccaattgacagtgctgttctctcaaggatgaaacaatttagagcaatgaataagctaaagaaacttgctttaaaggtgaagtcaagatttttcacatatgcaatgtgattctgtggtgtggtcctctttttcgatatactcatgatgagattctaacaggtcatagcggagaatattgacacggaagaaatccaaggattgaaggcaatgtttgctaacatagacactgacagcagtggcacaatcacttatgaagaactgaaagaaggattagccaaattgggatctaaactcacagaggcagaagtgaaacagctcatggatgctgtaagttggtcaaaaactatattttcccccattccgttcctttactttaagaactcagattctcgggtttgtgattaggctgatgttgatgggaacgggtccatcgactacatagagtttattacagcaacaatgcataggcacaggcttgaaagtaatgagaatctttacaaagctttccagcattttgacaaagacagcagcgggtaagtgacctgtttcttctcgatgttattcattcttaaccggtatatatatacccaagcacggtgagccttttcttg

SEQ ID NO: 6392 - DNA, 1855 bp, Arabidopsis thaliana landsberg
cctatctgattagtttcttgtttttttaggaggatttggttcgtatttgatagctatggatgaaaggacatataagctcattggttctgattatcctggaaacaatcctgaagatgttataaatcctggattgtggtggatgactggctttttatttgtagttagcttcctcggtctcttctgtctcgttccacttcgcaaggtagcgtctcattactgcgatattagtattaatcaaaacaaaatatctaagagaacactattgtttgatctgttgatccttattcaatagtgtatcttaggtgatgattttggattacaagcttacgtatcccagtggaaccgctacagcaatgttgattaacagtttccacaacaatactggagctgagcttgcagggtaattgtcagagattcatcttcaatattcaactccctgcaaaacattgcttgagtttcattaaaaatttatctccaatattattcacatcagaaaacaagtcaaatgtcttgggaaatacctgagccttagcttagtttggagttgcttcaagtggttctttagtggtattggaggtgcatgtgggtttgatcactttcccacacttggtttgactctattcaagaacacgtaagttaaccaatttcgtacagtttaacaataagtaaatgagaatggtttagcatgtggatataattggtaacgagtcatgattttttctgctgtgcaggttttactttgatttcagtcctacttttattggatgtggcatgatatgtccccatttggtgaactgttcggttcttcttggtgctatcatctcttggggttttctctggccatttatatcacagcatgctggggactggtatccagctgaccttaaagccaacgatttcaaaggtctctatggatataaggtacacaataaaccgattaagtaggaagaatttaatgttagtagatgaatttcataggtactctcattgtggtggttactgattctctttcatataattactgtacttataggtatttatcgccatttctatcatccttggtgacggtctctacaacctcattaagatcattgttgtcactgtgaaggaaatctgcaacaaaagctccagacaacacaacctacctgtctttaccgacattttaggtgcgaatatatatgatcctgattcacaatcgcgtttgttagtaatagtcatagttattaataaaggtgtctctcatgaccatactgacaacgtctgtctcaaatattttcttaagagtttctttctccattcttaattcagataaaagtaagacctcagtattaatgcgggagaagaagaaaagagatatcatatttctcaaggaccgtatacccctcgagtttgcggtttctggttatgtgggtcttgcagctatttcaaccgctataatcccgttgatattcccaccattgaaatggtactttgtcctctgttcatacttagttgccccgggtcttgctttttgcaattcttatggagccgggctcacagatatgagcatgccttcaacctacggaaagactggtcttttcatcgttgcttcaattgtaggaaataatggtggagtcattgccggtttagcagcatgtggcattatgatgtcaatcgtctcaactgcagcggatctcatgcaggattttaaaacaggttacctcacactatcatctgcaaaatccatgtttgtaactcagcttttgggtacagcaatgggttgcataatcgctcctctcacgttctggctgttttggactgcttttgatattggagatcctgatggtctatacaaagcaccttacgcggtcatcta

SEQ ID NO: 6393 - DNA, 803 bp, Arabidopsis thaliana landsberg
gtccacattactggaccctataatctaaagcgctgtttgaacttaattaaagctcactatctcgtcgcgtcatcttgtttggttttcattaaaaaaaattttgtgtatttgaattgtcaccagaatctttcagttttcttagactcttgggctccaaggctttacgcgagcgtatatcactcgtttcgattttgagtttttgaccgtttgaactttgacgagtgtttcttcaaattaaaccaaaccaattttacaaaaccaaaattcataactgattcttttggttcacactaaaccgagtttatcaaaactactttaaaatatggtttggtttaaccaaattatacgtcttaatcaatgattaggagactttattaaagtctataaccgcaattcgtcatcaactaccatttccttctccaatggagttcttctctgagagtgagaggaatcactgaaaaaatcatactgaccatttcccaaaaagttatgtacttattctgacgaaatctgcaggaaattctcaatttttttaaaagaagtagctttttggagttatggagacggagattcctaggtcaacggagatatcagagacattgttgttaccagaaacgaatctagatcacggtgaatatgtacccgagtggaaggaacagatcacgattcgaggcttgatctctagcgccttgttagggattttgttctgtatcattacccataagctcaatctaacaatcggaatcattccttcgcttaatgtagctgctggtcttctcggcttcttcttcatcaagtgggga

SEQ ID NO: 6394 - DNA, 741 bp, Arabidopsis thaliana landsberg
tatacattagactcatgcaaatagaccgtttgaccgtttgaagagtgtttcttcaattaaaccaaaccaattttactaaatcaatttctaaactcattctattggttctcattaaaccgagtccataaaaaaaaaatccgttttttaaatttggcttggtttaattgaaggacacatgtcattactcattagtaattgtttcatttgacgaattcttattcagtagtatatctcaggtgatgattgtggactacaaacttacgtatcctagtggaaccactacatcgatgttgattaacagtttccacaacaacactagagctgagcttgcaaggtaattgtcagagattcatcttcaaatctctcacttccctgtaaaccatagcttgagtttcattacatgagccttggcttagtttggagtatactaacaattcatccttgactattactagcaatccatctatagcatttgctagtaatagtcaagttattaataaaggtgtctctcttgaccatactaacaatgcgggagaagaaaaaaaagagatgacatcattcagataaattgttttcgttcttttttgtttgctaccggtttgaatagtttcgaacgtagatttaggattagtgtcccagaagtttttgaaaggtagattggtgttcacatatttttgaagtccaatttttcgaaagcttatccttcaaaaaatactaagatgaacaatatgaacttttttt

SEQ ID NO: 6395 - DNA, 3808 bp, Arabidopsis thaliana landsberg
atctaataggacacattaggaaccggatggggcctataatgtttaaatctgcaaacaaaggtaatcttcttctgaattacaaaatctgagcaactagaaatttattagcttccacatatgacatctccaagcacaagcaagaatcatcgatgcttaaacttaatctcaaaatgcaaatccttacaaaacctcaaacaaatccacgcccaaatcatcacaatcggtctctctcaccacacatatcctctaagtaagctccttcacttatcctccaccgtctgcttatcctacgcactctctatcttacgccaaatccctaatccttccgtcttcctctacaacactctcatctcttccatcgtctccaatcacaattccactcaaacccatctcgcgttttctctctacgatcagattttgagctcaagatccaattttgtcagacccaatgaatttacgtatccttctctcttcaaagcctcaggctttgacgctcaatggcatcgccatgggagggctcttcatgcccacgtcttgaaatttctcgaaccggtgaatcatgatcggtttgtgcaagctgctttagttgggttttacgctaattgtggtaaattgagagaagctaggtctttgtttgagagaattagggaacctgatttggctacttggaacactcttcttgctgcttacgctaattccgaagaaattgatagcgatgaagaggttttgttgttgtttatgagaatgcaagtaagacctaacgagctctctcttgtagctttgattaaatcttgtgcgaatttaggtgaatttgtgagaggtgtttgggctcatgtgtatgtcttgaagaataatctgaccctgaaccagtttgtgggaacttctctgatcgatctttactcgaaatgcggatgtttgagtttcgcacgcaaagtgttcgatgaaatgtctcagagagacgtatcgtgttacaatgcaatgattcgtggtttagcagttcacgggtttggtcaagaaggtattgaattgtacaagagcttgatctctcaaggattagtcccggacagtgcaactttcgtggtgacgatatcagcatgttcgcactcgggtctagtcgacgaaggtctccaaatatttaactcgatgaaagcggtttacgggatcgagcctaaagttgagcattacggatgtttagttgatctactaggccgatccgggaggttagaagaagcggaagaatgcatcaagaagatgccggtgaagccgaatgcgacactatggagatcgtttctagggtcatctcaaacacatggtgactttgagaggggtgagattgcgctaaagcatttgttggggttagaattcgaaaacagcggaaattatgtgctcttgtcgaatatttatgccggagttaaccgttggactgacgtatagaagacccgggaacttatgaaagaccaccgtgtcaataaatctccggggattagtactcttaattaatttacaaatgtaattgaaatttaatctccaaaagtaggaccaaagaagctacaacaacttgttttgtttttctaataaaaaaattgtaaactaatcaactataccacaaaatcatgtgtgattttatttgcatagaagacaagtcatatgaaattcaaatataatcttccgaagaccaaagctacaagtacaacaacttgtttttattaaaaaaaacatgttaatctctaataactcgatacgtgtataccaaaatctattacaaaaatctttatattaatgtcgatgtgacaaaatatcccatttcttaaaaatattttcacaacaaatcctgtcgttacactgttacacagaataaagaaaaaacagttgttagattgttgtcctttataccatagattagtcaaataattgaattaggtgcttattgacacatcaattaagaatggtattagaccgatgtccattcattatccactaactgagtatttttaatgaatatgtagtcctaattaatcatctatccactaattatgtcttaattacaaaaaaaaactgattaatcaatgttctcttaaagattaagagagccaaaacgaagcaaattaatctgccttcaatggcttcttcagcagcagccatcgtctccggttctccatttcgttcttcaccattaatccataaccatcatgcttctcgttatgctcctggatccatctccgtcgtatctctcccccgtcgagtttcccgccgtggcctctccgttaaatcggggttgatcgagccagacggaggaaaactcatgaacctcgtagtcgaagaatcacggcggcgcgtgatgaaacacgaggcggagacggttccggcaaggatcaagctgaaccgtgtggatctagagtgggtacatgtgcttagcgaaggctgggcaagtcctctcaaaggtttcatgagacagtcagagttcctccaaacacttcattttaactcgttccggctcgaagacggctccgtcgtcaacatgtcggttccgatcgtcctcgctatcgacgacgatcagaagtttcgtatcggggattccaaccaagtcacactcgttgactcggttggtaatcccatcgcgattctcaacgagtaagtctctcttcctaattctgcaattgaaatcatcaaatgtatgcataagaaacctaatttgtagaaaaatcatcttgctttatactgatgattggttgattgaatttgaatagtattgagatttacaagcatcccaaagaagaacgaatcgcgagaacatggggaaccacggctcgtgggcttccttatgcggaagaagcaatcaccaaagctggaaactggttgattggaggtgatttacaagttttggagccgatcaagtacaatgatggtttagaccggtttcgtttatctccgtcgcagctgcgggaggagtttataaggcgcggtgcggacgcggttttcgcgttccagcttaggaacccggtgcataatggtcatgcgcttcttatgacggatactcgtagaagacttcttgagatgggttacaaaaaccctgtcttgttgttgaatccacttggtgggtttactaaggctgatgatgtacctctcagctggcgtatgagacagcacgagaaggtatctctttcactttcttctcttccaagaaacgttactttggatacaaagtgtatttcagatgagctttagattttgatgaattgatattggttgttgattctcgctatggagtgaaaaatgttatattgttgtttcttgatttgaacatgtaggtgttggaggatggtgtactggatccagagaccactgtagtctctatcttcccatctccgatgctatacgctggcccaactgaggttcaatggcatgccaaagctaggatcaacgcgggagctaatttctacattgttggtcgcgatcctgccggtatgggccatccgacagagaagagagatctttatgatgccgatcacgggaagaaagtgcttagcatggcaccaggacttgaacgcctcaacattctacccttcaaggttaagatcaatcattgctacttcctcttaatcgaaaacttctttaagggtttaagtctcattgtttcggtttgtatgaataggtcgctgcatatgacaaaactcaggggaaaatggccttctttgatccttccaggtctcaagacttcctcttcatatcaggaaccaaggtaaaacccaattccggagctccaaatctgatttcttactctagtgactaagaaaataacttggatcgg

SEQ ID NO: 6396 - DNA, 2109 bp, Arabidopsis thaliana landsberg
aatgtatatggtgaagcgggtttacgcacattggcacttggttacagaaagctagatgagaccgagtatgcagcatggaacagtgaatttcacaaagccaaaacttcagttggagctgatagagatgaaatgctcgagaaggtttcagatatgatggagaaggaattgatccttgttggagctactgctgtggaggacaaactgcaaaaaggggtatgtagcatagttcaaaatatgattataactgagaaacagcctttccaaaatcattttcaacttactgtttgtatctcactttaggtgcctcaatgcatagataaccttgcccaagctggtctcaaaatatgggttttgacaggagataagatggagacagcaataaacatagggtttgttcttcattgttactgataataccacagactcctaaactgtttctgactagatacatttctaaaactaagtggactaattgagttctttggttgatcccaatgcagatatgcctgcagtttactacgacagggtatgaagcagatatccatttcacttacaaatgtggaggaatcatcacaaaactctgaagctgtatgtattttgtcgatgctataattaaaaaccaacttttacagctgtttcagtagaaacttgcatgtgataacaaaacttgttaatggtcaggctgcaaaggagagcattttgatgcagatcacaaatgcttcacagatgattaaaattgaaaaggatccacatgcagcatttgctttgatcattgatggaaaaacacttacctatgctttgaggatgatgtcaagtatcagtttcttgcccttgcagttgactgtgcatcagtgatatgctgtcgtgtctctcccaaacagaaagcacttgtaagaatagttccacaattctcaaaacatctttcttggtttcagaatattacatatgccatattttgtttatcttggtttttgtaggtaacaaggctggccaaagaaggaacaggaaaaacaactttggcaattggtgatggtgcaaatgatgttggaatgattcaagaagctgatattggtgttggcatcagtggcgttgaaggcatgcaggttgcttaaaaacttttcttcagcacaatgagacatggttaagttttgttggtttttctgagagtagttggttctgtttctttgcaggcagtaatggcaagtgacttctccatagcccagtttcggtttcttgagagactacttgttgtccacggacattggtgctacaaacgaatagcccagatggtaatatatgcattgatataactcaccagaaaacaaatatctatatatatacctgatcttgattcgtcattgttggtttcacagatttgttatttcttctacaagaacataacctttggtctgactctcttctacttcgaatgctttaccggattttctggtcaatcaatatacaacgactcctacttactactcttcaacgttgttctcacttctctcccggtcatttccctcggagtttttgaacaagatgttccttctgatgtctgcttacaggttatataaagtcctctccatcatctttcacatatataacaaaaccttctttttggatcttgattcatttcttggcctgttttctttatctagttccctgcattgtatcaacaaggccccaagaacctgttcttcgactggtacagaatccttggatggatggggaatggagtttatgcatccatagtcatctttacactcaaccttggaatcttccatgttcaatcattccgctcagatggccaaaccgcagatatgaatgccatgggaaccgcaatgttcacatgcatcatatgggcagtaaatgttcaaatagctctaaccatgagtcacttcacttggatccaacacgtaatgatttggggaagcataggagcttggtacgtcttcctcgctctttacggtatgttaccagtaaaactctctggtaacatctttcacatgctcgtcgagattcttgcccctgcacccatcatctggcttacttcacttctggtcattgccgccacaacgctaccttacttgttccacatttaatgccaaa

SEQ ID NO: 6397 - DNA, 6682 bp, Arabidopsis thaliana landsberg
tataaaaggtatagtatcaacttttcccaattatataggattgatactcaataaaacacatcgcagtgtgtattatacttttctaagcatctttatcatatgcgttgcatttaaacgaaacaagaaaacggtcttcgttttacgtcagaaaaacaaacaaacaaatcaatttgaaaaagagaaaaaggtatatagtaggagtgttcaaatccaattttgagaaataagagagaaacaaaaaggagtaattgtttagacaaagtgggcaaatatgattacaccaacaaaagtggtgggaacctctctaactctagtgtctatgtctctaattacaccaactcctttttttagtttaaccatttatattaaaatttgacaaccttaattccaaaaatgatataccacttccaattttacattcttttattactttatcacaatgtttaaaattttaaataataatctaaatttcataacgtgggcaactaaacatgattaacttttccggaattgccactttaattctaaaaaaagttgctttaaaatgcgacttgactacatgaacgatgttgtttctttctttttttcctttgccggctattgttattcatagtccacaccattacttcaaaaaaaacattataaaaactttagccaaaaacaaaaacattaaaacattttcaagttttgttttatatctagcatactctctggtttaagtctcacaccttttttatttctttgggaagttaaattcacgtgtcgcaaatacatcgagtatgggtggaatatgtgtaagatgttgcatagtgaagaagtgtagcattataataaagaacaatcccttttaaacaatgatttttatgttttgaagagtcatttacaataccacaacaacagtaacaaggtgattatttcaaagcacgttcgcgaattgtgtggtctatatttaagcatttactcaatattctaaatttagtgaaagtgacgatccctatcgttggaagacatatgcaattcggacaacaaaagaaatcaaagatttataataatagtcacataatgaaaatgtcattcattctaaaaacattattccatgttaccatgtgtaagctagttgatttgatttggctttcttggaaagaaggaacatcatgcataatggattgatgtagctatagctgatgcatcatcattatatcgtagtcatagtggatggttgtttgatgatgcatcgtaaacgaatgtgacaatagtgaaagttatggtgcaatatgagtttcaagtcttttgcagctgcactaatctctcctcttcctcctccattgtacattgagtttttttcctacaagccatctttctctcaacacgaagactccaagtccgtcctctcgcggcagtctatgtccaaataaaccgatatttgacacacgacgaatagactaaaataatcaaaatcaacaaaagaaaacttaaaacaaaactgaaatcattaaagaagtttgattgatttaactcactaaaccatctttaacttaagattgatgaaactacttgtaatcttgtcgttcatagatcatagagtggttgtgaccaaacaaaaattgaataatggttacaagtgtgtgtgtatgcattggactattattagttacacataaaataatgagccatcaacaaatctcccaagaaaagtatcacaaaatttgcaactctacgggtttcaataaattggttgttttacttcgtttttggggtgctgaaaattccataacctgaagccgggccactagaccttccaggggccgtaggttgttcgtttggagtttcgtttggcaaccgggtttgtggtcgtggtggagctcggggcgggtttggtggttgaggttcaaaccggccggtaggttgttgattcggagcttggttttgaaatcgaggtggaggaccttgccggtctgggtggcggtttggagatggtccagagggttgctgatttggagcttggtctgggaaccgagactgtggtggacttggacgctggtttggaaactgaggattaaaccgccctgtagattgttggtttggagcttggtttgggaactgaggccttggaggctggcttggaaactgaggatcaaaccgccctgtaggttgttggtttgggaactgaggccttggtgcacttggaggctggtttggagactgaggatcaaaccgcccggtaggttgttggtttggagcttggtttgagaaccgaggatgttgtgggtttacatgctggtttgaagacggaggttcaaaccggcttgcatctctacctcctgaaaactcactgctaggttctctttttgcgtatgcgttctggaatttaactggttgagcctgctcaacactgaacctaggttcagacttctctatatcttcctgatcatcaacagtagccactccggccttcgagctatcaggctttggtgattcttctttcactcttgcagattttatgtcaatatccttcattaatttcacccctcctttcttgggtggaccaaacttggcgtgtctaactataacaactgcgccttttctatccgcctcaggccaagattccacaagtgcatccccaatctgtacaaatataattatgaaccaaagcaaggacgataaaactaggaaacaattgcgaatagaagaagtcataagacttacaaaacaagtgaagcgaaatagtaactcaagcagcttttctggttcaagttccttatgcttgtccttgtcaggcactgcaaggcactgttacacaaagaaaagaaagagcgagataattaaaaagttgctcaccatggaattcacctcaaatcaagtattaaaaaagagagcattgcggcgatatgtctggggctttgttttacaccaaagcattcagaacagctataatcgcaaaataatcacttttttcaggagtttcccacgaaagtctatgagaaagcagtatgaagaggtccagtgactaagaaaattactacctttacacgatatccactttccatcagcttcaatgcttgatcagatttaaactttaggtccttggcctcctgaagaaaaaaaagtaagtgaaagaaaaattgtcattgtagtattttcattaccacagagataagaagaagaagaagaaatagatagggtaaagcgtttctagagaagcatacaatttttggagtaaatcgaatttccttgatatcaggtcgaatagcttcagcccgcttacaacaaggtaaaaacataaactcaggacacaaatacaactaaaattttcgtacaaacaaacatgagaattcaaagaatggataggccatatcaccgaccttggccttagcacgctcttttcctactttagcttttttgtacagctccaatgagtatttcagaattttacacacaggtggcttagcatctctttggacctatacagatttagaaatatataacgagatagacctcatgagaactatcattaggtgcacagttgtctaaagacaaaaaaaaacagaagagctatagttcagcattacacaatgggagtaccacatttctttaagaaaaggagacgcatggattacaaggatacaaatttggtaccatgaaaattatacatacaaatcaagacaattttaccaaagatctccagttgcaatcattagacacaacttcttgaatgactcatgtttaaagttacctcaactaagtcacactgaagctccttagcccgtctgagagcttctctcaacgatacaacacagtgtcctgcataacgacaaaacgatatcacacattcctgattataaaaatcttctaaactcttttacttttcctaatgaattcttaagctgtactttggactccacacctcttaagtaaaatctacaaaaacaaaggaatttttaactgactccacctaaagatacttaaccgaaaacaccaacaataggatctctcttcttatactctttctttattttgtacaatctaagactttccacacaccaaaagagaaaaagacttggaataatatattaccttcctcggaaaccaatctaacatagtcgccagtaatcttctcattgagacgtggaccatcagagtcaacttccgcttccttcttccttgtcttgaacaagaacatggatatacaaatttatgaccaactttgacagcaggatcatagtacacatacgacactataacagctctgaaccaaacaatgctcactcactaacatccattagcccaaaaacatcacacaactaaacaattcaaacatgatctaaaatgcatatacaccgtaactataacatggacacatctaaagtcgttgaattcaacaacataacacaaaaatcttgcagggttccagatcttccatacttatcatctaatgcaatctaaaagggcacaaccccacatttgcaaccaaagtactgaaagttacgaaattgcatagctaccaaaagaagaagaaaacagagctgaaagaaaaaaaccaaactttttatcaaaacaaagagagtaatacctgagctgaagtagcaaggaatctgagatttggaagatattagaaggtcttgtacatatatctgaatttgggatgtcaaaagaagacaactctgttgtctgtttacgacatgagtagaagaagcaagacaaacttgagtgtagtagtttctggttaattggtttgatgcgtatttgagatacgaacgattgattatacgccatatagccatagaacccaatcggacaagagattccccaattgggaatcggaagtgcgactaaagaaagcttcgattttgttatcaatacagaggtgaacggagtttcaacggcggcgattagtggaagggttcaacgtctgatcgttgcgaacttgcgattaactggtccgaagacaaaagctgttgggctttgttgggctttccataaaacaagatatttctaaaagaaagaaaaagatttgtcatactctttttattttttttggaaaaaaaatcttaagaaagtaaactaaaacacatttaactacctaatatatattgattgcgtgaccacaaatccgaagtatataacatcatgtagtcaacatcataaacataaaatctcaggttaaccggttcattaatttcggcgttgaccaacgttgatcaacaaatctcagggataaccagatcatcttttactaactacatgttaaactgtttgggcttttggcccaaatctatacttcccacacatatacaattttgtttgtaaggttgattgaacttgggttagttctttccaaacttaccccaattctccaaaacccattagaataacagaatttgggttagttttttcttaacctcagcctgtaataacagaatttgttgagagatatgcacaactgcacaagcctacaatatcatgattcgcgttggcaagatcaatcatatcatgcgttactatggtactcgtgattgtgatattttttttcataacaacaacacaccattgctttgcatgtattctctatgatgttgattggacagaaacttgggacaaattcttatcaactacattggttcaactcagatcttgtggccatctgagaagaaacttttgctcgctcttccatagaattcgtatacgaattcattaccacaccacgaacagagttactaaaccggtaattacgttggcaaattatgtggtcgatacctaagcttagcgattaatccgatattctaatttcgtaaagtgacgatccctagattccctaccgttggaagacatgtaattccactatcgaaaaataataaaggtcatgatagaagcaacattatggaaatgtcattcattctaaaaacattattccctgtaaccatgtgtaagcgagtagaatttatttggcttacttggaaagaaggaacatgatagatgatgcatcatcattaaacatggccatggtgatagatgatgatgatacatcatcaatgagtgtggccatagtgagagttatggagcaatatgagtttcaagccttttgcagctgcaccactctctcctctattgtacgttgactttcttctacaagctcggtcgttgtacctttctctcaacacgtcattgtctagatgactccaagttcgtcctcttgccgtgctctctgtccacataaacctctccgagaacggattaaccagactttcatagaactcatgtggtgtctcgcaaatcacaccctagaatccaaacaaaagcgttatttatcacgctacacattgtgcttagtttcaaaataaagaatcttgtaaattacctctgccatggctttgatcttgagagttacatcgttgctaagaagaacgagtttttcgtcacggctacggtttcgataaagaagagcacattcgagaacttgatcttctgatgtcggagaatcaatctctggtgcatagttgttccagtgaagtgaaaaggggaatgccgatgagccatttgactggggagtgactggtggggttggtgcaattgctttggtttcttctgttggactctggacttgaatccaccaatttgaattaaccttacattcttcgatccagtccagagctgaagaagcaatctctgttcttcttctaaagag

SEQ ID NO: 6398 - DNA, 2287 bp, Arabidopsis thaliana landsberg
taactcgattatttttaagcttgtttacctggacatgctctcgtgttctgttatcccacaaatgaacatggcaatcaactccggcaggggctaaataccggccatcagagctaacagctaatgctagagattgtttgttatgtcttgtataccaagattcctggaactttaacccgtgagacttcaaaacttcatcgcttggccatttgtactcatcacttttaccagaagatacatcccaatgcagaatagtaccgtctttcgaaactgagaaccctcttgaatcatcatctgatagagctactcctgtaacagaatgttggtgtttgactataacacgaaacttatcgctactctgtagatcttgaaccctgacacggtaaagtgtaatcagagtatcagtacaaacaatctccaagccattatataaaaactaatgtaaactaattcctaaaattccataaaacctaaatcacaagcatttttgaagtctatgaatacgtagttaaacaagtcctgaggagtggtttcaaatataaaaacctagctcatggactcaaatatgaaaaataacaactttcttcttcattacctcaatgcattggctctccgaacacgaccactcttctcgagctgttcctgcattagagtctttgccacaagcgaatctctaaaatcatcatcttcctcgttatcttcttcatgctctctctgtttcgcctcttcgattctattcaaagtatcctccgccagtctctttcgtttctcgcctaccgtctcatgagcaaactcatcctccacctcctcaccaaccttcccttcctcttcagattctatagattctacagattcgatatcatcatcatcatcgtaattgaattttctccgcttctctgtctcttcctctaagaaaggatcatgatcgatggaactccttttccctcttctcttcgccccaatacctttcttcttctcgagtttcattcttctctccctctctatcacacacaagcgagcgagagagaacgcagggtttagtggcgatggagaaaaaaatacagagtttgttttcttctttgttctgtcttaaataagaaatccacaaattgccctaactttccccgcaaacaatactaggttaataggtttacttcatgatgggcctaacccacaaattaatcaacttactcataaacaaattaaatggaaaaaagtatcttgtgaattcataaattaaaacgttggtaactcgaataagttgatttttggtttcaaatacgacatacttttttcacacatttattttacttgagaaggattaaaccagaccttaattatcatgtttgatgcaaatgtgaagaaaatctattaacatattgaaaatctaaacaaaccaaagacattacaattcttgagatcagaacactaattaaccaaacgaagaatctgacaactattaataaacccgaatccaaagccaaacactttaacaatatattaaaaccaactagtgagcttaagttgcagaacaagaattatcagcaacaacaccaccttcctcagctttctgcaatgcctgcttctccttcaacgtcgccttagctgtatcatacgttgcgtgcaacccaaacaagacgtaatatatgagcagaatacctgtccagattgcaaacctaacgaacgattttgtatcgatggaaccaagaaggaagatattaatagcgatggaagcagaaggcaaccacggaaccaaaggaacaccccaaattttcggagccctagcttgcggtacaagaaacttcatggcaaccgtagacagaaaccatataggaaccgtaatgcaatacccaatccaaccttcttcttccaaagcccaataaacagcagtcgcggtagaggacgcaagaatcaaacctaagaacactaaaaacttgttacggtcacgggtcgatgtttctccggtgacgtaatatcttctaacgagaagagccacagcaacgaacatgaagatgaaaagtgtggaaacagacaagagatcggctaaaattttcagttttgtgaagaatgctatgagagctgtcgcggcaagcattaccacggtcgcgttaattggtgttccggtctttgcgttgacttgagctagccatggaggcatcatatgggctcgggctatgtgtgtcatgtacctagcttgaccaatggccccaactaacaaaaccgtcgtcatacctaaacatttcaaagattagtatagattttagactatactaattgtaaacgcaaacgc

SEQ ID NO: 6399 - DNA, 2467 bp, Arabidopsis thaliana landsberg
ctcctctgctttcagccctagtttcacccgagcctcggcctcggttttcgctgtcttacgtttcgttgtccaatagctcttcctaggcgtgttaacagattttggtgtcctcttggtcacaagttcactacggacaaaagaattatccgtgccatcaatgtcaagatcaagacggtatgtcacgaaatggtcgtggttaactccaatggtgttgtccgcgacgattgtcccatggatgtcgtcttctttgatctcggatgtgttaacatattccaccggtttaacttctaaaacacctgttaaaccgacctaggcacattaaaacggtaacattagaacaaaataaaattgggaacattgatcctgttaaatcttattgtttgtttttggtagagttggaatctatttattttgtttgtatgattgagtctgagtctatatattaaacaaaaatgaatcgatttttttttttaactttttatcacaagcaatatgctttctgtgtttgtgtctcatatttacattttcaatttcaattaatgtttagtataatacaatttaatattgtatttctctgaaatattaagtgaatattccaatataccaaaaatagaaatgattaacaattaagttcttaaatcaataaagtaaaatgcatgtaataagctagaaaaagtttctcctaccaaaaacaaataagctagaaaagtttttgaaagacatgttaccccaattttgatggaaccactaggttcgaactcgtaatcaactatatagtcgtagttccccacggtcgtcaccatccggaccacaagacttacgtccggtcttacctctgtgatctatacatcagcacttatttaaatataaaagttttccatattatatatcactaataaattgaagaatttagttgggtagatcttgatagtttaatttgttacttttaagccgggaatttcaatttcggtatgccgccacataatgtctccggcatatttctcgaagatgcacataacatttgtgatttttatcggagttccgtcttggcttgcaaagacgccgtccatgaaggcagcgttaccgggacaatcggtgtaaggttcaagagacacagcatattggccgcaaccaaattcaccacagtcaaaaaaagttctgaagtaccaatcttcacttggatccatataagttacaaatatttccgacaaatggcctttgtataggacttgacggtatttgttaacgtccatgtcgaaaatggacgcaagagagataacaagaccagctcgtacgtcaaatgacatatggaattcccaatttgcccatctattcttcacacattaaattttaaaaataaaacagaataataattaaatgtatgttttattaggatttcatttgttttttttataatagatacaatatcgtttttctataaaatatgaatttttaagtatatagctaaaaacagatattttagttttacctgaccgtgtgtccatcgattttaaacccaggcccctccgactgaaaaaggacggcgttttgaagcgacgggccaaacggcggttttagcttcgagatacggaactcggttcccttagcattaggcaaaggactcgtaaacctatccctaaacttcgttactttcatctggtcaaggttaacgattatcgtcattccttctataggtctaaggtaagtgttcaccgacccattcagataaaacggtctcttttttataagcctctccggcttcgcctcaccaaaccatcccatcgttgaggtcgtgacaacaacctcggacacgttcaagccacgtctcctgattgagtcacaaaacggcttgaacttgagaacaagctcgctggttgcttgttgctcgtcaattgtaagcatagagtaaccatttcctacgtgaatcttttccgaaactatggcttgagaggcaaagtccacgacgatctctcgggtctttccgtgatctcgggcgatgacgaatgcgtcgtggtggtgacttgacattatggtcttgtgatgaatgccaggataagactagggacttgttgggttcgttgagacccacgtactggaaagtgaacctatgttccggaccaacggggtacctttcgttgatgatgttgcggacgatattgagttcgatctcagtcaagggatcaaatgggtgaggcggtgggatgaagcttaaggatacgattacaaaaacggaagaaaatactaagatggtgaagagaagtaattgagccattcctttgtgatttgatggacttgagctttgtatactttatatagccaaaacactcgcgttctttaacacttgtaacacacaagtaaacatgtaaattagggttttgtgatccatgtatattgtattacgttaaacaaacgaaataaatatgaaaatactttattagatagctaaatatttccctttctattacac

SEQ ID NO: 6400 - DNA, 662 bp, Arabidopsis thaliana landsberg
tagtcaaattttatcagaaatataaagtacctttgagaccacactgccaacgtatcgtcgccttggctcctgtcagcgtacaaaccacctgcccaaacctctgacctgttatacggcgtgatccacacgttatagttggtgaatgcagctcgaatctgcgggaaatcatcttgggccaggagtgggcctgcagcggatccatgaagtaaacggtatccaacctcattgccatgcttcgtctttcggttagggttaaccacaactaactcctccgccttcaaacctagtttcacccgagcctctgcctcggtcttggccgtctttggcttcgttgtccagtaggtttttctcggtgtgttaacagattttggagacctcgtggtcacaagttcgttacgaacaaaggaattttcggtaccgtcgatgtcaagatcaagacggaatgtcacgaaatggtcgtggttaacaccgacggtgttgtcggcgacaattgtcccgtgtatgtcttcccctagtttgatttcggatgtgtgaatatattctaccggtttcacttctaaaacaccggttaagccgacctgcacatattaaattggaaacattagatttagaaccgatcgaacaaaaactaaattgacaatagttgatctttttaacaatat

SEQ ID NO: 6401 - DNA, 851 bp, Arabidopsis thaliana landsberg
gcttccatgtgagcttgagctccacctttcactgcaaccaaaccaaaatttcaaatttcaaattacggtttaaccaaaccggatagtgccaaatactgaaaatttgcaacagaatcaatttacccgttcgatttaaccagaattaataatcgaaccggagagagtgcaacaaaactagagaatttcaactaaacgattcagtaacggttacggtttggtaaaaccggataaatcaatcaaacgagagaaagacacaaatcaatttcagtttggccattacggttcgataaaaccagatcaacaaaaccggagaaagaaacagatcaatttcaatccaacgactcggtgtacagtgacggttcaaccaaaccggaaaggtaggtttacttgaacttactagatctagcaccggcgggagtagaagcagcgacggccgccgcagaattagcaacatcagaagctaattgagtcatctccaccgtacgttcctcccaaggccaaccatcaggatgttcaactttaaccctaaacgcaattaaagcatccatttgcttctcaagcatcacagcttctttcataacttcttcaactttctctttataaaacttctcaactttattgaactcatcgtctagtcgccggaaaaacaccgtctcgtactctcctccttcctccgacgccatcaaaaacgtcgtctcgtaaccatgactcgccgagtttattagaatcggcgcagtgacatgcttaattccctcctcgatgtcatcatcggaatctgagaaatgtccgatctgatgaccaccaccgtgtccgccgccgtgtccgtggtgtttcttttttttcggtgatgt

SEQ ID NO: 6402 - DNA, 11020 bp, Arabidopsis thaliana landsberg
  unsure (1)..(11020): unsure at all n locations
tacctcaatggtttccacaagacagtctgatatcttcactaactgtcctccaatccggaattgtgaagaaacatgttcccgtactattgttcctaaataggatgcaaaaggtactgaacctggaccacaaggtctcccataatagtatagtcaacgtgaaccttttcattttgggtccttggcgatgtgtttcatcttcgttggtcctcgtttctttttacgctttggttcagcagctgtttcagcaacatccacagtaggatccccagcgtcagtagaagcagtatcatcaactggttcctcactttctctgttcacttcattgttagcatcttcattctctttatccactaactcagcctccacttcattagtttcatctgctagtaaatcagcctccacttcattagtttcatctgctagtaaatcagcctccacttcattattatctgcctgtacttcagtaaattcctgagtctcaatatgtctctcagctaactcgtcaatcttcttcttcttttggtatttcctttttcgattattcaccatcttggttcacctgaaacaaaacatagatttgttatcagaacaaattcttgagctgcaaaaacaatctcaatctcacaaaacacacattataagcaataataagcaatcaaaactatcacaagtaatatgatttcacacatagatcccttcacagtcagctcgggcattcctatcatcatcaaccaagtcatctgcaaggacatccatgtctactaatactggcaatggcccaacgtctgcatttccagattcagcatcttctgcactgtatcttctagtagaacctctcatagctacataccaactcgatgattcatctgcccttgaataaaacacttgctttgcttgagatgctagtatatatgtatctcttgcaaaggaaacttgactttggttaaggttgacaagtatgaagccatcttcttcctttactccatttcctatatttgcccattgacaccggaatataggaatgtagaagacattataatcaagcagtataatatccaccactcggccataataagacacaacatcaaccattggggtattgtcctttgaactagctatacacattgttgtcgcctcatgcaacataccacagttctgagtctgcctatcaattgaaactgtatgaaaccgattgccattgactatgtaacccgtgtaagatcttgcgcatagacgaggaccatatgctaaccacttaactgcatcttcattatgagaagtcataggtatcaatttaaaaaaaaacaagtgtcgtttactatatagatagcatctcagagaataaaacaatacaaaaccagaaaatttacctgttcttttaaccaagaagcaaatttctgagaatgtgtattccataaaaatcctgaatcccgtctacacctttcactagaatcttgtagatgttctaggtgcatgctaaaattgaaagaaagcaaaacatcatctaaaccattgtgaatatcctaaaaaattaataaagagtaagttaagagaatagcttactccacataaggatcaagctgcgccatattatgaatcaccgcaagatgtgctatgttcttctcattctcagtaagagtaattgaagtggctgctgatataggtcgaccctccaatatagagcagttctcataatcagcatttctttcaatttcctcttcagcatttgttgtctttttcagtaaatcactgcagaatcgcatacattcctcagcaagatatgcttcagcaatacaaccctctggtcttgcagtgtttctgacaaaatccttcagaactttcatgtacctgaagataaaacagctacctttaagcataaaagtattctgtaaaagaaaaaaccttataagctactggattgtacctctcaaatgggtacatccaacggaaatgaactggtccacataaacgagcttccctgcctaagtggactgtcaaatgcaccattatatcgaagaaacttggaggaaagaacctctcaaacatgcagatagtttccacaatttcattctccattgtagaaactgtctctctgtcaataactcgctgacacagtttgttgaaaaacgcacacaagcgtccaatagctatcctaacacctttaggtaacaaacctataaatggataacattgaagattaaaaacaacacatcaaattatgcaagaatttcagctaaaagaattcatcttatacctctgattgcaaccggaagaagctgttgcatcaacacatgataatcatgtgattcgagtcctgttatcttgcagtcctctaaggaaacgcctcttgctatattagaacaataaccgtctggacctttaaagtcatgtaggcgcttgcaaaatgttttcttctccttctttgacaaagaccaaggtgttgcgggaaggtaagttctcttttcttgtgttgtaggatgcaaatccttccttatcccaagattttggaggtctttacgggcattaagaccgtcttttgattttccacaatgtaacaatgtagagacaatgcttgaagtcacatttttctctacatgtattacatccaagttatgccttaccgggagatcctatagagaatacaaatacaattaagactgattgagactttaattcttacataacagatcattctttaatgaatcataccttctaataaggcagcttgtatagtattgatcttttcttccatcttgataactctttcaagtctatttcaacttcctcatcttcctcggattcacttgaagaatcttcactatcagagactggatcaacacatacagtccgtttcctctttctcccagactctttcacatttccaaaatcgtttttaaaagttttcaggttctgagatacctcatgacctgttagaattctagcctttctcccatgttcagcttttccatcgaaccatgtcttcttatccctatatctatgtgttggtgccaatccttttctatgacacataaacacatgttttctgctaaactttagccagaaactgtccgtgttttttccacatataggacaccccatttttgctttcaccttactcccagcgagatttccataagccggaaaatcacttattgtccaaagaagcattgtctttagagtaaatgtagttttactatgggcgtcataagtaacctctccattcttccacagatgaatcaaatcttcaatgagcggttctaagtagacatcaatgctattaccaggttgttgtggtcccggaatgagcaagcttaacatgatattctccttcttcatacatagatcaggaggcagattatagtttactaatagtacaggccagcaattgtatttagtattcttcatgttgaaaggattgaaaccatctgtggaaagtccaagccgcaagttcctttcttcagctgcaaatgatggatacttatcattcatcttctaccatgtaacagaatctacaggatgatggagctttccatcgcaactcttgttagtaaaatgccaccttaagtccttggccatttcttctgtcctgaacattctcttaagccgagggatgattggaaagtaccgtaaaaccttttgtgggacacctttctttacctcgcctgtgtggatattagtcttccaacgagacgcattgcatttgggacacttatccagcttcttgtacttctttctgaataggcagcagtcatttacacacgcatggatcttctcatatcccatatcaaaggtctttaaaaatttcttcacatcatacaatgatgtgtgaagaacattatcttgaggcaacatgtttggcaatgtctccagcagctcattgaagctcttatcagaccatccattcttggtcttaatcctaaagagagacacaatagctgatagcttactgtggtttaaacaactagggtacaaaggggtttcagcatctttcagctttgcaagaaagtcatcttctctcttgtcctcaccctcagcaatctcagctaagtcatccacttgaggctggcctaagtctcctttagtagccaactcctcatcaaaatattcagcagccttatacaactctagaatttcatcattccactgatttgttgtactttcgccttctcctgaagccacagagtctccatgataataccattcgctttgcaacttgtatgcctcatccatccctttcgttacaagatggaccaccacatcactgcttgagtggcggtacatgttacgacactctttgcagggacatataatcatatcaatatctcctagagccgcaaccacatcacgtacaaaactccgagcacctctctcgtaattgggatcaactcttcaatgaataaagaaagccaaatagaagcctcttaaagtatccaaaacccatttgtaaacctaacttatataagataattccctgcacccatgtcttgtccaacattatataagcctaaacctttttaacaccaattcaagccataaccaacattaaaaagaaagaaagcacattcactcacagctacatcttatgtgcagacatttctaatataaacacaattctaaagacaaccaaagcaatgcaaataacggatgaatcacaatcacaattctaaagacaaccaaagcaatgcacagaaccaaaacagtcggggaaaatgaagcaaattcacagacaaattgaatcacaatcacaaagacaaccaaagcaactgaagagactaacctgtcgtgtgattacaagaacaacaagcttcagtttccaagcgtttcaatcaccaacacttgcaaaaaaaatagcataatcatgtgacaatgaagctagacaacttatgtaatcgattgttttataatttctacaagaattataactctgaaacttgtaatcgattcacattacccaagaaccctaatttcacataaaccaaatcgatgcacataaaccctaaattcaataaaaccatctcaaaatcgttcgacaatagatttgggagtaaagaggaattagtgaaaggaagaaacacatgcctttgatttgagctcgctgacgctggcgattaaagaggaatgtgacttcgatggagcttgaatgtgacttcaatggagctcgaaatagaagcagaccggcgagagagaagattatagtttcggggataatgaaatttggtgtttgagactgtagaatttgacagcaatcgtggatcagagaatttggtgtgttttttctgaaaccttaggtctttgtcgagagaagagggaagagacatgaatagttctagacgcgcttaagtgaataatttaaggtaaagtgttggcgggttgagtggttttagactcccactcatgtatttcctatcatagcgtttttaatgaactattaaaaaagaacccaaaaaaaaaataatctttcatagcagtgacggaaaatgtgctatcctcgtctgctatcaatgtatcttcatgtgctattaatgtggatatttgttgtagtgataacaagattaagacttcaatcttatatgttgctagcagtcatcttcaatgattgtcggatcaatttgccaaagaaagcattgttgggcagcaaagaactttgtaaagagtgaggactgatagatgagatgacacaaagattgaggttggggagtcatctaaatatctatcaattgtgacagataatgaactgaagaaaaaaataatgaaagtttcaagaacatcagtttggggagttgcgatacctccaaagaagagataatatcactctacaaatactgtcatccactttttggtatcacgtagtttcgacaaagcaggaaaaggttatttcgttttttttttctttaacccagtttttaagaatttgtgtgtgttaactttcaggtaaaagatgaagactagcctatgttgtagagtcttctaatgatctttggctattctcattacgagctcattaatccttgaatgttcaagatgttatggtcgagcttcaagtaacttaggatacttttggttctgttgaagtagggattgtcagtactctgtttgataatccaaaacttgtaatagttagcaggctttaaagcttgtaggtggttgtacccacttttataatgtttggaacctctctgtttctaaacaaaaagaacactttgtgaaaaaaaattaaaaatagaatggtcctctgtacatgctgtttcatgtttagatctaaactacccttggaggtttacaaatgagacaattgaaattgaaatcgagagaaataaagttggtagaaagctgcaacaatggcagcatcgaagccatcaccaaccgatacctggggattctactctccccggtcctcccagccgtaacaacttcggatccgccgatctcagtccctccggtctcttcgcctttgcctctggctcctccgtctctgtcgtcgattctcgttctctccagctcgtttccactatccctctccctcctcctcccggtgctctctctcccttcgtcacttccgtccgttggattcctctccctctcccccgcgatctactctccaccgaaccctccgcctctcaccttctcctcgccgttgcagatcgccacggccgtgtcgctctcgttgacttccatcttcgctccgtcgtcgtctggcttaatccttcctccgatcccaagctcggaattcaagacctttgttgggttcaagctcgccacgattctcatgtcctcgctgcgatttctggatcttcgtttctctcgctctacacgacctccggtggacttttctggaagtacgatgccggcacggagattctctcctgtctccgccgcgatccctatgattctcgccatttctgtgtgcttggccttaaaggattcctattgtcggttaaggtacttggagatagtgagaacgatgttgtgattcaggagatgcagataaagacagatttcagtgagctactgaggttggaaagagaggcagctagtaatggcaattcatcatcgtcttcgcctgcttcagccgcatttccgttatactttgctagatttgccttctcgccacattggaagaatatactctttgtgacgtttcctagggagctattggtgtttgatctgcaatatgagacgcccctctcgactacgccattacctcgtggttgcgccaagtttcttgatgtcttgcctgatccaaacaaggagttgctttattgtggtcatgtcgatggcaggctcagcatttggcgtcggaaagagtaagatatctatgtcctttaagggtggcttcattttagcttttgatggttcagggttttgtgtttccagtcactatacagattgagttgcttgttaaccaggagatggttgaagcaatcaccgtttacatgttagaagtatcatcttttaaagaatctacactgggaaaatatggatagaatattttaggtatcagattttagggtaatcatgctaatagccttgtgcttcaaccagtctagtctacctatctggtcatatttgaactatctggtgtctcgcttcgtttaatatagtgtctgagattgatggtataaaagcgtcatatgaatatgactttgtatcttgttatgttgaacagacttggatacccctgttctggatgcatatctaaactatagctcgttacatatcattgcagaggagaacaggtgcatgtcatgtgtaccatggaagagtttatgccatctattggaatgtccatcccgtctccttccgctctggctgttctactcagtcattcagactccacaatgcaaaccattacaaaaattcacccggatggaacctcttctatagattttgataacccatttgacttttatgacgaaagtcttcttgtttctaagacaacttttatctccctatctgatgatggcaaaatatggaagtgggtcttaagtgctgaaagtgttgaagatgctcnnnnnnnnnnnnnnnnnnnnnnnnngggtattggagccactgaagcagcacttcctggagctattcaggaaaatgattcctcaagtctggatgatgaattagttgttgcacctacaaatcgaagcagaggtcacacatcaggtttctccatggaaaaatcagatctatcatttaaggttggtggctggaaggtttttgggttaactagttccttaatcactatatgactattccgccagagggtagaagtttggcgttaccaggttcctcatcattagggttgtgttttccacagtatgtgtttattggtcttttcattatttttctacttaacagggcttatacttgtttacttcgctcaatgcagatcagccttactggacagcttcagcttctctcttccacagtctctacacttgctgtaccatctccgtctcttacagcaaccctagcaagtttgttttgttctcccttgtatttgtaatactaaaagtgttcataagaaactcaaatgattgatttatggattgattttaaatgaaggagggggtaacattcctgctgcagctgttccgttggttgctttgggaactcagagtgggacaatcgatgttgttgatgtatcaacgaatgctgttgctgcaagcacttcggttcatactggtgttgttagaggccttcggtggcttggaaattcaagattagtttcattttcttacagtcaggtgtgcaaatatattttaataatccaacatgttacgtcgcatcgctttcttctattttttcgtagtgatttccaatctacagttggtttaagaatagtattaggtttagtttaatttccagtgtttttttataaaaaataatagaattaggaaagtgacatccggcatcatgcactggtttgtggtttcaggtgaatgacaaaagcagaggctacataaataggcttgttgttacctgccttagaagtgggttgaataaaccatttcgtgatttacaaaagccagagcgcactcccataagagctcttagaacttcttcttccggaaggtttgattttaatgtttttttacctgcttgagtatttgatgcctataaataatgtaactaaatgcttgtgctcttcaagctatcagcttctcactaataatttaagcttaagaacatcgtctttcagtattgaaaatatgttcctttataagatgacaaatgtcaattcagatcatcgaggatactccttcactatttcaaagatgaggaactattgtaaaattggaagttattactttggacccgagcttctagatacctcttctgatgctgagaattcgttttttctgtcctgttgcaggtatcttctaattcttttccgtgatgctcctgtagaagtttgggcaatgaccaagcatccagtcatggtgagtgagctcaaaccccaaaatatttactttttctacttaagttagtctcagtgagtggatgacaataactttttctctcttatgtttgcaagcttagaatttgcaattttacattctgacttttttctttagatgtcccattctatatatcttactctctcattcctgtaatactttcttcgtatggccatttactttcacgtaataatgccttgcccaccttacactttttgcatgtgaaattgagtaattggcaccaaataatcactggctcatgttaggtcttgaacatcataatgcctaataagaacgattatgcataaaattgataaagcttgtccctttaaattttttgaggagatttacttataacaacattctctatgtggcttcttttcttggctccccccttttgcaagtgctaacaagcctttcttgccatgccaatatctattcttgtgaacttttaagaagaaagtaatgatggtatggagaatgggtcaaatgagaactaaaagcgttctttatataaatatactcttgcatcttgtttaaatatgtcgtatctaacttgtggagtgtttagtatctttttgaggttatgtattctaatcaattatattatgtttcttatttctcttaatcgtgtagcttagatcattagctcttcctttcacggtagtggaatggacgcttccagctgttccgcgcccaggtcaaggcggtccgtccaaacaatcgctctcagcatccgaaggagtaactgcttcaggagactcttgtgagatgtttatgacaattcaaactgtgttatcctgaatatacccaagtctttgattcatttttttctaaggggcggtaattgacatatttgcagcatcagtgggctcagatggatcgcaagaagaaactgtagagagttttgcatttgcactagtaaatggtgctcttggagtatttgaagtccaaggacgtcgaattcgagatttcaggtaaaactaatcagagttccgttaactcaattttttttcagaattcttctttccgtagtaatccattatagctgcgtttttatttttgtcacaatgctgatcatagttaagggcttctgaatatctctctgattctgagaaaataatatgaaatagtgattgcacattattgcttacctgctgtagagttccttttcacttattccatgcttgtttttcaatctgtttctttgccatctgtcattaaattcttcttaaaaaattgcgagatagggagtagatctttattgtccaatttcagaaagtgcagaaaattcactacctgatagttgttagtagccgcctttacataaattagcactcactttcttgaaccttgattgctgtgtaatcttcttcctatattcactgacgtatagatgatcccgcctctatttctagacctaaatggccatctacttcatttcttccctcagatggattggttacagccatggcatatcgcttgcctcatgtggttcgtttctttttaccttccaattctgtctcttattttatgagagatcatattttgctctctcttttcaagttatg

SEQ ID NO: 6403 - DNA, 1030 bp, Arabidopsis thaliana landsberg
agcgccataaaacttccttgtccttaaaatccagattccataaaccgtcccaaatagcgttatcttcatttacattagcctcaggtattgttaccggaaccaccgggtaatacccgttactatttggttcacaaccagaagttgttgttgaatgtgtgatctgatgaggtacatataatgctccactttcgccgctactgctactgctgaaggtgttatcaccattgttgttgtcgtcatctagtaacgacatgatctttttcatgtcgatttgattgaattgaagcaactgttgttcttgctgcaactccatttgtctttgctgctgaaattgttgcctcttcaagattcggttctttgtcttctccgcactgttagttggagacttcgtcttcttcttgaaatgggttcgccaatagttcttgatttcgttgtctgttcttcccggtaaactacgtgcaatcgtggaccacctacaaatacaaatcatcagacaaaaaaccttagaataaggaaaaagagatgagttacttattagggtaaagctacaattgtttcatattttagtttcgaatgtaatgaaaaaaagttaagagaagaaaattctatttagcatactagaggatgtgaataaacaatcaaagcttaggttaattacctattgccccacttagcatgtaactcaaggataatggtttcttcatgaggagtgatttgtcctctcttgaggtctggtcttaggtagttaacccatcttaacctgcagcttttcccatttctcttcaaccccgcgagcctcgcaacagagttccatcgcccttcaccgtgaagctgcacataatcgatcaaaaggcggtctttttcagcagtccaaggcccttttctccaaccttcttttaccattccccatcctccttccatccctccccacaaactcattatttcttcttagtttttttttctttagggaaagctaataagaaaagtagtgtcttctccttttttaacagtcccaccaaatctttttttg

SEQ ID NO: 6404 - DNA, 3338 bp, Arabidopsis thaliana landsberg
attatcatttcgtttagattttaaaatcttccttaacaaaactatgctaattttatttcatttgtatacatgacaaaaaagatttttcaattatgttttttcaggaagcgacctccaaaacggtccaaccaatccccgagcaccgatcgatccgcgtaacgtcgtggatatggaaacattccgcaactatgcagcacaaacaaacgcgaacatggctcaaatgcattcacgaatgcatctaacagtgagcgatgctcccaacatagatcgagtgatcgaagaaaccaagcgcaccccattcacggtcacaaaacgagcgacccaaaggctcatctgagagccttccgtctggctataacacgagcgtaccagacagacgaagaaaacgaagcaggtcatttccgtttcttcgcagagaacctcgtaggtcacgccctcgaatggtttgctagtcttgaagggaactttattgataccttcgaccagctcgccgccgccttcttaaaacagtactcgatactcatcgtaaacaggacgtctaaagccgacctctggggtctcacccaacttcagaacgaatcccaacgatcttacgtcaaaaaattcaaagcaatcaaatcaaagattgcgaacctaaacgaggaggttgccatagccgcccttcgcaacggcttgtggttttcctctaggttccttgaggaactcaccgttagataaccggtctctttagacgatgcccttcacaaagctctctacttcgccaaagccgaagaggagctcgctgtgctggccttaagattcaaagaatctaaaacgcaaaacgctccccttgcaattaaaaaacccttcaaaaaggaaaaccaaacgcaagggcagcataccttactcgcaatagaagaggcagctgaggacgagagtccagaacttgacctcgaaaaatattgcaagtaccacaaaaaaaaggacattccaccgaggagtgtcgcgccgttaaaaaattaatcgcaactgggggcaaaactaaaaaaggttcaaaccccaaagttgaaacccctcctcccgacgaacaggaggaggagcaaactcccaagcaaaaaaaacgggaatgaacaccggagggaagtgactctcccccacctgttaggagagaatgcatagacctagtctttgtagaactcgatctaggtcgcaggacaggaaggtcagtcaccacacctccccccgccccgcataagaaaaacatgaggtttccattatgtctctcgaaattctgcagaagcgcaaccgagcacctctcccctaaacgcatcgattttatcatgggagggtctcagctctacaacgactcaatcaattcgatcaaaactcataagaggaaagcagattcttacacaaaaggtaagagcccgatgatgggacctgaccaccagatcacattctgggaaagcgaaaacaccgaccttcgataaacctcacgatgacgctctcgttattcgaatcgatgtaggcaactacgaactctcccgtataatgatcgacacgggaagctcagttgacgtactcttttacgacgccttcaaaagaatggggcacctcgattccgagctgcagggtaggaaaacgccacttaccgggttcgctgcagttacgacctctcctctaggaaccatccagctcccaacacgtcgcacggggagtaagacaactcacgaacttcctcgtggtcgataagaaagctcctttcaacgtaatactgggaagaccatggctacacgccatgaaagccgtcccatcgacctactaccaatacattaaattcccctccgacaaggggatagcagtcgtatacggcagccagcgcagctcccgaaaatgctatatgggtggttacgagcatatcaaaaaagccgaccccgtggtactaatgatagaggacaaactcgtagaaatgaaaacagtcaggtcctccgacccttctcaacgtggacctcaaaaatcgctgataacgcaggtctgcatagacgaatcagatcctaaacgatgcgttaggataggtcacgacctcgaccaaacaatatgagaggatctcgtaacctttctcaaggaaaacaaagacagctttgcctggtcaagcgcaaacatccgaggaataagcctcgtggtaacctcacacgaactcaacgtcgatccgacctaccgacctataaagcagaaacgtcgcaagctaggtcctgaaagggctaaggctgtgaacgatgatgtcgactgattgctcaaaattggatcgataagggaagtaaaataccctgactggcttgccaacccagtcgtcgttaaaaagaaaaacgggaagtggagagtatgcatcgactttacggacctgaataaagcatgtcctaaagacagtttcccattcccgcatatcgaccgactcgtcgaagccattgtaggacacgaactactgtccttcatggacgcattctccgggtataaccaaatacttatgcgcctagatgaccaagaaaaaacagcttttattactgaccgaggcacctacttttttaaagtaatgccctttggtttaaaaaatgctggagccacctaccaacgattggtgaacagaatgttcgctgaccagataggtaaaacgatggaggtctacatcgacgacatgctggacaaatcatgtcagctcgcaaactaagaccatatttccaactaagaccatatttccaatcacaccccataatagtgatgacgtcccaaccaatccaaaccattttgcaaagcccgacctaatcaggacaacttgcaaaatggccatagaattagcttaacgtctttgaaccatattttataaactttctcagattgttatgtgttgttggaaatcgttattatcccaacagagaaaaaaagaactatatttatttatacttttatagtgtttgacacattaactttttcattagagctttttgggtatgtcctttttaattttatcagttaaatatctttgaaccatgttttatgttttgtttttccaggttaccgtaggcattgatattattgaaaaaaaaagacaaagtgaattatcatgattcataatatttaggaaaaaattaactatatctatttgttgacaaaaaaaaagaactatatttactaatggtgtttagcacaacacttttttcattggagctttgtgtgtatgtattttcttattttattatctaaatatccttaaaccatgttttatattttcattaggttacgtgtttcttaatggtgttaatactattgcaacacaaattcctctttttgtttaggtagtgaag

SEQ ID NO: 6405 - DNA, 768 bp, Arabidopsis thaliana landsberg
accattacaagaaagtcaagaaaattttggttcaatagtagtgtttttcttacccgccatccaaatgctctttgaatatcttttcgaatgctctacacattcccaagatagtgtatagttgagcctgaggagaccaacaagattttagcttaccagagaaatgtatacagttcctatcacttcttaaagtgtatatgtacttactccagcatcaatagcgataggcctgcccaattggtctaactctctttcgagttcctcgatgttgttgtttatcaaggataggatacttggaatacgtgaccttataacagattctaagagctggaaaatgaaagaccacataacttaaaaacagaacgaccaaattctcatttatgtgtgcaagtgtttggttttcagtaaaaaaaccttagagaggagctttgcaagatattctgagcccattcttgtggctaagtgaccatagtcaggactggtttcaaagtactctcgctctttccttcttgcaaccatcatgtcaacattcttattaatgtcggcttgtgaacggttcactatcccaacccaaggatatttcagcttgtaagatcttccgttgataaccttaacgaggaaaagattcaatcaaagtcaatatgtaacactcaagatcttcatgaggcatctaaattctttaaaaaactatttccaacaaagagaattaaggaggacacatacgtccaatgcattagttcccttgtccattaagtctaactttgtcaaaac

SEQ ID NO: 6406 - DNA, 1649 bp, Arabidopsis thaliana landsberg
ctagtgttccaactctgtaggaactcttcactcttttgttgttgttgtgttttttttactttacgcagattctgatttttttttatttttttttctttttcaatcatgtttaatgactattaggtttagacaacatttttaacgtaatttataagttaacaattttttttaatttaaacctatttctgaaaaattgaaattgaaccaacacttaaatatattactgttcttcttgcgttctccagaacaaaccgatttcgatatcagtggacgtaagaagtaagaacgacgtctagttaaattatttgtgaaacaagtccactccaaagtctccaataacataattaattagtcctcgtgtgtccgtgttagtgtggaacaaatatgtggtcggtactcgatacataaacgcaagacttgcacaattgccgagtcaagctagtatgattggcccgtaccattgttataaatcattaagcgcagtatttgtagtttttataattatatgatatatatgaaaaaacaaatttatttttccggcgccagaactatcttagtgagcctcttgaaaatgtaaactattctccaacctctaagcttttaagtttaaacatggccaataaccttttgagtcatcgaatcctagaacctattccaaagttagccaacctcatacatctcaatttatcttttcagaccacaacctacacaactcaacttcgatttcttgcagttcaagtctctagactatttagatctttccggaaatagtgtgtcaatggttggtaccggttcagaaaaatttgacacatctacttttgtcgagctgcaacatcaccgagttccccatgtatatcaaggacttacaagtattatggtggttagacatttccaagaatagaattaaaggaagagtgcccgagttgtaatgtaatctgtcttctatggtccatgtaaatctctctcacaactccatcgtttccttggaaggtacgccaaaaataatctttaattcgttaatttcagagttagatatgagttcaaacgcctttcaaggatattttcctattattctacctaacacccacataatagctgcatcaaataataacttcactagcatccctcttacattctacaaagcagtttgactgactctccttgatctatcaaacaacaacttcaatggttcaattccaagatgcttgtaatatgctacaacgttgaaaacattgtaacaacaacctcaccaggatactttccgacatggaaaatggcttagtactacttgatgttggcaacaaccaaataagtgggaagcttccaagatctctagtaaactgcacaagcctaaagtttcttaatgtagaaggaaatcacatgaacaacactttccctttctagctgaaggctttgcagcgtcttaaaatcattgctttgagatcaaacagattccatggtcccatcaacaccacaaacacaagagcaagaacaagtgttgcactagaaagcacctgcactatgctatggacccttgctcgatgctctataacttgcttcactcacctttgagatatttcttttggtgttgaatcaaatgttaaaataatccttagctttttgggctttaataaactaaacaacaacac

SEQ ID NO: 6407 - DNA, 4535 bp, Arabidopsis thaliana landsberg
  unsure (1)..(4535): unsure at all n locations
ggttgcagcgttttttagggacttatgttcaagaactttgcaggaaagccacattcaaatcctaaatcagaacattgtcttaattatatgcaacttagaaaaaatatttcctccatcattttttgatgttatggagcacctgcctatacatctcccctacgaagcggaattgggcagtcctgtccaatataggtggatgtatccttttgagaggtttttcaaaaagttgaaaggaaaagcgaagaacaaaagatatgcggcaggatcaattgttgagtcttatatcaatgacgagattgcttatttctcagagcactactttgccgacagtatacaaacaaaatcaaggtaatcaaatatctatacttattaatttaagtttctatgaataaaaaatcatgacttttaatatagtttatttcgatcaggttaacaagattcaatgaaggtgaagcccctgtgtatcatgttcctggagtaccaaatatctttactcacgttggtcgtccaagtggggaaatgcatgaagtatggctttcagagaaagacttgatatgcgcacatgaatatgttttacgcaattgtgattattttcaaccaattgaaaggtatatgatatagtttaatttaaaaatttagcatatttgtgaaacttctcatatattttttggtttaattttgtatagtatgttcgaggatatgctttctataaaatatccaggaatgtctgaaaaagaactctctacgaaaagatctgaagaatatcatgtgtgggtgaaagaatatgtatgtttgtttacatttattaatgtatatatgaatgcatttatttatacttattaatttatataaatgatgttcgtttacatatatatatgcaggttacatattggagcgacaagttaacatttcctttttgggttaaagatttagttggtggacctttgcacaaggtcaaaacgtggccaatgtattttactagaggatatttgtttcatacacaaaatcatggcgcaagacgtagacgtgtaactatggtgtctatgtgaaaggtgaaaattacacaaatgcatctgataccgcagatttctatggatacttaaccgatatcatagagattgagtatgaggggatggtcaatttgagaattacactttttaagtgtaattggtttgacacaaagatcggtagaggcactcggacgaacaatagtggcgttgttgacgttcttgcctcgagaaagttcaacaaatatgaaccattcattctaggtacgtacaaaattatgtgtatgtatcaattaaaaaatttaagatcacatacataaatctaataatccgcgctttatggtccaaattcaacagcctctcaagcggatcaagtgtgttacattccttatccatacacaaagtaagcttatgcgggagtggctcaatgttttaaaagtaaatccgaggggaaacttgttaggagaatatgaaaacaaagacccgactcttttgcaaacagaaaatgatgatggtgtattattgactacagttgaagatatcgtactcgacaatctgacagaagacttgaacccaataattctcgattgcgatgtcggagatgcagatccagaagatgaatttcagtgtaatttatcgtcatctgatgatgaagaagaagaagacggagaaccaaactaattaagtactattatagtgtaatatatataattatgttaagtatttttataaaaaataattttaagtttttgtaatataaaaaataattatgttaagtttaaatcaaattatgatataaaatattatgcaaaaataagctaattatgctaatcaaacatctaattgggccatttccaattcgttttatttaataaaagtgcagtttattgggccaattttaaggcccaaacccaataatgaccaaaaacctaatcaaaaccctatgtctctctcacgacactctcattctcaactctcttgacgctgcctccctcctctctgcgaaccctagatctattactcaaactttcgcccaaaaccctagatctatctctcaatctttcacctttgcctcttctcttcgaaaccttatcttctcttcttcgaaactatcatctctttgtctctctcacgatgaataaggctcaacgaaagagaaaaaacgcaccaaatgtttctcaacgacccaccactctaccaccgcagtataacttcacgccggcagccgacgttcctcctccgctacagacgcctcaagtaaacgaaccgatgttgccgggacagtcaacggctggccatatccgaaactatccaccgccccagcagctcttccagcactccactactcaacgacctagtgtggagacgaatcattcagtagaagtgcagttcaatccggctgctcccagtcaacatccaacgtctcctattcaacactctccggcgcacagtcatccatcatcacaaggcaataacttccatgaagaacacgctaatgctgtgcctcatctccgggaagactcgctgtagaatcttcatgacatccttacggtcccaggcagggatcagttcacaactgtcctctctcccataccaaaagaaggaacgacatggtatgtacttcttcatctcaagtgttgtaatgattttgatgtgttttgtctgattagtagcctctttgattgttttagagataggtcttgtcttattagtaacctctttgattcttaagtgtaaacgcctagacctaactcttcttatgtgtgaacgctttattaaaatgataagattttgatgtgttttgtatgatttgtctgaattgtgtattgatgtgtttaaaatgataagctttatgagattgttttattgtttcatgtaattggaggtttactcgcgacacaggatcaaaaattgtccaaaagattacaaaagtgtttacgaacaagtttgatggtccctattacagctggacatgtgtgcctcgccacaagcaagagcaatacttcctcgagttcgcggtaaaaatatcatgtcctttagcaattcatgacttttattatctgtcttctttccactaacattacctctttatttttttttttagaaaacccacacgtgggatcccttgattacagggacagtgcagacttattttgaagaaatctgtcaacgtcaaatgaaagacatggtcagcaacgcgaggactagtggagagaaaccaagctggattgcaccccttctctgggacagaatgttagctcactgggacactcaagaagaaaagcaaaggagtcggacttattcaaatgtccgtatgtctgaccgtaacggtctcggtccgcacatccacttcttaggccctaaatcgtttcaacagatccaagatgaaatggttagtcactttgtacattcgttcttaatagtttttacactgcagccacattttattctaacttctctaattgtttggttacattacaagaagaggaagtgggtcatcctgtttgtcttggtgatgttttcatcaagacacacacaaaggctgatggttcttttgttgataaaaaggcggagatggttgcaaagaaataccaggagaatgtgctactgaagctgtctgagcttgaggcagaatcttctgctgtttcagatggcacatcaagaacacgggagctcacacccgaagaatatacaaccatcttccttgaggttatgtttcatttctcccaatacttctgctggcttgaatctttttttattttaatctcagctctggttctctattgctttgtagtccaccatgaaagattcaagaggaaatccgtatggagttggaagcctcaaggactcgctggtcaaaggaaagcagaagctagaagactcttcttgttatgttgcattggaagaacaggtgaaggaagctcaacgaaagattgaagaacatgttgcttattctcaaaggcgtgatgctgtgttagctgttcgtgaaactcaggtagctgcgcgtgaagcagagcagaagtgtaggctcgagcacttgtcattggtggagaagtatctccttcaaacagatccgcacttcccggaattcatggcaagtcaatcatctagagagacaaccacagaccctaacacaccatctccatctgcttcataggttgagatgtcttctcttatctcttttctgaacataaaacatttatctcttttctgaacttggaactctctggccccatctttctgttttgaacttaaactctatgtcactgtccttgtaatatttgtgttgcatttggtattttgttgtattaaaacatatgttgttctattaactttcgttttcgtttgtttcagttttggttttgattatcaattgccaaaaactaacaaaagtacagttacatttagacgttaaaattagtcgccaaagttcaaaaattaacgactaagaggnnnnnnnnnnnnnnnnnngcgtcaccaaagtagtcaacaaagtagtcgtaaataacgcagattagtcgtaaatgt

SEQ ID NO: 6408 - DNA, 1741 bp, Arabidopsis thaliana landsberg
  unsure (1)..(1741): unsure at all n locations
ggaagaggaccaaacgagcatagagaacatagacttcctcgtatacttactttctttttatttaccgggaaacatgtaatcaataaggtgagaggcaaacgaatgaatctgcctataaaatgactgcttcttctacaatgtaataatagtaaaactcttgagtacaataaagtggagacatggatgaatatctgaataagctatctctcaaactttctgcgtcatttatgtacatagaatttgcagaaacgttgggaagcattctctaatacatatgtttattggttcaagctacagtgatctcgctccctcctcctgtttccgccatgaaactcactcgtttctgcaacatcattactaaacatatcaataccattgttgttgtagaatgaaacttttaaatgattatttgaaagacaaaatcaaaagttgtgtaataaattttgtcctatatctttgaaacaatataaaagtgttagcatgcaaaatttgaccacaaaaaagttcctataaaaagtgaaaaaatttcaatattattaaagtcaagactagctaaatgccactctaatgtaattaaaatatttttgcttatttactttgtacgaaaaaaacaaacaaatggaggagaaaaatataaggaactcaccaaacgggatttgactcctcttgtggcggtggtggtggcggtggcggtggccgtggtggcgggctcgtcctgtcgtgtgttctgatatgcctcctcttgcctctgtttggccataaagagagcagcgatcttctgcgtagcttcggcttcggtggctccttctttaacgagcttttcaagctcagctttgggaatcctcaccttcaccctcctcaccgctccttcttcttcctccgtcgtccatcctcctggtggtttgagtatggagagatcggaagacgatctccgggccagcatgagactctcaagcctctcctttgcactcacgtgaattcctgatcttacccttctcggtggacactctttcaccggctccaccacaaaataaagccgcttcgactgcaacctctgctttctctacacaccaaacaacattaaacgctttgtctatcaaaaacatgattcgtgtagtttaacaagaaacataacatatagttttgatagaaaaaaaccaaaaacatcctcaagtggtttggctcgggcaccgtagtgcttgacagattcggagtctaacaagacgtggccgggaaagtctttcaagacctcctctgccgtcaccggagttttcagtttaaaagtctcgccgtctatcttcatgactttggtcgttttcttgccgcctaaactgttacccatctagtattagtttttgtctgacaagaaaacgaaaggatagagtttggatgtttgatgattgaaggcggtgaggttgctacgttggggctttaaatgatggggttcgcagacatgtgcatatgggggtaagagagatttgcagatacgtggaaatgatggtccatttttattaattccttaatcaatggacaaaccttctgactacgtacgatttcaagcctaattattttaatcatgatggcttctctaattagcatttggatttctcttaaattggactaccactatttcaacangatggtactcgtgtgcatcacatgcaactattaagnatagcttgtagattcatgtttatttcaagagtatatcaccttgttattcaattaccttcttttctgc

SEQ ID NO: 6409 - DNA, 6568 bp, Arabidopsis thaliana landsberg
  unsure (1)..(6568): unsure at all n locations
ctaggttagcagaaaatttgaatgaatcagatggttttaaggttgttgtgggttcttctggaactatccgagctattgagaatgcagttttcagtggctatggagctgatttgtgtgatttccaatttggaagggtataagagggcctggagatttggtacaagagagctgagcagcgttgtagcaaagctatgcagtgaaggagacgaagagctgattcgaagggagggatttttcaagagaagatcagagttcattgttgctggggctgtattgttggaggaaatattcaaggctcttggcatagaggacatggaggtctcagagtatgcattggcagagggtgtgattgctgattctctggccaaagcttttgatggatcatatgatttaaatgctaatgcaagatggcgatcggtcatgaggcttgccacacgtttcaatggtaaaaagcgaatgactcatgcgatacactgtgccaagattgcaaaggtacattccttttcacgagcaacttaattgtgaaatattggttggcagatattcataaagattgtagctttttgtcataccttttaaatatgcattcctctggtcatatatatatctcttttgtgtgtgtgcgctagtgcctaatggtttcaaatttcattttaagctttgcacaactggatatggtcattttgtttcagtaggtttgatagtacagtgattttccaggagatctatctaggtttgaggaagtgcaatgattttaaggttatcttagacgataaagatcttgagtatctcgaagctgcttgtttcttgcacaatatcggaatcatcacagggaaaaagggttatcataagcaatcttatcatatcatcaaggttagttcatctaacgctgtcaaacataccattcaataagcacagctctttataatctggaaaagtaactcacaaaagcttatcaccaagagtactctatgtttctactagaaaatttttgtaggttttcagtatttgttttgtccacattgttattaatagtttcttctttcgtagaatggggatcatctccacagctacactgctgaggaaatcgaggtagggtacttaatcctctataaggaggaacttgtcttcaatttacatttttttttttactgctgtggaatttactgtttttctgattactatcatattattttcagcttatagctatgcttgtgagataccaaagaaaaaagtttcccaagcttgatcgtgcacctcttaagggcttcactggggaggtagtgtgtcatatatcagcttagcaaaccaggatcaatttgttgatgtggttgttttgattctatgttttctgttgcaggcaaagcgaaaattcataattttgtgtttgattacacgattatcagttacacttcaacggaatgagaatatggatctccaagaagttgaatttattgaatcttccgagatcttcanacctcgaagtacatcttttaatcattctacttgctacactgagcaaacccatataataaccatttcaaactctacaatcaaccccgttgtacctagattccctgcattcttcatttcgttcttccactgaaattaatggtatgctgatcacctcttagtcaatttatttaaatcttgtgaaaatttcgaacttgttagttaatttccttgctggggataaaatggatatttccatctcaatatcagtgtcttaaatctttgtctcttcactttactatgattattgtttgtttgattgcaggtgctgaaaagacaacaccaggaaccggtagaggttggttgtcaagatcaagtaaacaaaaactctgatgaatcacaactggagaaagaagttgagcattttaaaagggtaaacattcattattacccaataattttgatcaatttcactttggttatcaaatgtttgaatttcatgcaatgaactgtcagctatcagcaaatatctatgatcgattagtaacagtaatagagacactgtggaaacattacctcaacagctaatgtaccaaagcctccatatataattttctggtattcgtttgctttgaactcagcagctatacaaaaaggaaatggtgattgtttttccttcctgaaaatcaatcagacggtttctaagatcaatgagttatcggtatgactaaactgaggcaactctagcaggtatgagaaactttctctgcatcaaagatcaaaagcatgttatataacaagtaataactatcataaaccatttcctctgtcacggcaaaactaaacctctacataatttggtacagagagttgttggtttctttcctggagttttccgttgtccaatttgtgaagtcgaaaatgtcaggtggtctttaattattcatgatcttgcagttttaaaccagaaactgatggtaaaactatgattgtacgcagattgaattggtgtaatgaaaagaggtaattaagcatcttagccaaccctgacggacttgttgtgtcaataaatttttgtctaactatttgattcaacaaaaccttttaacacaagattccctctctcacttgtacttttgtttgcctagatttgactccatgttaacttttcccactggatgtgtgcatttgggttataagcagatgttgaaacggttgccttcgaatcaaggtcatctacacatgactgcaggaccaagtgagtgaagccggggcggttgaagcccttgattctcatctgaagaatgatactattaccatggtaaggaagcaaccaatgacaattctagtatcaactatttgctttgacaattccaaaaaaattatatttatttatagtaactcattctgactatgtagtatattgttttatacttctatcataaaaaaattgagttgcgacattttgaatcctagtatcaaatttaaatactaccaccgcaggataactagaagtggactacttgaacataagcaaatccagatggtcgagggtagctaaatggtacttaaccatgttgaattaaaccgatatttaaccggtactcttaaaccaatagcgtttgaaattggcgcaaaacaactataattgagcgagagtggtagagaggagcagaggaggtttaatggaaatcgagcgtaagctgctgcgtcttctccacggccacaatactcgaacccgtttacccgaaatccacgcccatcttctgcgtcacttccttcatggttccaatctccttctcgcccacttcatctctatctgcggatccctcagcaactctgattacgccaaccgcgtcttctctcatatccaaaaccctaacgttctggtcttcaacgccatgatcaaatgctattcgcttgtcggtccgcctctagaatctttatctttcttctcttccatgaaaagccggggaatttgggctgacgagtatacttacgcgcctttgctcaaatcctgttcgtctctttctgatttgcgatttgggaaatgcgttcatggtgagcttataagaactgggttccaccgtcttgggaaaattaggattggggtggtggagctttatacttccggtgggagaatgggtgatgcacagaaagtgttcgacgaaatgtctgagagaaacgttgtcgtctggaatcttatgattcgcgggttctgtgactccggggacgttgaaagaggtcttcatttgttcaaacagatgagcgaaagaagcattgtgtcgtggaattcgatgatatctagcttgtctaaatgtggtagagatcgtgaggctttggagcttttctgcgaaatgattgatcaaggttttgaccctgatgaggcgactgtggttacagtcttgccaatttctgcatctctaggagtgttggataccggaaaatggattcattctaccgcagaatccagtggtttgtttatagatttcatcaccgtgggaaacgctttggtagatttctactgcaaaagcggcgacttggaggcagcaacggctatatttagaaaaatgcagcgtagaaacgttgtttcatggaacacattgatatcgggatcagccgtaaacggaaagggagaatttgggatagacttgtttgatgctatgatagaggaagggaaagtagctccaaatgaagcgacatttttgggggttttggcatgttgctcatacacaggtcaggtggagagaggagaggaattgtttggtttgatgatggaaagattcaaacttgagccgagaaccgagcattatggtgccatggtagatctaatgagtagaagtgggagaatcacagaggcgtttaagtttctaaaaaatatgcccgtaaacgcaaatgcggcaatgtgggggtcgctgctcagtgcttgtcgtagccacggagatgtaaagctagcagaagttgcagcaatggagttagtgaagattgagccagggaattcggggaattatgtgttgttatctaatttgtatgcagaggaagggagatggcaagatgtggagaaggtacgaacgttgatgaaaaagaaccgccttagaaagtctactggccaaagcaccatttgcgatgtttcagtctgagaagtagctggtttttgtcaatagaggccagacttattgctaaatacggtaatcaagttcatttgtaagcacatttgtatttttctggctcggtgaaaatgcggccaccaggtttgattagtttctaatgaattgattagaacaaaaatctgttttgttcggtttctttcaacaaagaaacacaactacgccaatagtataatgcacaagaagtttggagtcgacttactactattaaaacttaaaagaaaaccagaatagagagagtgagatgtctgattcataaaacgtgaagcaaatcaccaatgctgtcttggtttcctacttgatatactgagatagccatttaaaaccctcgccataacccattttgcggacgatgctgcacatgaagacctcaaggggacgaacaccagagtcttcaagattcactatgcctttaccggtagtgaaattggtgagacctaagtaatacctaagctcatcttctgaggatgcataaggtatatcaatcttgttgccaagaataagacagggaacatttgctaaggcttcatctgataaaagagcgtctagctctcttgtcgactccacaaatctatccctgtcgtaagcatccactaggtagacaacagcatcaacctttatagtttatacacacacacagagaaagatttgattttggttccatcataagcaaatcaataaacacaaaacatgtaatctagttaggattaggatgtgaaccttggcatagtagtctttccaaaccctacgagcaatctgatggccacccaaatcaaaggccttgaagttgattttgccaatgctaagttcctcagacgtgggatgctgtgttggctggtgctgaactaatctctgcaacaccaaaagcgatattaaagcatcttcgattacaagaatcacaaaatttctcagtaatacatatattagttgaagagagagcgtagaagtaataaagcctacctcatctttgagcatgtgaagcaaagtagttttttccggaattgtgggggcctaaaaacaagatttttcgcctcttttttgcacaaccctaacgaggccaagattccatagaaccaatcgaataaaaacatgacgtcttcttcctgatatcggattataatccacacaacaaccaaaaaaatcaccagaacagaatcgggaggcagagagagatgaagaacagaaccgaaccccaaaatcaaagtttcgtttcgtaaaatgaagatatagttgtatgttgtaacattagtgtatatatatgcaaacaaaaaaagaaattaaaaaacacgtgggtaatggggactggtaaattgatgcggagccttgtgattggtagtcatcatcgtcattcgatcaatatgaaccgtcggatcctagaacttgtcgttgcgatgttttttattacgttaaactttttaagattaacggcttaataccacgtggcaaaaccttaatggccaggacccaggagagtaatttcctccacaagttattattatgagccggctgaggaaagctacccacatttaattcaaacacataggatacattttttttattgttcaacagacatgatcaaagtgtatatacaatggagtatttaactttgaaacagaaataaaataacatgtaattactgtttcaacgcataaagaatcaaagtgcttacgaagacgagagatattgtagtttcggtgagaccacggtgtttgaagcagtcacccccgcttcctacagaatggccaccaccggtaccgccattaccatttacactgctgccacggccgtcgttattagaagatcctatactgccccctttaccgttgttgacgtctggaccactgctgtcacctgcaccaccaccactatcttctgcaccgacactaccgttgataaagagctcccgctgtcaaaccgggaaatatatcttacaacctgatgtgttacct

SEQ ID NO: 6410 - DNA, 5849 bp, Arabidopsis thaliana landsberg
ctaatggtcaaacttaagtggttaacagaacattaggtactctcttgcgtgcattgattaaaaataaccttaaaacttgggaagaatgcttaccacatattgaatttgcatataatcatgccgtgcattctgcttctaagtattttccttttcaaattgtttatgggttcaaccccatctcacctttggatccctttgcctttgagtgaaagagtaagtattgatggtaaaaagaaggttgagctagtgcaacagatccatgagaatgcgaggagaaacgtagaagaaagaaccaaactctatgctaagcaagctaataaagggagacaagaacaaattttcgaagttggagatatggtgtggatttacttaagaaaggagaggtttccagctcaaaggaagtccaaacacatgccaagaatagacggtcctttcaagataatcaaacggatcaacaacaatgcctaccaactcgatctgcaaggtaagtataatgtgagttctaactttaatgtttctgatttggtaccttttattgcagatgaaacggatttgaggtcaaattcttttcaagagggaggggatgatatgatcatggacaacattaacgatatggagcatgaaccgtagcatgaacgtgagcttgtagccgaggaaggagctaagcttgtagctgagaatgagcttgtagccgaggagaagcttgtagcggaggatgttcttgtcacaccggccgtcccaatgactcgttctagagctaagctattcaaccaagccattggcgggatgcttaaccacatttgggaccgaccaaatgacttgagccaagtcactacctctttggttttgattcaagctcaaggacctcatcaagatggataagtgattcatgagtgctctttttcaatgcctttggttttgtcccactggatttttcaaaggaaggtttttaatgaggcttatgttttcgcttcatataatccattttgatgattcaaggcccaaacccactaaaataaagagacaatttcgtggcctttgacattgaagggttacttttgaattttaaactttgtttttaatttctgttgtgtcctaggcagccttggagcttgttccaagacttgtctcttcatcttctcttcttcttctctttatatactcttgtattctcttttgagaacttatttttcttttattcaaaaaccttttctaagaagatcatcttgctagtgtgtatatccagcaaaatccttagtctcttttggtgcgcatatccaaaggatctaagtctcgatatcttgaaacccttccgcaagcttctgtgatatccatcgattcattcaaatctatccatcatcacggctttacagccacctctatcctttgcttaacctaagagtgtcgagtccttgggaggatctcatcttgtggtgatatgtctataatttgcatggtttcaatgtccattcatcatcgttttgagtccagcttcgtatcattcatcactggtttatatcatttctcatcgctcttgcatctttgcatgattaggatagctttgcatacatattgcatttctgagttgttttcaggtgatttggagctgtttgcgaacaaattggaagaaacgagccagaacctgaagacatactcgaccaccaggtagtgtgcatccatcaccatactcgaccctctggttgagtgactttggagccattcttccaatctactcgaccaccaggtcgagtaacctcagctcaggccactcgatgacaccactcgaccccctggtcgagtatcacttcgccacaccacctgacaatactcgaccgttcactctaccacattactcgaccccctggtcgagtatcacttcgccacaccacctaaccacactcgaccattcactctaccaagatactcgaccccctggtcgagtatcatcactcaccaccatcaccatcactcgaccggacactcgatcacgtcttcacagtctactcaaatccgcactcaaccagacaagctgagcacaaggaagagaagaggagaagacaaagtgtttggaagcggcctggacctccatcggatcacgaagcccatctcagcccattatcactctatgggccgggcgattaggttattggcccgtctactatcattttatttcgttttgtataaatagatgtcttagggttctatccggagacatctagtcgacattgagtttttgcttcagttttatttttctgttttactctgctgcgccgcttttgcttctacaacctgtaattcgagatttttccaagtaattcagattccgcatttgatttcatctgtcatcttgtttcactactctttatctctttacttatgcaatattatcgtttacctgcgtttatgtcttgagcatgttgtttgagtagtgacttagaattcttagggatgggatagagtagttgtggaatccgccgtctgtagaatgggtaagctttagaacagtatgaattccttcaggactagttgcgttgactgctcatttctttctgatcaactagaattcgatccaagcattcccttacccagaaggtgtttgatggaatgcttgatccactagttcctgagatatgcgtctctatcccaagggattggtcgtttaaagcgtgtattgactttatctatctattcttattgcctgcatagttagattcggttaatgggaattagtctaggctagctttgcttgaggatttctatcacgtgagtgaattgatctgttgttgaacctgttgtctagggatagcttgattgctcttgttaaccatccggaaaggctaggatacaactccattcgattatcccatccttaggaatttcttctctatctaatttctctgttttatcgttatcgctttatcgttctcattgcctgtttcttattttttgtaatcactcgaccaacttactcgaccacacctagtgtctggcaacagactgtgcactcgagtaccgttgtctcatttcctgtgtgttactcaaccagcatactcgaccacacccagtgtctggcaacaaactgtgtagtcgagtataactgtttcatttcctgtctgttaatcgaccagttactcgaccacgttctgctttctggcatcagcctgttgtggtcgagtgattttagtaattctgttattgtttccgttttctacatgttcgcttaggactgttagaaacctcaaaactgttattgcttggcttgaattagtgacttctgatcacatctcatctgtttgcatcacactcatttggattgacaaccttaagtactacaacgatatgatagtgctataggattaattgatcccaaaaacctattattagagctactatcggacctcgtcgatgtcagaccccgtcccgggacgtctcggcgtccgacgaccatggactcacattcgagcctcttcccagtagaacctcttaatttttcgcgattcaacatagaattacctttacgaggcctaattctataatcgctttcttattacacagcggaagtctttctatacttggtttaataccaaccaacccttgtaccggtttcatcgtctttgtcccttatacttagatcgattctttactcggtcaagacatgcatattgttcgctaacccctctaagcctaacaatcgcatattcagttatcatattttcacggtcaattcccaaacgtctatcttaaataataagttagatcgtctacataccttggccaatatgcggattcgattcctcttcaattcgtccattaatcctttccttagccttcttgttccatattccttttgtaagacttgtatattgatggaccaatctctatcgttacttagccatacaacaaaccaaccccactggtctaagtccaactatagagattggggatcgtacgattcccttggttcacgatggccgaatcaagctcttggcttattggtccatccgtcctccaaacgtacgccccttgggtttcatggtggacgattgagccctcagcttatcgaaccatccagttttccgattcggtcgtttaacattacgactgcccacagtttactaaccatttacccgtccggtccatggtggtcggtaacacttttggcttatcgatccatccatacgatccgaacgatatccttatcacacacaagggtccgtggattcaaccattgaatcatcgtaggcttgcccatgaaatccttcgtccgtcggcctttggtttactcgcgggtcaaacatctgttttgtccatcggttctcaccatggaatttcccgttggttctctttcgagtcaccctttggtctttcaccaatctcggatcggtttcaccatcggccgtggcgcttgatacacaaaggcgacaccatattgatcatattgggtgaatcacgttctttacccatcttcggtgctttcatccttttatcggtaagattgcatccatgggcgacccttgggtgtgttcggatgcactaatccttgtgcttcctcgaacacttttcccgatccatcccacccgacgatcagtctatctaacccgttccgtctgacgatcggcctgtcccacccgatccgtccgatgatcggtttatccggtccaatccgtctgcccgatccgatccgtccgacgatcggtctggccgatccaatctgacgatcggtctaccagatccgattagtctctaaaacgaacggtctaccctctccatcctctacactccatcgaaccgttggaccgggaggtagcatgcgcatcagttcggtcgagttatactcgccgaggcgcaccccctttctgaccaacaacttcgggatgtgttgggactcttttaagaatgttttgtggtgtctggatgatgttgtgagatgccttgggcgtcctcccttatataggaggcgaatggatgcttcccgaagcatcacatccattccttgcacccttcctaaaggtcacatccgttccttgcatccttccgaaaggtcatatccgttccttgcatcctttggcgatgcaaccgttcattggtacccgctagactttacatcttttggccgagacaactcttcatccgtgagctaccatagtccaccagctcgagtgtcagctgaccggaccacccagctgggtcagtactcgatcagctcactgagctcagtcgagctgtcggtcagctcacctagctgagctagctagtctttcagctggtttagctcacttagcttagctagctagttcatccagcttgtccagctcacctagctagttcagcttgaactttctcgttctttcgactaagtatttttgtccgttcctcgaccatgatctagttttctcctaaaataaaccggcctctttctcgttacaagtctaccccccttaaactgaattcgtcctcgaattcggcgggtgtaagacctttgttattccctaacacgggacacgggcgttacaagtctaccccccttaaactgaattcgtcctagaattcagcgggtttaagatcttgtttactccttaacaatttcccatctttaatctctccgagacttcagatatcatatttgatcaaatctctattcccgagtttgatcaagtttcccgatccttgtgtcttacgacactcgatcaaatttttgatcctggtcctttcccaggctcgatcattattttccgatctttgtcctttcctggacttgatcaatgttttctgatctttgtcctttctcggacttgatcattatttttctgatctttgtctcttccgacattcgatcaaatttctgatcc

SEQ ID NO: 6411 - DNA, 2047 bp, Arabidopsis thaliana landsberg
gcaaaaacgtaaacgaaaagttaggttaagttacaaatggttagagataaacttcaagaggtgataatcaaataatcttaatagctaggaagaaatgttgtaaagtgttttggttgtcccaggagcaaaggaataattttggactaggatccagattaaatttttagtctctgtggtcctactaaatagaagtctttgagtttgcagttgattactcaaatggtttgggtaccaatatttgactccccatcataactcagacctaaacccctgtttgaatgtttttttttggttattgtccttggggaaccaaatttatagatttttctattttgttgcgcaatgatgatttacccttcacaaataataccaaaaactagttcctgatcactaacaatatttttgtttcctgaaaattgcattattagtcaatgacagacaaaaaattggagttgctgtttgtgtggcaaagaaaaaaagaacactgaaaaatataaatgataaattcagaaaatctattttttttttttgagaatgctattgctaggggtgaaagttggttaaaattgaagaggaggtagttcagataggtttcaatatactatttaaaagtaatgttttcatttaaatcaaatataaatgcaatagtaattgaggcagttgagaattatgagcgttacgtaagaatgataaatacgaatttaattccaccttcaataatttatttatttttgtcaaaaataaacaaagaaaatggtactacaatttacctttcttgttgagttatatcttcttcttttctttattattatcttctttatcattcactaaatgtcacctttctgttgcaaccttcatatttaagcaaaaatctcattcttcaaagcctcattttctgtttattaagagtcactatccattatatagttcgttttcttcccgggaaaaatctagaaatttcggtttatagtttacgtaaatgggaccaagaattaaaatcttactaatcgcgatttattggattttatatacgaattcatacaacttttgtggttgcaagatgatttgcgattgaccaacttgcactctcctaaaatttctttgtaattagataaccaaacattttttacataaaccatctctctgacaattactattaaactaatctgtttaaaacaaacattttgatggttgacacttattttgttggaaggaagagacaggggaatgtactttactggagctgtgaaaaccggttcttgattagagtggctacgtgctgcgcaacccatgccgagccagccaccgtgcagcagaatccgtgcgtgtgaccttccctctcgatagataaggaagtatgcggagcttgctttgaaatctggacaatggagagattctatgagagaccttccttctatcgttaggataatgcattttgattaagcgagaagaagggaaaccaagtaacctcttcaaagagttgcagtggaccccaatgatcatcaatgccaaataaaaatgcaagcttgctctggttttctctcatgaaatcccaatctggctctgctgcaagcttatatgccaaaaatgaaacagtggatcgtcacctagaatgctttagttggagatcaactatagggcaagcttggtcatgttgtagagctttcaagtaaacactttgcatactttgaattcaaaatgagactctaaactctatacaacacattgttgaaagaagagtacctctctaaactctgactttgccatgaagagaacattgcgcatggtgtgatactgcaagcatcagatgaagttaagtcgtctgaatagttagtagggaataagaacttaaagtatcaagaaaagaagatgtaatggccatcttcaagtctttatacaactaggttcaagtgtaaaacccaagaaaatcagtgaatatgagataatcaatacctgcctcaagtgagtgcaggtagcttgaacagcagtatcagaccatgaagctccaatggatttagatacaagcagccgtgcagctgacataggt

SEQ ID NO: 6412 - DNA, 891 bp, Arabidopsis thaliana landsberg
attgccctggaatttacaagaaatcatcttatagaccgagttgataaagctcgttcactatgaaaaaatatgagcattatcattagacctttggctactcacctgaccaatttgtttcataaaatctttgatcacaggacgagtcccaataccagttgaccaaacaatcattccataaggaatagttgagacctctcctgctttggtttttgcagaaatttccttatcattcactttgaccaccatagaacctaatttcacatcaataccatctctagtaaatttttcttcagcaaactctgtgattctcttgtcaaacctgtcaaaccataggacatgagctaatcttcgatatagatcaaaagtttaagagtaagaaaatctcacatggtcaagatgtggtctgcagcctctagaagagtgatctgcactaagtttttggctttaggatatagtttgactagatcctcgttaacaaaatcatgaagctcagaagcaaactcaacacctgttggtccaccaccaacaactacaaaatgtagcattctctttctctcttgttcgtttagtccaggtaaacttgccttctcaaatgaatcaatgacagtactacgaattctctgtgcatcttcaacctcctgcaagccaaccgccatatcttagagacatgtcaaaaaaaccataaatgtaactagtggagcaagaatgttgttactttgaggaaatgacagttctcctccacgccaggaatgttaaatgtgttagactgagctccagtagcgatcacaaggtagtcatagtcaacatcaaactctttcttccctttcgaattcacgccttgttttgatctgcagtaaactttcttgcttcctggatcaattttgaaacatt

SEQ ID NO: 6413 - DNA, 390 bp, Arabidopsis thaliana landsberg
agggcaattgacttgcgctagcaaccgatgaatggcttctcgtttaaggatgtgataatatatatgcacttggggagggtgcaacaatcaaccagagaaaagtcatggtaaccaaattcagaacctagataaaaatgagctcgcttgtgtatagggtttctctgtttcttatacttttggattgtgatggcttttgtacaggaagacatagctgctatattcaagaaagcagataaggaaaatttaggaacactgacaatgaaagaatttcatgaagtaatgagtgacatatgtgatagataccctcaagtggagctctacttgaagagtaaaggtatgcatggcattaccgatcttttaaaacaagcacaagctgagaatggttccaac

SEQ ID NO: 6414 - DNA, 3636 bp, Arabidopsis thaliana landsberg
gaccatccaaagccaaactcgcggcattttctccaacacctaacgggcctaaaggcgagtatgcacctatatgcaaccacacatctagaaaatcccaattgttcccaacatctaacctattcaatttctccacattaccagtaacaagaacagttactgctaattcttctccatagagtctttcactttccttgacaacaacagacttcagggcctcgctcatagagccattgactcgatcgtaaatactcgaaccaggaactggttgattcatccaaaaccgcggtgatgacccagaactgaacaaaagctcgggatttgacttcaaaagaatacgaatcgagctagaaagtctcttcatgtgtctctcccagaacaagaaactagtaccattgtttatcgttctcgtcgttgtataagcacctgtagatagatttctcaaaacttattaatcaaaaagtttcaaacttttgcagtctatttagttttgattgcatacccgtgtgcgattcaaggaaggtagtgaccggaggagcctccaaaacgacaccgttgtggtagagaaatctgcaattcgacatttttgcttctctcttccttgaggaaattagataaaacgggaaaagagaacgtttttaaaaaggaataatccccaaaacgacgccgtttaatagacataattagggtttaagcttccttttttttttttttttttggtgtatctccgggatttcaagttgtctcttttatttatttctccgatcatcttttctctgctgaagatagttgagagaagaacctcgaaagatgagatctttattggtttttagaaaaatcccttcacggattcgtcttcgtaacttgagaaacaataaacccttttgttcacagtctcagtttcccaaagaatctgagaatccaagtcagagcagagactactagtttacggatccacttgtgaagaaaacccagttacctccaaagtgagtattttgtctgcgaagcctgaacagaaggacgatgcatctgtaatcgatgttcttctcaatcgcaggaacaacccagaagctgctcttcgtttctataattgggctagaccatggcgtggaagttttgaagatggtgacgtcttctgggtactcattcatattctggtcagttctcctgagacctatggacgtgcaagtgatttgctcatacggtacgtttctacgagcaatccaactccaatggcaagtgttttggtcagtaaattggtggattcggcgaaatcatttgggtttgaagtcaattcacgagcttttaattacttattgaatgcttattctaaagataggcaaacggatcatgcggtggatatcgtcaaccagatgttggaactagatgtgattccattttttccatatgtgaataggaccttgagtgctttagttcaaaggaattcgttaactgaagctaaggaactctacagtaggatggttgccattggtgttgatggtgataatgtaacaacgcaattgttaatgagagctagtttgagagaagaaaagcctgcggaggctttggaggtttttagtagagctattgagagaggagcagaaccggatagtttactgtatagtcttgctgttcaggcttgttgcaagacgcttgatttggctatggctaatagtttattgagagagatgaaggagaagaagttgtgtgtcccgtcgcaggaaacttatacttctgtgattttggcttctgtgaagcaaggtaatatggatgatgcaattagattgaaggatgagatgttgagtgatgggatatcgatgaatgtagttgctgcgacgagtctgatcacgggacactgcaagaacaatgacttggttagtgctttggttttgtttgataagatggaaaaggaaggcccctctccgaacagcgttactttttcggttctgatagaatggtttcgtaagaacggggaaatggaaaaggcgcttgaattttacaagaaaatggaagtcttaggtcttactccttctgtctttcatgtccacacgataattcaagggtggttgaaaggtcagaaacatgaagaggcactgaaactctttgacgagtcttttgaaaccggtcttgcaaacgtgtttgtatgtaacactatattatcctggttatgcaagcaaggtaagacagaccaagatacagagttattaagcacgatggaaagtataggtattggaccgaatgtagtttcttacaacaacgtgatgcttggccactgcagacagaaaaacatggacttggctcgtattgttttttcaaatatactggaaaagggtctaaagccgataactacacgtatcccattctgattgatggatgtttcaggaatcatgatgaacaaaacgctttggaagtcgtcaatcatatgacttcttccaatattgaagtcaacggggttgtataccaaacaattatcaatggtttatgcaaagttggtcagacatccaaagcaagagaattgttggcaaatatgatcgaagaaaaacggttatgtgttagttgcatgagttacaatagcattatagatggatttttcaaagagggtgaaatggattctgcggttgcagcatacgaagagatgtgtggcaatggtatttctccaaacgtcataacttataccagcttgatgaatgggttatgcaaaaataacagaatggatcaagcattggaaatgagagacgaaatgaagaacaaaggtgtcaaactcgatattccagcctatggtgctcttatcgatgggttctgcaaaaggagtaacatggaaagcgcatctgctctgttctctgaactccttgaagaaggattgaatccaagccaacctatatataacagcttgatttctggatttcgtaatctgggaaacatggtagcagcccttgatttgtacaagaaaatgttgaaagacggtctacgatgtgatctgggtacatatacaacactgattgatggattgttgaaagatggaaatttgatcctggcctctgagttgtacacagaaatgcaggcggtgggtcttgtccctgatgaaatcatttacacagtaattgtaaacggtcttagcaagaaggggcagtttgtaaaagtggttaagatgtttgaggagatgaagaagaataatgtcactccgaatgtccttatctacaacgcggtgattgccggacattatagagaaggaaatctcgatgaggcttttagacttcacgatgagatgcttgacaagggtattttacccgatggtgctacatttgatattctagttagtgggcaagtcggaaacctccaacctgtacgtgcagcaagtttgtagtctgccaaaaccagaccacattattgactgatgacttagctttggcttttcgtgagaccccgataatatgactgcttaaggtgtgcacttttcattttgcacggttgtagtataaatgttgttattcatgaaagagggagactctatagactttctgtaaagaaactaagaagggccttctgtttttgtcaattttataaaacatagaacgaattcaaaccagaataattggactctgtattcttatactgagcttctttatttcccaactgaaa

SEQ ID NO: 6415 - DNA, 1004 bp, Arabidopsis thaliana landsberg
tttacacaggaagtcatctagcatgaactttaaaggcgttttaataacataaacaactcaccaggacgctgtagtgatcagtcatcattgcaataaggccagctacagaagcagttccctcgggcaaggataagtatgcctgggagaaaaaggcaaatcaaaatgaatcaaaggtaacataatgtccatctcaatactaagtttagaacgaaacctaggcaaataatatccggctcaatactaaaacaaaactgaacagtgagatattcttgtacttcatacccgattcatacaaaagagtgtttcgaccatctcaacagaccggttattccgtactgcagcagctacctaagcaatttccagagaagaacttaaaagtcatacaaagattgaggaaacacatacataaaaccatatagtgcaacaaagtttacctttttccagtctcccacatacttcctataagcatcatagaaacgcacaagctcccttttggtccactgaggtcccagcttatcagccaatttcttcttctacaatgagaaaaacaccaaagagcatcaagaagagtccaagtgaagatttggtcaataagacaaacaacaaagtgattatcccaaataagatttggtcaatgaagacaaacaaaactcactctttgcttggttttgcttgcgctcccaaaattgatatctggagacgcttcattggtgaaacgcttgttcacactcttcgacttcctagtaggcgccatataactgttttctctgcctagaaaaattccaacgaaagatcaaattaaggaaaccatgaaaactgatctgaccaagatacgacattaaattgctctctttcacaaaaatctcagattcaatttttcaccagaaaagaaatttataaactttactaacgaatctctgaaaaattcgaagcatcaatcataaagaaaacaaagatcacgaatcgagaatatcaacttgagaaatcaaaaaaaaaaaaaaccc

SEQ ID NO: 6416 - DNA, 2077 bp, Arabidopsis thaliana landsberg
atgcatgcaggtcgactctagaggatcccgtcttttgttgccttgtggtgcaagtaattttctttacggcaattatctctgtgggagcaagctggcctttgtagaaacttccagagtttctctctcccaaaagcttagagctgtcaaaacctcctgttgcgctggaaattgtttggtaggagaatttccttgcacctccgttgaagaatattttctctctacggaagaaccaaaatactaagaagctcaagatcaagattacaaatgttgctgatgcagcgacgattatgatcagcatcgtgttactcgacttcttcttggctgaaaccggaggacttggggatggagacaatgttggtggcgggtctggaagagaaggaagcttcgtgatatcaaagtctgattctttcccttcgatgttaaagctccaacctagaacaaaatgtgagctcgctacagtccctgtggccgcagagaatccaacgtgatgttcttgcgatacaatcccagaaagattcagttttctggagagaagaggtatacttggcttcggacgatctagaggagccaatgtgacattaagcattgtctcagtggcgttgtattcgatccagactcttactggtttcccactcgccagcctcaagcttatgttcttggcctctcggtcatcaaaatatgcagccggtgcagacgcaatggagatcactccatttaggtcgatgcctacgtggttatcgtcaatatcattcaactcaaccgcttgcacggtgtcaaattcaattgcaagaattcgattcaaggagtttccattgttggaggtgttgaagaggcccagataattgctgggaaaagcaccactgaagtccatcgagggtgaaatgacgaaagctaggccatggcctggtgcgccggttccttgagtgatggcgaagatgaagcttgtggaaaaagaaaccgaatttgttgagttagggtttgacaaggggatgggaaagccatgaaaagcttgacctatctgcctcatcgaagtgtttgtcaactccaagaggccacttgggtagaccttggaggagccgaagttgaggagattagccccgaggaagccatggttaagaaacttggtctctcgttgacttgagacacaagaaacaaaatatgataggaagattatcgttagagctatagatttgaaggtaatcatcgttgatgagtttttagagtttgaagttacttatctgttaattgctatccattttatagcttcaaaaactcttgaccattacatattcaaaccattttgttgtttatactaagaagttatacaacttaagttgagtatttgactttcaatgaattgctaaacaaacctttttcttattgtccttgaaaatttcattcggactttcctcaaatattcttctctaatataaaaaattggatgaacattccttgaaactgctaaacaatgaactttaaatgttaatattcatattaaaaactaaccaaaataaaggataaactatcaaaataataattcaaagtgaaaacgaagaaaaagaagacttgaccattcaattcatagttttgttcttataacttgcggagtttgattaaaaaatatatataattatatatactacaaaattaagagaagttttcatgcaaatcttctacaaatgtacacctttttgagaaaatctctcaattccatatgatgtacataaaagttccatagattacataaacgaaaaaatctcaactttcattaagaaatgtgtaatcagcactaagtcatatatattttcttaagtttttctttaacaatacaaactatttttttgtaaaacaacgaacaaatatcattcatatttgaatagagaatactttaaaatattaactttctgggaagtgtacaagcagattggttaacttttgattaaacgaatagttctcaatgccataattaattaggttcaattatacaaaagtggactggggggtcaattctatataggtaaagtatttacaaccaattcttgggttaaaaattaaaattaaaattaaaataaaatca

SEQ ID NO: 6417 - DNA, 1684 bp, Arabidopsis thaliana landsberg
ctcttatttccatttttaaaagttattctatgtattattcatatcatgcttatgcatcttgggtccaatcttgatttgtacaacggcgtttcgagatcatcgttagccatttcctcttttagacgacgtagtcatcatgagggagatgttctgtaccgttgagatactccaacactttcttcatcattggcctatcttctggagatcgtctcacgcagagaagtcctgttttcagaaccaatatcacttcttcagagactaaattctttttcttgattcttttgtcgcatctccttaagagatttccgctcttgacccctcgaagcacccagttcactaaactgatctctaccggttcctttgtcggctctatggctctccttccacaaacaatctccatcattaacactccaaattcaaacacatctgtggcacatgtagcctttcccgtgttgactagttctggtgcaacgtgtcccgtagtgctgtgtctgcttccatgtccatagtctcctagtcgagcgtttagctctccgtccaaaagaacgttacttgctttgacatttccgtgtatgagaggtttttgaacctcagcgtgaagatgttgaagtgctgacgcaataccctttataatacaaaaccggtgtacccacttgagaactggtaggtcgttgctgaacaagaaccggtctaggcttctattgataacatactcgtaaacaagatagatctcgtttcctttgctgcagtaaccatgtagatcaacaagatttctttgttttaccttggagattgcatcgatctcggctattaggactgtcttttcttgccttgtgttgcaagtaattctctttacggcaattatctctgtaggagcaagttgccctttataaaaactcccagagtttccctctcccaaaagcttagagttgtcaaaacctcccgtcgcgctggaaatcgtctggtgggagaatttccgtgcgcctccggtgaagttttccgttctacaaaaaaagcaaaccgttaagaagcttatgatcaagattgcaaatattgctgatgcagcaatgattatgatcagcatcgtgttactcgaatttttcatgactgaaaccggaggactcggagatggagacaatggaggtagcgggtctggaagagagggaagcttcgtgatatcaaagtctgatgctttcccctcgatgctgaagctccagcctagcacaaaatgtgagctcgtgacagttcccgtggctgcagagaatccaacataattttcttcagagatgatcccagaaagatttagttttctagagagaagaggcaactttggcttcggacgatctagaggagccaatgtgacattgagcatcgtctcagttgcgttgtattcgatccagactcttattggtttcccactcgccagcctcaaacttatgttctttgcctctcggtcatcaaaatattcagcggaggtagactcaatggagatcactccgttgaggtctataccaacatggttatcatcaatatcgttcaactcaacggcctgcacagtgtcgaattcaactgcaagaatgcaattcaaggagtttccattgttggaggtattgaataggcctagataattgcttggtaaggccccgctaaagtccagcgagggtgaaatgacaaaagctaagcc

SEQ ID NO: 6418 - DNA, 821 bp, Arabidopsis thaliana landsberg
taaaagttaacctgcaagcaaaagtacgaacgccattgtgtgccagatattcaccagaagttctgtcaatcaatggtggagaaacaagatagcggctaggaagcttaagctctccatcatattggagcattcctgcataacgtatatcagggacacgtacgcgatcaaacttgtcgaaatctttgtattcgagggcctttgcatgcatgaccattcgatcagcacggaaattgaatgtaacaactgcgtcaccatcaacaattggacccacagcctttccattatcatcaacaataacaaacgaaggcaaatactggtcattggcaccaggttctgccctcagtgtcttaactgcttcaagagcgcttttaaatttgtggggagcttccccaaggacttgtgcatcccaacctcgtttaacaacactccaatcattctgcaaggaaggaaagcaaaaattggattcatttctaaactagactagacaaggcatgacattcatacaagatctcacaagcattgcctacctcataacggtccattgtgacatacattcgacctccaccagatgcaacctgagcatcaacacctttcgcacgtaaagcagctaggtcagcttcaagagtttcaacaaatccgacactagaaccatccagaacatcacgaccatcagtaagaatatggacgcggattctcttagcaccacgttctgcaaaacccttaagcagcaactgcaccaaacagaaccaaattaaagaaaaatagcaaacgccaacgtttcaaaagaagatgtgtaacagatgagaattgagtacctggac

SEQ ID NO: 6419 - DNA, 628 bp, Arabidopsis thaliana landsberg
  unsure (1)..(628): unsure at all n locations
ttgattggaagcaaacctcagctactcagcagccttacctctcttgctgtgttcgacgtgttttccaacaatttatcaggaatcattccccaaggaaggcagtttaacacctttgaagaggagagctacttaggaaatcctctgctttgtggaccaccgaccagcagaagttgtgagactaataagagtccagaggaagcagataatggacaagaagaagaagacgataaagctgctattgatatgatggttttctattttagtactgcttcaatttatgtgaccgcattgataggcgttcttgtacttatgtgctttgattgtccttggcgtcgagcatggctccgcattgtggatnnnnnnnnnnnnnnnnnnnnnnnnnnnnnnncttagatctgttgagcttagttcttggatattccagagaaatttcgtttatgtatgggttgagtgaacttgcagcgtaatttacaatgcctttttacttatgaatagatgagtgtctttatcgcaagtctaagctaaaatatttacggattttttgtctttttattgaattttgttttatagaaaatttacggagtttttaaaaggtttagcgttctatacacgtctttgcactttgaac

SEQ ID NO: 6420 - DNA, 1723 bp, Arabidopsis thaliana landsberg
gatagtcttcacaaagtctccaagttccatccttggttttgaccaaaacaacaggtgaagcataaggactagaactagcttgcactgttccattagtaagtaaatcctcaaccagtttatcaatttcattcttctggtgtattgaatagcgatagggtcgctgattcaccggattagacccctccaacaatttaatcttatgattatgcttctcacgaaatggaggtaaagcagtcggttcaatgaatatatcaggatactcattgagtacttcttccactacagactcctcaccaagctcactggttaaagcattaatagtacaaagttccccttctgtactctccgaaacttcttgtacacataacatggccagctgaacttgatcttcctgtagtttttgcagtttctgcgccttcactttccctgacagaaccagatgtaagtccatgtaaaagtactttctgattattgaatttaaatcgcatttccagtttcttgaattcccaagagatacgacccaaagtctccaaccattgcacccctagtaccatatcaatcccttgtaagggaatcaataagatatcagactgaaaagttgtagtctgcaacttccaagagaaatcagtaactttaccctcaacacgcaatttcctgccatcagctacagatacacgagttaacccatctgtgtccaccttacacccaagtttagctgctgtatttggatccagaaagttgtgtgtcgaccctgagtctatcaggatgaagataatctttttgtcatatgttcccttaactctcatagtcttgtaaccagctattcctgaaaccgcattgacagaaatttgtggcatatgttcatcatcgtcatttaccaactcttctctagcatcttcaaactcttcatcaacatccattcgaaacagttgtgttttcttgtgaaccaaataatgttctggagtgtacttctcatcacaaaaatagcatagccctttagacctcctatcactcatttcttgttgagacattttcttaggttgctgactaaccggtttaaaatttcccttgttcccataatgatctgtcttagactcgccttccttctgatatttgttataaccgccagtaggtgcagaacgatttgtggaccaagtagtattagctggtttcttagggtgtgctttctcatatgtcttgcccaagaacaagcaatgtctcacagtttgaggctgaaacatccggacgtgcatttgagtgtctgtcctgagtcctgccaagtacacactcaccaaatattcttcagagagattaactcttgttttaatcagctcaaatttctaatgataatcaatgatgccatcagtttcctgcaaatgttttagctccgccatagggtcatcacaatcatcctcaaatcgttccttcaacaggttcacatatcccttccagtcatacaacacctcaagaccaacacccgactgaataaaggactgatgccaagtagaggcatggctatcaaagtggatcgctgcccttttaaccttcatatcttctggagttgaatccacaccaaaaaactcctcgactttaaacaaccactctttcaaccgtgtaccatcaaaccgaggaaaatcaattttcacctaaccgtgtaagattattataagcattaaaatggtctgatcgcacctgctgatgacgagcatcacgatatggatca

SEQ ID NO: 6421 - DNA, 1412 bp, Arabidopsis thaliana landsberg
  unsure (1)..(1412): unsure at all n locations
ttatgtatgatgtaatgaaagtatcgggcacatgtgtgaatagcagaaacaagatatatgacgaaaacgtagatgcatttttttctttgaaattatgtatgcactgtgtagtgtgttacgtgtagaaaaaaatgaaataatataataacttgtcttacccttgagtaacacgtgttcggttgtcgagaaacataaatatacgtagaatttaaagtgcactaatatatattcgaccatgaatatgttgttttattattatgtcgttgattaaaagaatgggatacagacataacaaatcacacataacatgggatgtctaatagaaagtaacgtgtttctgatccaacggctgagaaannnnnnnnnnnnnnnnnnnnnnnnnnnnntggccgtccagtgtgtcgaaccaacggatccatattatcgacatttaaacacgaagcggcaaaggaatgaaaaaacatgacataaaaatttcgacaagatcttcgaatggggccgacaagataaatcaatgctaaacaagcttgtctcaaacgccatcgtttatgttcccatgagaacatataaagtggcaacagaataaagttcaaacacattaacaccaatactttcaatcaaaaacatcaaagatggcgaatgagagtaataatcttggactcgaaatcaccgaactacggctaggtcttcccggagatatcgtcgtctccggtgagtccatctccgggaagaagagggcttctccggaagtagagattgatttgaaatgtgaaccggcgaaaaagagtcaagttgtgggttggccaccggtttgttcgtaccggagaaagaatagtctcgaacggaccaaaagttcgtacgtgaaagtgagtgtagatggagctgcatttttaaggaagattgatttggaaatgtacaaatgttaccaagatcttgcttccgctctgcaaattctgttcggatgctatatcaattttggttagtttatgtttctatatatagtatatatttttggttttagtctttactaatcaaggcaactaatgatccaaaacatcgatattaactttataatctttatatatgaaaatgaagatgatacgttgaaggaaagtgaatgtgtaccaatatatgaagacaaagatggagattggatgcttgctggagatgttccttgggagtaagtttctagcgacctctataacattcaaatttactttcttttatttaattgatatctaataaattatgaaactatttgtgtgcagaatgttccttggatcatgcaagaggttaaggattatgaagagatcatgtaacagagcatgaatgatatttatagtcacatgtaaataaaagtgagccttacagatatctaaatatacatttttgcagttactgaatgtttctct

SEQ ID NO: 6422 - DNA, 3906 bp, Arabidopsis thaliana landsberg
taccttaaaaaagatataaattaccaagcaaatataagttgtttggaagaaaaagtgtgattcttacattaaacagaaacttaaaggtaacataagttatattataacaaatgtaactactaataagtgagatgaaaagaaaaaaaattgtgtcttaacatttgatgataactgttggcaaaaagatcagattaacccactagaagataatcgactgatcttaatgcattcaccatttgcttgagttatggaaccttggtgtacactatcccagttcaatgagtaggctaactgcgatataatcatcccagttcaaaactggtgaagaaggcagaggtggttgaaagttggcatatatggttgaaagttggcatatacgataaaatattagaaaactttgtgacttattctcttgatcccactgattgaaactgttggagccttcaccatcatgccactttggaatgaccaacacatctgattcattatctaattcaactggatgagctaaatatgggcagtggctggcttggtgattcatgataagtgtgtattttgcatgtcttgagcatccatttgtcatcactttagcatcatatcatcactgttttataccatttcacatcatttgtcatcactttgcatgtttaggatagttttgcatgcatgttgcatatttgcgttgatttcaggtgatttggagctgttgacgagctatctggaagaagcagacctgatcatgacaaaccactcgacccagaggtcgagtaggagcttcaagatctcaagagaccactcgacaaccaggtcgagtagagcacatcaccacttcacctcaccactcgaccccgaggtcgagtgccatcatctccatcaccagacggtcactcgatcacttcactcgatcttgaggtcgagtgtcttcacctccatcatcagacaaccactcgacctcctcactctacctagaggtcgagtatctccatcacaccactcgactgcatactcgatgacaagcttcagagccttcttcattccgcactcaaccagacactcgagcacaaggaagaaaagaagactccagctattcactcgagttctcactcgaccacgttggtcgagtacagttcttaacccgtccaaatacttcgtcgttttgagtattagggtttcgggatatttggctataagtagcatgtacttctcattttcgcagggagttgtttttacctagtttttatttccgcagaccttgtgttctagactttttgtaatccggatttctctttatctattcagtattcaatattcagtttctgttcttgattttcgtttactgttattcattctgttatcatactgctgttatcatgtcttcaacctgttcaacgtttatgctttctgtcatgatgtctgagtagtgaataggtttctgaggatgggttagagtagtgtagaattctcagtatgctaggtgattgagtattgattgatagatcccttctggattagttgttcttaatgcctattgctttctgatcaactggaatttgagcccagacatttccgcgcccaaaaggtgttcgatgaaatgtctgaactactaattccagagattcgtgaccctataccaaggtattggttgcagggagcgttttggctttaacttgttgatttgtaatgcctgttaggttagctctcgtcaatggtgattgagtctgggactaggttaacttgagggtctctgttgcggtggcacttagatttggttaatgaacttgttgtctagggttaatttattgagcatgtcaatcacctgtaaactgagaaaacgaaactactcaattaccccatcctcgggaattctttatctgattgaattctttgtttactctactgttgtttactgcatcttgttatctgtcgcttaatttctgcaatttttgcctgttactcgacctcatactcgaccatctagttgtctggcaacaaactgtgcagtcgagtatccatgttacattttctgtctgtaactcgacttgtcactcgaccacacccactgcctggcaaagagctgtgttggtcgagtgttttactgtttctgcttaaatattttgttttctgcatgttcacttaggactgctagaaaggatacaacaattttaagactaataaccccaacctctcttaccgcagcacaaacgttgctgatccacaggatcaagtgtatcctccatagcaacaacaaggttagaacaaaccctttgttccctacaactaaggttttgttccaaagcagcaattccaggggaactaccagccgctaccaccacctgggtttgcaactcatcaaaaccaaggtcctgctgctcctgatactgaaatgaaacagatggtacaacagctgctatagggacaaacatctagctcaatggaaattgctaggaaattatctgaattgcaccataagctggactgcagctacaatgacctgaatgccaaagtggaggcattgaataccaaagtcagatacttggaaggccaatcagcattcagatgatgaatgtgatgctaatccatcaccagctgctgataggaggattgttcaagaaaaattagaagatcctggatcttttactctaccatgttctattggggaattagctttcagcgattgcgtgtgcgatctaggagcctctgtcagctaaatgttattctttgtggctactttctatggcaagaaggttgacacttgttcagtataggccttgtgacctaactctgatccttgcggataggtgttcaagaaaacccttcgcatgctgaaagatctaccagtcatgattaatggagtagaagttcctacagacttcgtggtgctggatatggaagtacagcataaggatcccttaatactgggaagacccttcttagcttcagtgggagcagtgatagatgtcagagaagggaaaataggtctcaaccttggaaagcacatcaagttgcagtttaacatcaacagaactccataagggtcaacagaagatggaagaacctctggaaatgatagagtgatctcaagagaagaatatgagactgaaagagtgaaggaatttaaaaagaggtctgataagcaagatgaaactatagaaaagctagcccacactgttgaggaacttagaagtaagctaaatcagttgcagaaagaagctcaacctaaaggcaggattgacaccatcccgagaaagaagttcacttgaagatggtctgaagagataaattaccctctagaagagaaagaagcatattttgaagagaagggaattgagtattctgctgcaaacttctccagggagaacgctgagtatgatgatgatatcagagaggactatgtagaccctctctatcattcattttcttcttgataagtgtaaggagtcaagctagagactttaaacaagctcaaatgggaggaagtcccatgattatccttgtaaataatttttactttcttgttatttttgatttgttttagttgtgtttgtggctctcaggatagagggataacgtgaagctagagtaaaaattcaaaacttttactctacatatagcctagagatcgagtacattggccaatatgagtgatgtttaagacccaaaaaattttaaatcatcattttactcgaccaacaaaagctacagagtcttacagggagtttatcaagtttacagaagattgcgggatttcctgaggtttttccactaaacagagagaacaaaagaaagtcaagaagacacagtgggacacacccctgacgcccatgtcctccatgcagcagaccaagagacatggaatctcttcacaccccatctcttcactcgatctccatgcaaccctatctttac

SEQ ID NO: 6423 - DNA, 633 bp, Arabidopsis thaliana landsberg
ctttaaagcgtagagaataggttgaagtcatgattggtgaatattgtgagagagaaggatacaaaggatctggatttgtaccaacgtacgaagataagagatggtgactggatgttgggtggtgatgttccatgggacatgttctcttcttcttgtaagagactccgaatcatgaagggatccgacgctcctgctctagactcttccttatgatccagagaagctgagaatcttttgtctaaaaaggagatgatgactatgatcgatgaatgaaaacccctttttggtttgattcggatcggagtttgactaaagttgaccgtgaaagacgaaacttcggggttttgtccgacgagagatccatctctagtgatgttctttttgtttttgtatttagatttgaagtttgatgtaaagatacatgagattttatgtataatacggacacatacataatctatagatgtagaatgtattaagtagttatgtcctataagatcatcagttttctgttcttgatcacgaacataatattttaaattttagaaacttatacacatttgtttagccaaggttattaattgacttttttgtttaaagtttaaccaagggtattattcagcaaaaaattac

SEQ ID NO: 6424 - DNA, 1016 bp, Arabidopsis thaliana landsberg
agatgaatccgcattcttcacgccacatgaataacacttgagctcctgtcctgtctctaatctgctcaggtaaagtctatatttctacaaaaccagaacaaaaaaaaagtgacgaaaagcttaatctaacacttgttctgaataatgatgatgacaaggtaaagtttttacctgaaggtggcttgcaacattttctctagtgagccatggaacattcatgagatccaatatcttcttgggaccagcttctgccaaacaagagaccggaaaaaatttcacggctctatgaagacatgataataaagggaggcaaggggacatgataagaaaccaaagtcgccaacgtacttactgtgatcgcatccgatttggttaacggcgttgacaaacttctgatgaagctcaaaagaccaaacaactctagctttcttggaagaagaagatgatggatcactctcatcttgaagaagcttcttctcaaagtcaaagtcttttctctttttcccaaaagaaacatcttcaccacctccaagaaaatgtgcttcatcgtatcgagtgatccaatccgctcctccttcgtatccacagccttcgatatctctcacttcttgaagcttctttctcagaacatgttgccatataatctttaactccttcattcttatcggcttcaagaggtaatcacaagctccgtgttgcactcccttcatcactcggcttgtttcgccgtccaccgacatcactacaacgcaaaacacacaaaaatcaataacctttttcatttattacacaacaagtcaagatctttcttctcacttattacagggaggtctaattcaagaccaacatgctcaagaagcttgaaaccatccatgtcaggcatgttcacatcgctgatcacgatatcatatccgtctttacgctccctcagcaacctcaaagccctctctagctaatccacaggtcgttactgcaacataggaaagtaaggagatattttagtaaatccaactgct

SEQ ID NO: 6425 - DNA, 1151 bp, Arabidopsis thaliana landsberg
acagaggtaaaattcaatcaaaatttcgttttaatattaatctaaaattttattaatttcaaaggtttcatgttgaattatgatccaatttgtgaaaatttattgtaatttttgtggttaactatggattttaattacggtggttgactctgccaaaaatagtaaacagagcttatggaattgactagaagttttcattgactgttgaatgaatcactgttagattcagatatatatatacatcgcttagttctctgttctgttctaatattgtgatctgcttaaagattctccttttgaggtttattttcaatagatcttttagttctcaagaaaagtgtgattcaaatttcttaaattttgttcaaaggttttaagagttagtttgagattctggtatttattttgatccagttctgttttcgattattttcaaaattttgttttttgatgctttttgactctgattctgttattacagtaactaaatgtaacagagcagagatcgcattgtctctgcttcggaagaacaagaatggttttgatattgtcatcagtgatgttcatatgcctgacatggatggtttcaagctccttgaacacgttggtttagagatggatttacctgttatcagtacgtatcttaatcgctaaaaacttattattaactctaattcgttttcttgagatctgaatgttttgaaacctttggttatagtgatgtctgcggatgattcgaagagcgttgtgttgaaaggagtgactcacggtgcagttgattacctcatcaaaccggtacgtattgaggctttgaagaatatatggcaacatgtggtgcggaagaagcgtaacgagtggaatgtttctgaacattctggaggaagtattgaagatactggcggtgacagggacaggcagcagcagcatagggaggatgctgataacaactcgtcttcagttaatgaagggaacgggaggagctcgaggaagcggaaggaagaggaagtagatgatcaaggggatgataaggaagactcatcgagtttaaagaaaccacgcgtggtttggtctgttgaattgcatcagcagtttgttgctgctgtgaatcaactaggcgttgacagtaagttaaaaacttgcttgcttatgca

SEQ ID NO: 6426 - DNA, 723 bp, Arabidopsis thaliana landsberg
gttttacatattcttcctctgaattggtattaccatatccttatttagacactattttgaaaaaatcaacaaagaaaagctcttttcattccactataaattctctatctcctctgtttcgtcgaacaatacagaacaaaatggcaagaatcatactcactgctcctctgttttacttcttcttttccttgttatctcaccaaaccatgtcccaacctcaacacatgcacactttctgcagcgtcgacagcttcacacaaaccagctcctacgaaacaaaccgcaacatcctactcaccactctcagcttgacttcctcgctcgtacactatttaaacgccacaatcggtctcagccccgacacagtctatggcatgttcctctgtagaggagacatcaacacaacatcttgctcagactgtgttcaaaccgcagcaatcgagatcgctacaaactgtactcttaacaaaagagctttcatatactacgacgagtgtatggttcgatactcaaatgtttccttcttctctgaatttgaaagtaaaccagtcatcgttcgttactctcttcgttctgctcaaactcaaaccggcttagcagacactatccaataaattagaccatctgattcctaacgtctctcgtcaactttgataccgtattttgtggaggataagaacgtgtgctcagttagagggtcatatgattagtgcaatgatcagt

SEQ ID NO: 6427 - DNA, 942 bp, Arabidopsis thaliana landsberg
taacacttggaggagcagttcacggaagaggaaagacgaggaaggagaagagcaaggagatgataaggacgaagatgcgtcgaatttgaagaaaccgcgtgtcgtctggtctgttgaattgcatcagcagtttgttgctgctgttaatcagctcggcgttgagagtaagactaaaacttcttacatttgcatttgtgattgttatgctcagggtctaaatgatcttctatggcgcagaggcggttcctaaaaagatcttagagctgatgaatgttcctggtctaacccgagaaaacgtagcaagtcacctccaggtataaatcttatactggataccaaaatgagccattgaaatgcttagatgttcttagcggctttatgtggacttgcagaaataccggatatatctaagacggcttggaggggtatcgcagcaccaaggcaatcttaacaactcgtttatgacgggtcaggatgcgagcttcggacctctttcgacattgaatgggtttgatcttcaagcactagccgtcacaggtcagttacctgcacagagtcttgcacagcttcaagccgctggtttaggccggcctgcgatggtctctaagtcaggtttgccggtttcctccattgtggatgagagaagcatcttcagctttgacaacacgaaaacaagatttggagaagggcttgggcatcacgggcaacaaccccaacagcaaccacagatgaacttacttcacggtgtccccacgggtttacaacaacagcttcctatgggtaatcgaatgagtatttaacaacagattgctgcttgtcgagctgaaaataatgttcaaaacaacgaaatgctgatgcctctagcgggtcagcagtctttgcctcggggaccaccgcctatgctaacctcttcgcaatcatccatcaggcagccgatgttat

SEQ ID NO: 6428 - DNA, 2491 bp, Arabidopsis thaliana landsberg
gttgcattaaatcgtgaaggacagacttccgaagttcaccgaggaagaagtgaaaatggtgaaaggttccattttcttcgtggggataaaccaatacacaacttatttgatgtctgatcctaaaatatctaccacacctaaagatttgggttatcaacaagattggaacgtcacttttaactgtaagtttttgttcatatgtacatttatccgttatgacttatgaatgaacttgatcttgcttagattatagaacatataactagctaagttagggtctgaatgtttcaaaagcaaatatgtcagtatgagaaaaattactctagacttggaccaaaagtaaggctggttcgtccttatgggattggactgtggcaatatcagtgtgcagcatactaactaatactgagaaatcttaatatgtgcagttgcaaagaatgggacaccaattggtccaagggtgagataaatatatgttttcttttgatttttgctaactctctttgattacttgggtgtttgattatgaattaatctaatgttatgtaggcacattcagaatggttatacaatgtcccatggggaatgtacaaagctttaatgtacattaaggaacgttatggcaacccaactatgattctctccgaaaacggtattcaatatatatttttgttccacatccaagatctctagagatgttaagtgtataatctttataggtatggatgatccgggcaacataactctaactcaaggactaaatgatacaacaagagtcaagtattatagagactatttagtgcagcttaaaaaagcagtagacgatggagccaatctaactggatattttgcgtggtcgttgctagataatttcgaatggttatcaggatatacttcaaggtgcggaattaactaatgaatacctattgggtatatgattatttctgagaaaatgtatattatatggtactcttctaatgatttttttctgcctaggtttggaatagtgtacgttgattacaaggacttgaagagataccccaagatgtctgctttatggtttaaacaacttttgaaacgggaccagaaatgatgtggtcaatgtgtctatgatttgggttgttaacgagaggtgaatgaatatgtcatatgtgtataacttaagaacttgtcttcctttgacatttcaacgcttacataaaacagcagcaagaaatttggttcttctatcatagaacttctacattcaacaatgtatgctatcatcctcatcctcaatttttttttatttctattcactttaccgtggctcagtttctatttatcaagtcattcaaaattagaaaaatattggatttaaaatggatgtgtaagttcttccaaatcacttgtatcaaaaagatagatgttgatgttatgtgacagggcaactaattattgcaagtgaatggcaaaaaaggaatcttgatcaatggatattttgagatgctaaaatgcttgttagactcgacgactcaataatggatgtaatcattcctcttccactgaaaaatctcataacacgattcacatcacatatctttatagacaaaaaatctttagtttccgtaccgtttatcacatcaatggatattttaagcctaatgcatgcacgttctttgaaatgtgtggacttaaattgatttctttagtttctcttttgttgtcattcactactcactactcactagccgtttgtgctttcaagagttgaatgaagaagaactaaggaaaaatacgttttcacgtgaagatttgggagacaagtctaaggaagtggggcattcatggtccacgaggactgaacttaatggatcatgatttgaccagtttgcccttgtcggcttctgtgtgttcacgttttttcctttggcgctttacgattcgcgtgatgactttttctcaaaatgtgggccggacacgataattctgttccggccattacacataaatatagttgtttttatcttatgagaaaagttataaaaaagaatcatattccgatttgggtaaatgtttttaagcaacattgtgactgattttcagatataatttggactctggacacagctacgtaaaaacttactgtgtttagaagatatgttttatggaataaatccatgcaatatttggcagtcaatcccgatatcataagagtatggatcagcttctacagattctctgagaattttatcatttggtaacaaatcaaattgttgcaattcggatttttacctctatataagatgatgtccttttgtgtcatctccctatgcataagcatcaatatactttctacttacgaagtcgttacaaatgttaaatgttagtaaaaaatcaattaaataaactcattatattataataaaaaaacaaagacaattactttttcacattctttttaccaaaattctttacatagtttagaaaattatatgaattataggtttaa

SEQ ID NO: 6429 - DNA, 555 bp, Arabidopsis thaliana landsberg
ttaagttataaggtgtgggatatcatagaggaaccatcggacatacaacgttaatgttatcgttatggctatagccttgttgtttcaatcaattcctgaatcacttaccttacaatcgaagcacttgggagcggagagagtcaaagaggcaagattgcaaacgttgatggctgagtttgacagaataaagatgaaggataatgagacaatcgatgagttcccagggaggttatcagagatatcatcaaaatcagcttcacttggagaaaccattgaagaacctaagcttgtcaagaaatttcttaagagtcttcctaggaagaaatacatacacatcgtggctgcacttaaacaagtactagatcttaagaaaacaagttttgaagatattacgggaagactcaaggtttatgaggaacgcattactgatgaagaagaagttcaagatgaccaaggaaagttgaagtatgcgaactcggattctcatacgagtcatgaacaaggaagtgaatatagaggaagaggacgtggtggatgatcttatggcagaagaag

SEQ ID NO: 6430 - DNA, 792 bp, Arabidopsis thaliana landsberg
aaagatcaagagacttccatatcggatggtaaatgtcaaaactttttaatctaaataaaaaatttatattttaccatcaaatcttggtgagcttatagaatatgttttgttttctggtcatgtttgaaggtttattcacccattggtatatggagagtatccaaagacaatgcagaacattgtgaaagagaggcttccaaaattcacggagaaagaagtgaaaatggtgaaaggttccatagattttgtgggaataaaccaatacacgacttattacatgtccgaaccacatcccaccaccaaacctaaggatttgggttatcaacaagattggaatgtggaatttggctgtaagttattggaagattcataacgatatgtagattttggattttgtttacagtctttagattttgatcgtgacaattattaacttgcagttgctaagttggggaagccaataggtccaagggtgagatatacacttgattatatgttttttttttttccctaagcaatatatatacaagtgtctaagttattaaataaaccacttatcttataggcttactcgtcttggttatacaacgtaccatggggaatgtacaaggccttgatgtatatgaaggaacgttacggcaaccctactatgatcctctctgaaaacggtattaaagaaacaaattacaatcttcaatcaagtttccctttgatctgtcatatttctataagattattatacattttaaagctttttataaatgtttgaacatttttttatagggttttgga

SEQ ID NO: 6431 - DNA, 1065 bp, Arabidopsis thaliana landsberg
ggtgtgacacttaactccggtttctcttggtgactgtcgacaggcaaaatataaaaaaaagaaaatgatcttgatgaaagttttcgaaggtagctatagagtggagccactatatgtagattcagaacgcttgtgcaataacatggagccgaagagtccggcagaatacaaaagatgtagcggtggacaaggaaggattgcatcaaaggtgacaatgaaccaatactttaagccatatcctccttttaatctgccgccactatcttggtacattcgaaaggtcaccatcaagaacaccaaaactgcgctgaaaacacttcaaacttggggtataacccttcgaaatcctggtgcagtgacttcaacagacaaatatggaaacgtaacaatatcaccaagaaaaaaaagaaaaacaacaaacattgaaaacactaggctaaatgaatatacatagatatagtagcatgttgtaaatttaatatattcttcaacatataaatttcctaatttcatatttacaaattatgttctattccctcatttcattttatacacttgctctttattagacttaatctattctatcacgtcatgcgcgccatgcatggtgacatgaattgtgtggctgtgtgcagatccacctaaacattttacacaaattttttgacttgtacattaaatagtacttctagttataggcctctatctttttcataatgaacactgttcataatctgctaattggcccattaattacatatcttaagtccatgatacttggatatcaagtcttcgggcaccttttccaattaaagaaaacaataataaaattgttgtattcgtatttgttgtttattcaacaccgacaaaaaaaagttctagttcaacaaagacattagcagattttgactttgcgcatttactttttcataaaaataaactaaaactatacggataatataaactagagaagcttggaagtgggaaaaaataaataaaagatcaattcttggatatgaattgcaaaccagagtcgatatttgattttgtggtagaggagacaca

SEQ ID NO: 6432 - DNA, 670 bp, Arabidopsis thaliana landsberg
gatgaaaaaatactatgacgaagatgagtgggagaggcaagataaactttggacagctgcagagaagaagcatccatggaaagatgcccctcctaaggttaaggtagtaataacaaaatcagctaacaaaatctcaagaacattttaaggaatttgtagaattcaaaataagattgacaaaacaccttttttttgtttgattgaaggtgacaacaaaaaagggtatatgccatatgcacatagaattgacattggggttgcctcctgatggagtcttcgaacttttcactaatccacataacggaccaaacaccgaaccacttctggttttatttcttatcattgaatgattcaaatgtggtattaattgtagcaatacttgaaagtgtactctttttgttaattatgaagaaaagcaaatcaagaaaggttttgaaggacgatggaccgaggcagatcgcgaaggtgaagaaagctgtggcctggaacttcagtgggaggtctattgctatccccataagtctaattgtcgatgaaaacagaagagatcttacagtaagaagcttctctataacccctaacaataatcaagatcttttgttttgtataggcaaaatttaacttccgtttttcttgcttattgtggacaggcgaaatattaaaaagagaa

SEQ ID NO: 6433 - DNA, 890 bp, Arabidopsis thaliana landsberg
  unsure (1)..(890): unsure at all n locations
tttatattttgcctgtcgacagtcttaagttattaccggagttaagtgtcacaccggtacagatcaattttttttgattattgtgagcgggcctagagaaacttcttactgtaagatcttttctgttttcatcgacnnnnnnnnnnnnnnnnnnnnnnnnnnacgacccaaggaatttccagtccacggttttcttcaccttcgcgatctgcctcggtccatcctccattaaaacctttcttgatttgctttccttcataaaaaaaaatagagtacactctcaagtcttgctacaattaataccacatctgaataatacaatgaatgataagaaaaaagaggtggggagagaaaaaatggtccgttggatggattagtaaaaaatccgaagactttatctggagaaaatcccaatgtcaattctatgttcatatgacaaagaccattttttgttgtcacctacaaacatcaaaaatatattaaaaaaatagtaagatatttattcttattcctttaaaggcaaacaaatctaagtagtgcgattatatatgtttgatgatttgttatcattaccttcacctttggaggggcatcattccatggatgcatcttctctgcatctatccaaacttgatcttgtttcttcctctcatcttcgtcataatatttcttcatcttatcatggttattattattatccaccatttctgactctgacttagattcaacattttcagtttttttgggcttggcctacaacaacacacataatcataatctagtttctacattaatggattttttctgatttatggaaatgaaactgacctttcgaggctgtttattgttttgactgacccaccaccatatccaggaataccatttttatt

SEQ ID NO: 6434 - DNA, 642 bp, Arabidopsis thaliana landsberg
cttttgaggagaactcccaccatcccattccagggtaaaggaagagtgggtcgtcttctaataaacggtgggatcaaaaactccagttgtcgagccgggtaatactaaatggaccttcttcaaatcctccgtttttcaaaatgttctctgccaaatcaaacataaaagaaaatcatcattattcacatgttcaaggattataaaaacagagcaagaaacagagtatttatagtaatgacttactattagttggtctaggagggtaaagagatctcatagcaacaccatcaataagtggaccacaagctggatcttcctcaacaccaggattatgaatcacaacttcagcaacatcactctcagcttgaaacgcccaagcatataaatcccaaccactactactataaaccgtctgaatcggaatcacaccggagtcaggtgctacagatatgttaagtctctcgtcttgtgcacaagttctagcagcactaaaagtgagtgagtaatacattcctttaaccactttaagtctttgtttgatcgatgcttcgttcccaagtcttacagcgaatttaccggcgggaacaacaagaagcatgtctccttgtttatgtcctgatttaatgtattcgacgaatcctg

SEQ ID NO: 6435 - DNA, 1416 bp, Arabidopsis thaliana landsberg
agagtacatggcctacacaatttgaaaaattaggtactaaggaagcccatatagctctattcttctttgcaaaggacactgagaggtaggtttcctacatgattatttacttgcttttacttcatgttggtggtcttaatgtttaactcttaaatattgtgaaacagttatgagagaaattataagcctctggtagataacatgatcaagaacgatttagccctgaaaggaaatctcgataacgttgaccttttgatttttgcatccaaccagcttccttcgaattgccagcgtaagaatgcttaccaaaactcttacacttcgtagttcgtacctgtgcctatgatcattttgttgatggtttctagatcgtaatgccaaaactcttacactttgtacacatgattatcttgtcgctgactcctgtttgataagtctttagaaagtagcaccgatgattcaaaagtatactcagaacttaatgccagtttagtctatatgaaatctactgcttacatatattacccttgcaggctggaacatgttatatttcctttggggtgtcttccaaggaagaaaagagactaacccacaaaagaacacatctttgcctacttcaaatgttttgccgcgtgacagagaccccaaggagctgtgtcaaacgagttctccttccaagcatttggagaaagggtcttctctacgtgagagctccagcaacggaattgaaacacggaatgggacagatgcacgtagtcatgagaatccaaataacagggaatcctctattgagcgatcaccgagcaaaaaggtgggtttgttttgtagtccctgtgtaaatcctttgtctctgaacttgttgtaggacattttcatctcttaatataaggagtccctttcgtctcactcttaagttccttaatacaggaggatattgctcttaaagtggaagaagcaggtgtgaatcacatcccccctcaagttactggatcaaattctggagatagtctagtgaggaaggttcagaaagtcgaggaacaagaattaggtggtaggaaggatctgccattgacggtcatgggctcagggatccagtcccatgggcaagataatcctctagagaaagatctcaacagtagtcaggctagtcacaggaagcgtccactttgggaactgagtaaccccgctaacgagaattcatctgccataaaccagaaagtggagctcaataatgacggtttatgcgaaggatctccgaataagaagctgaagacagaaaacggaagcagcagcctctgccgggatacatctggtcacgattccgggataatgaaaaagagtccaaaagtcgtgttcccattggacttgaatgacgacagtgaaatggtggataatgctcagcccactagcgtagag

SEQ ID NO: 6436 - DNA, 2901 bp, Arabidopsis thaliana landsberg
  unsure (1)..(2901): unsure at all n locations
cgagcaggcggtgttattccctggtcataccctccaagggcaaacacattgacctcgtttatagtagtccaatgtgacactctatctccaaactccttgaagcaagtatctgcataagctgtaaagtctctcctataacaataatcattacaaaaagattgatgaataagtttgatatcaccaatcaaaaagaaggtgaaaggagaagaatcatacncgatttcttggctgagccaacctccatactcatcttctaaggcctgtgggagatcaaagtggtgcaatgtaacatgtggctggattcctggtgagtcgaagaagtaggaaacaccatgagaatattaggtttgtttggtcttgtagctaattaactaacagggtcagggtacaagtttaaccatgagtgatcaattcatcaataagattgttgtagtattgtagccccttgggattgattggtcctcttccacctgaaataaaatcatattcttcatcaatccattgataatgtttcgcttcgattggtttatcaatcgagtcgtggaaaaatcatacttggtaaaagccttgaccaggatatagagaatctgtaagcctccaatcccatgtctgccatgagcttcacatcttcctgcaaacgtttccatctgtcacatggagacagagacatatattatatactagatgggaagaaaagggaccttgtatttgtgatactggtcacatgcaacatttccagctgctactccggagtgtcctgaaatgaaactatatatgtaaacctcttgccaaaattctcgagctattcagagaaacatcaagagaagaagaaaccaaaccggcatgagcaaaaacatcccaaatgctaggagttctcccatcttcgtcagcagctccttccacctgttggaatttatagacaaaacactggtttatctgatagtttctgatcttttatcattctaacatgaaggtgaatatatatgtaatgttacatctcaggaaaaatactcaaaaaagggttgaagaacctgataagctgatgtgccagagccaaagacaaagcctggagggaagtcatttctgctgtatttaagcgacgaaactgcggttaaagccaaagccagcagaggaaggaacattagactattgctcaataacttcatctctctggtcttgtcaccgtacagagcaaaaaaactttagcaagcaagaacaaatacgaacggtgaaccccttgtgatagattatttaagtactttaacaagcaagtacaaatttggttgaaacacggaactgcattcgtctgcttctaggagtgggtccacttgttttgacaagtttgatgaagaagtaaagagcaaatcgtccaacgatatagaaaatagggagcagcattagctttcaaaaggctttttgtttgtttccttagctttagtatttttttgtttggacccacatgttaacatattgagtgatcaatcaccatagtaccacactctctaagtaaagacactttcattatctctcaatgagcagcgaatacttttcaaagagattgttgattgccttttgttgcatgttctatatcatccaataaaatcaagttttgtcttcaggcttatatagctctctaagctaaagaggacagagaatccaaatcaggcactactataccaaggatatagaactataaagatggaatcgaacatgatatgattgcaaaagagcatgagaaattagggaaacgaacaaaggactgagttcaccacaaaaaccaagttcaaagcagacgtctccagacaagattcaccggttactggaatcgtacagttcaggctatacagtcagattccggatcaggtctaaacacgacgttgtttaagtgagagctttagttaattaagaaaggatgaatcagaaggagggaaaagaaacgatatcttcaaaaaaaaacatcattctcaaaagtaaagggatccagaagacgaagaatggcaagaatattacaaaatgatagtgcaaatcaaacttgtcgcatcttctacagtcaataagcgttcagatataatccacttcaagaaagtagaatttgttttgagtagcaagaagatgcttctctcttctcttttcacctggatatctcccattttacctgcaaacaagagctcagattcagatttacgcattatcaaacaaaatcagattgcaatgtttcatttctaagaaagattatgtacctcgatggactcctagtgtggataggactcttggctggacttggcttgctagggctcttgcttccttccttctgaacctgtgatacagaaaagctattaagataacgaacaatgtaaaacagaagattatgtcaaaataaaagaggggtcacaagttggatcttgttactcacagaaggtagaggagatcttgatcttgaacgcgatctgcaaaagtccaagaaaagaaactcagattcaaaaatccaaacatgttgtgttttatactgttcagcaaggtcctggagcctctccttctatctcacagagattaagaagttgctgcaaataaaaaaaaagaaccataaaccaaactattcttctacttagttaaaacataggtgataggacagaggttttataagccatgtggccaaaaaaacttgtgttgccaaatgagccacggacgtcccaagagaacccagattccatattgtcaatccatcgagccaatatagttttacagaaatcccgatataatattgtgatccaagtgatccaatgtctccgctgttatccatctagcagcaatgtaaattagtggatactatatcagaaagccacgaaaagcaaagtctctattccagagtttcccatacctgttagggcggagcctcttgtc

SEQ ID NO: 6437 - DNA, 2811 bp, Arabidopsis thaliana landsberg
atactttttctgatgcagcacaaaggaattagagaagcatgatgagacatacgaacatgttaggtaagctactgagaatctaaagaacatcgaaaagattatgtatacaatggcaccaccgctagagtttctgtggctcaaatgtttcatgtacatagcatatgatcatcaatgcatagattataacagaacttaagtgggtgttagagcttatgttccatagacctgatgaacttatacaagaagaatagaaaaactaggcatgaaaaaatctccattgaaaatcccgctaaaatcaattgttctgtctagtatgtgatagtgcatgcagaaaggtctgaaatttgtgagcctattttactatcctgataaccatatgcattattgagcaaaaatccacttctacatgaatgataatgaaatatttactaaactgagctattgataccaacaaaatcttacacaggttaggtaataagacaaatcaccatgacattccaaagaggtaataagacaaatcctaagcagctagatcaggaaaagtcatgaaatgcaagtttgtggcagtttgaaaaataaatgtcatgaagctaatgggcatagtagagtagcacaaacctctaagctgagtaacattagatttgtcctcaaagcttttcaaacgctggaggatctcatcaactagtttgtgtttaacattaggagatagttcagtactagattctgcagtggaaacctcatgcttgagcttcttcacctaacaaggaaatcaaacattgtgagaagagccaatgtgcatcttcgagttccattttaaaaagccactaaccaattgaagaatcagagtaggttccttcgatcttcgaatccgaatagattcctccattttcctaatctcatcagctgtgtacttaacaactgaataacaaaaaaccaacagagctgcttcagatacgaattatcatgaatcagagagcaaaaatgaaaaggaaaataaaaagtaggaaccattatcgttattggaatagatgtggagagaagaagcatagagaaagcgaagaacaaagagagcaatgagaatgttgaaaaagcaaacaagtagagtgattcttttgaaagagagaactccggttccggcgatccctccggtccattctcctcctcccctcgccatctccctccgccgtcatcccaccatttctcaagatctcgcttccgattataattacacttttgctttaaatcgaacacttgaaagagagattcgatttcttttttttttgcttcttcttccggcggaaaaaggaaatcgtgggagatagagaaagagagcttttaattattactctattaatttatttttcactcgacagagacagagatatataccaatctcatcaatgcgtgtggataaaaacgtcgtatgtatttctttggcagcgtctatactagataggaagttttgtagtattatttcttgcaatcgttatgtaaatactacatctttaaatgtggtgataatcctatgattcatgtcattgccatttttcaattcaatatatgaaaaaaatggaaattaaatttttgaaaaactaccttttacctagctccttgtcaacatacgaattctaattgagactctcttcttgtagcttttcttttctttgcttataatcagaaaacacaacacacccgatcattccccaaccccggtttaaccaaaactccgtgtcggtcatatctatctgcgtgatcttccttgaaagtcgagagatctgctgattagggtttggattcgatctttgaaaaagttggcgagtggattttgaatcatggaagtagatgatggttacgtggagtatgttccagtagaggagcgtctagcgcagatgaagcgaaaggtggtggaagaacctggcaaggtaaagctcactgaagaagctaaacctagcttacttgttcaagcaactcagctcaagcgacatgtaccttaagtcagtgctaccgaggccattattttacaagagaaggggatgatggagcatttatctgacaagaagaagcttatgtctgttggtgaattagccagaggtatcacttatacagagcctctctcaacatggtggaaaccccctctgcacgttaggaagatgtcaaccaaacagatggatttgattaggaagcaatggcatattacagttaacggtgaagatattcctcctccaatcaaaaacttcatggatatgaaatttccgagtccacttctccgtatgctcaaggataaaggaataatgcaccctactcctatccaagttcagggtcttcctgttgttttgtctggcagagatatgattgggattgcgttcactggttccggaaagacgttggttttcgtgcttcctatgatcatattagctctgcaggaggagataatgatgcctatagctgctggagaaggtcccattgcgcttgttatttgtccgtctagagagcttgctaagcagacttacgatgtggttgaacagtttgtggcatctttagtcgaggatggatacccgcggttgaggtcgttgctatgcattggaggagtggatatgagatcacagttggacgttgttaagaaaggtgttcacatcgttgttgctactcctggaaggttgaaggatatcctcgccaagaaaaagatgagcttagatgcttgcaggctgttgacacttgatgaagcagataggttgggtgatttgggtttccaagatgacataagacatgtctttgtccactttaagtttcaacgttaaacacttttgtttt

SEQ ID NO: 6438 - DNA, 616 bp, Arabidopsis thaliana landsberg
caaatcatcttacaagagaaagagatgatggagcatttatctgataagaagacgcttatgtctgttcgtgaacttgccaaaggtatcacttatacagagcctctcttaactgggtggaaacctcctttgcatattaggaagatgtctagtaagcagagagatttgattaggaagcaatggcatattattgttaatggtgatgatattcctcctcctattaagaactttaaggatatgaagtttcctagacctgttctcgatactctcaaggagaaaggtattgtgcagcctactcctattcaagttcagggtcttcctgtgattttggctgggagagatatgattgggattgctttcactggttccggaaagactttggttttcgtgcttcccatgatcatgattgctctccaagaagagatgatgatgcctattgctgctggtgaaggtcccattgggcttattgtttgcccttctagagagcttgctaggcagacttatgaagtggttgagcagtttgtggctcctttggttgaagctgggtacccgccattgaggtcgttgctatgtattggaggtattgatatgagatcccagttggaggttggcaagagag

SEQ ID NO: 6439 - DNA, 2002 bp, Arabidopsis thaliana landsberg
atttagtatttactatcatcatcctctaggcatatccaacttttctcttcaggactctttggcaaaaaaactgtcagcaagagcactccggggcagccctgctcatccccccgggcgctagatccccgcccccatcgtatctttccaacaaaagagccgaaacagagtacgatttccccatgtccaatgaacaaagaccatactggaaacagcctgcctctgaacgcgtccccaactcccaccctaggcctcccgtgtatggatacggcacggtactcatctatcccctgtttcattccccaaaaccaattgagtttatttgaaacaaacgtagtatacgtatctaatactgtgtttgccttctcctcaattgcagtccgaccatcgtcgagaccacggtagagaaagaatggaggccatgagttatgagccagagaccaacgctccttccagcccatatcatccagctggaaaccgcacggtactttctgcttcttctgattcgagtcttctactgtctccaccgtttgtttcctgataccattctctctaaacctgcagcctgaacgtcctaggaaatcaaccgagtatcgtcgagaacaccaggatcgaatgtatgaagcagataccctaagcaatgcgagcccatttcacccattcagaagcccttctccatctccattccacacggtactaataacctaaacttctgatgacctgcttcgtattcaaacccatcaatcactaaatagaatgcattgctttttaaatgcttgatttcagcctgatcgccgcagagaccactacgacatgtatgagcctgaggccaacaccatgctgcataatagcggctccagggagcccattccatccagctggaagccgctctccaccaccatacagaacggtaagtcttgctcgtgattcttgagtacacgatgagccacatagatgacataaactctctctcttcaattgcagcctgatcgtcgtagtaactatggtaaagagcaatttgaggacctgtacgagcaagatggtgatgtcacaccgcgaaacagctctccaccgagcccgtttcatccagcagcatacaaaacggtcggtactcaaaaactcgatactggcttctttttggggataagtaaatcaaattctctttctagtgagtcacttagactgacaatagaatatgttcttcttatgctgcagtctgatcaacgtagtaaccatggtaaagagcaaattgaggacttttatgagcaagatgacgatgtaacaccacgaaacagctctccacctagcccattgcatccagcagcaagccattcaccaccaccaccacaaccatacagaacggtactcaaaaaatcttaagtctggctcattgtttttgtttcagcttcttcctagtgataaaaaacgtcctcttgacagtgagtcacatatattgaattttctctctaattgtgcagcctgaccatcgtagaagccaccaggataacgaggatttcgaggcaatgtatgagctagatggcgacttaatacaccagaagagcgctcctccgagtcccgttcatggaccatactattcatccagcgacgacgataatcactccacctacctctatccagaaatccgcagcccacttcgttccaggatcgtatccgagaacagcacggtgtgaatcctttcccaactctctctctctctctctcacagtcactaatgattctgaaatgcctaaaaaacaaagaaatgacaatgctttaaacctgcagcctgttcaccacaactaccagatagttgcggccgagacctatgagcaagacaagcagttcgagccgccggagctgcctgacgagtcacagagcttcacaatgcaggagattaccaaaatgcgaggactcaagaactacgaaagcggcaaggaagagagtcaatcaatgatatctgaggcttacgtatccgtcgcgaattacagagtgaggcagaccgtgt

SEQ ID NO: 6440 - DNA, 528 bp, Arabidopsis thaliana landsberg
tcgaatgacaacagtatgcacataattcttcaacgttcctttgttttctttttttgttattcttcaatgttttctaatttaattacttcaattccaaacacaggacaaatgtgcagcttgtaagaaaacagtttattcctctatagaacatgacaatgaaaggagaatcttcccacacaagacttgcttcacatatgtatgcaaactctaaaacacctaactttatgaaacataaaaaaagtgaagaaaagtcttcttacattgcaaagagtatcgaaaatgcctaaaatgaaagataaatctaacaaaaaatgcctacctattttctaattaactataaaaacacaaacacaaacacaaaaacaaatacaaaaacaaaaacaacaccaacatcaacaccatttatcaattgtggactcctcttctctttgtagatgttcttctatgtccaaatattgagtttctggagtaattttctcccatatacattgcacctcatgaatggaacatttctgtttatatagaaca

SEQ ID NO: 6441 - DNA, 4509 bp, Arabidopsis thaliana landsberg
ctgccaagcagggtgaaccgggttacaagaatgtgagtcccatgccgttggtgataggtccgggtggcttctttgaagttgatgggttcacagaatacctgaacaaagcagaaaactctctcaatgctactactcgacatatctacgatctcggtccaggtaacccgaatactcaactatctttcgtttcagatcctgcaggttcatcatttcccttacctgaatggaaagaaaacaatattttgattgattaggagtcgatgaacatctgatagaaaagattctaaacccttcatatctggaccaagaggcaaaaagttttcgcagtctcaagaacataatcaaaaactcctcaacaaaggctgtggcatgggttggtgagtccggtggtgcctacaacagtgggcggaatcttgtctctaatgctttcgtgtatagtttctggtaagagtagatatcatgacagcaaaaactaaggttatcataagtaatacattaaaagcatttctaatgagattaaactgtgtgatggtaggtacctggaccagcttggtatggcatcgctttatgatacaaaaacatactgtagacagtctctgatcggaggaaactatgggctgctaaatactactaacttcacaccaaatccagactattacaggtaacatcagatgaatctattatgtcaccaggagaaatggttaaaaagacaagcaataaaaggagtatataaccctaactacaagtcatgctacttgttaacatgcagtgctctgatctggcgacaacttatgggaagaaaggcattgttcacaaccttttccggaaccaaaaagatacgttcgtacacccattgtgcaagacaatcggtaagtcgagtttccatacaagtaactcaaatagcattatactcagatgaattccgatctaacttttaaagtttcatcatgcagaaagggataacagttttactgatgaaccttgacaatactacaacggttgtagcgaaagtagagttaaataacagtttcagtctgagacatacaaagcacatgaagtcttataaaagagcaagttcccaactttttgggggtcctaatggagtaatccaaagagaagagtaccatttgacagcaaaggatggaaacctacacagtcagactatgctactcaacggaaatgctcttcaggttaattcgatgggtgatttacctcctatagagccgatacatataaattcaacagagccaataacaatagctccatattccattgtgtgtgcgcatatgctgaaggttgttgtacctgcatgtgcttaaggtagctgcatatggtactcaagacagttccttcattcggtaatttgattagagaaaaataaagaagcgtacctttctttcataaacctataagcattgaaagctgtgagttcaaagtatttgaaccaaataaaataagtgaaacaatttccaaactcaaaatcttgtctgcactttatttctgtttaacattcaaaactggttgggactgtgaagcccgtatcgaggacaaaagacacaacaaacccacaaaagggtcaaataaagctacaaagaaagaaagaaacttacatcaaagcctttcaaagaccaaacgatttccaccatattgagtattgagtagaacagtataattagtagtcaaggagcatgactgagagaatattaactttagctagttaatagcttagttgtctttggggaagatgatttagctagctcatgagaatgttgagaatgtagtcgtccaaagagctgtgtcttcaatgattcaaaagccacatgaaacctctcaagctgttccattgcattaggattgtataaaaatagtccatagtacagatcaaagctgtcaccagcagtattctccaccagttttagcaatgtctcataacctttggtatctataggagtagattccaagctcagcttctccagaagccttcccactgtgtgtgtgataaactgtgatccagcagcatgccaatcatgttcagcacacgacatctccgccatacgacatccttcacgggcaaagatatcaagaaaactgtcacacctcgattttcttctatcatccattccaatcctaaccttatcaaacacaaaggcaagattgttccatccatttttaccactctcaggcccaaacataggatgcgtgcacaaaatatcgaaatcttgtgggagagtttgaagaaataaattccttgggaactcttttactgaaagtacatccacaaaaagtgtgcttctcttcagtctctgaaacggtagtgactcgagaactttttcagtcgaaaggattgacgtacagagaataataacttcaggatgctcttcaaatagatcatcaagatctgaaaaatacgaaacacccagctttgctgcttcatcagtgtagtcacttctggaataggctaacacagtgtgaccttgcttgaccatggtttttcctagaaactgtccaaaattaccaaacccgacgataccaatcttgagcctcgaaccgtcattaacactaccagacacctgggagttatattcatacttcacaacaacatcttctgacctgcaagatcacaaatcgataactatttacaataagaaaccaaatccaaaatgcatcacaccacacaatgcaactaactaactaactacatacctcatcatatccaaagaagcatcattctcaccacaattagaaaaaacatgaactttctttgcttcaccttcaaaagactgcttcatcacaacaccgcgaagccgactaaaaagctccttacgcaaagccccgaaagccaaatcaatcctctctaacacctccaaagagttcttattatacacaaacaacccataatacaaatcaaaactatccccacagatattctcagctaaatcaagcaacgcctcgtaccctttcgtattaatcggcgtcgatttcaacttcaacatccccaaaagcctaccaagagtatgagttataaactgtgattcagcagcaaacttatcatgatcagtaacactcatctccaccatctcacatccttctctaacaaaaatctcaagaaaactctcataccttgagactctcaatctctcttccccaatcctaactttatcatacacaaatcttaatcctctccagccatgatttgaactcacactctgaggaccaaacattggatgtgtacaaagaatatcgaaatcttcaggtaagtattgaaggagaagagttttagcaaactctttaacggagagaacatcaacgaagagagtgttgcgacggagtctctgaaacggcaacgttttgagaatattctctatggagaggattgaagtacagagaaggactacgtcaggatgacgttcgcagagatcgtgaagatcggtgaagtatgagacaccgagacggcgagcggcggaggagtgatcggatcgggagtgagcgaagagaatgtggccttgagaaattagggtttcggcaaggaattggccgtagtttccgaatccgatgatggcgatacggagaggaggggtggcgttggagttggagttgggaagagggatggtgtcggtgacggagaggtggcggttggcggtggagagagagagagaagggagcattgaggaaagagaggtaaatgagagggagagaggaggtttggtgatgagctttgggaggaagaagaaggaggaggaagatgaggattgagagagaagaagatgatgagaatgagattgagagatcatttggagaagacgatgatgatgatgatgatggattcaactgtctctgccatttgaatagacttttggaggtttgtggagatcttcaagtctgcacgttttaagaacttttgtatttaataaaagaaagaaaattttttataattttactaatcatattaccactgaacatttttctttcaaatcaagataaaaaaatgaattagtaaaattatcaaatataaatagaggcgttaatgagactagctcgaaatgttacttaaaatcagtgtcgaagaaaacgctaggcaggcggtaacatagcgcctaacgcatacaatgcttaataggagtttagacgattttatacagtttaaaagtttataatataatacatattgaatataatattatagataaaaaattatataactatctattagaaaaattaaaatgttaaatcataaacaaaaattagttgaattcatatcaaacaatatatattgagttaagacttataatttaattttatatagttaaaaataaaagccaatacaataaaccgaaacttatgcaattttaggcggtcaaagcggttgtctaggagtcatttaagagcgtagtgccgcctaaaccgttttttagaacacagcttaaaattaatttgtgtgacaaaagtaaaaaaaaattcatggagacaacggaaagaaaatgaaaacggaactaaaaccaagaggataga

SEQ ID NO: 6442 - DNA, 1816 bp, Arabidopsis thaliana landsberg
attagtgaaagaagacgttacataattttaagtagtcttaatacatgattttactttaaatttattatattaattgtgctttgatgagaggactgaactgtttaaacgtatttattagaatatacgttttccttgcatttaaacttgtagtaatgaatgtttataaaaatttcataaaggtatagttatatatttaaaccattccatttcccatctaagaaatggttttcattatgatcatttgattttttttgtaccttaaatgaagaaaaaccaatcaaataattcgtaggaaaaatagatgtatcaattatatatgtgacagtaaatagataaatattttggcaaacaaattagatacaaatttagatttgaaaatacatgcaaattgactatcaattaaaatgtatgaaacatgtgtaacgtatatttctcaagtaaataaaaatttggtaaaacaaattagataaaattttagatttgaaaataagaggatatattttgtgggatttttgtaggaattaatatttcgtaaaaacgaaactcgtaggaatcgtataggaaatcaatcctaaaaatttggtagaatttgaccatattttcttatagtatacatctcaagtgtaccaatagggtaaacgaaatatgattttcttggaactaatattgacataaaattgtataactaatgatttaaaacaaaagaagagaaacaaagtggaaatgaaagaccaaaaagtagatttacaaacttgaatcatgttaatttaaatattcttaacaccaatttgcaatttctgaaggactcagaagtctttgattgacatatatgctacaaacaaaagaagcatttagttgaaacatataaccctacaaagtagaaacaatgcatgcacaagcagccaagaaattatcaaacacacgttcatggcagctgatgcatccaatgttacttcactactctctcctacgcaaactaaaccaaaacaacaagaaactaaaataaagagaaaaaaaaaacaccgagagcattcatgacgggtctttgcatggtcatccaacgaccgaccatgtgaaaaattccaccacttccggtacacactcacacaccactaaaaccagttttgtgacatcggttatcgttaataatcaaacgatctcgacggtagcgacggaagaaacttgattatgctctctcataacccgttttctaaccccgttaagccattttgcaactcccaaaacgacatcgtacatgcttaatgcaagatatataccaataccagcaataatcccattagcaatggaataagtcaacggcataagcaagatcgttacaaatgctgtcacggcttctttagtctctccccatctaatatcttttacaactcccatcatcatcacaccaaccatcaccaacgacggtccaaccgcccacctcggcacgttagtaactaacggcgtaaaaaacattgacgccaagaaatacaaccctacgataacggccgttagccccgttttccctccttctttcaaccccgccgaagactccacaaaagtcgccgtcgttgtaacacctaacgccgatcccaccacggaggagccggcgtctactaagtacgccgcgtactctccttcaaacttcccatcttccacgaatcctccgatctcagccattgtgtagagtactccggtcgtaccaagaaggtcaacgtagaagagtgtagcgaacgcgacccaaacctcgctctttctaaactccgtgaagcttatggctcctaaagttgactggatcttgtgaaagtcaacacttttt

SEQ ID NO: 6443 - DNA, 741 bp, Arabidopsis thaliana landsberg
tttttgacaacgccctgttttggaatcaattcttggtgccacaggagtcctccattacgtttgaagaacttcttcttcctctttgccatccttctcttcactagaaactttctcaaccaccatactccaccaactaggactaagaccccaaaaccagtacccgcccctgccaaaccgcacaagaatattataggttgatcatcacttgctttttaaaagctctaaatttgtggaacaaaaatcagtgacctacctatcattattgctttagtcttatcgcccacacagcgatagcctccctcgaaattcacacaagtgtctgtttctttacaatatttgggattctctttacattcatcaatatctataattgaaagatgaaaatacgatagtcaaacgatgaaagaaacttctctagaaaggatgcttgcttccacacacaaaaaaagaggagggcataaggaaagaacataatactgacctctacatccgtccgaatcatatgggttacctttgtaacctaggttgcattcacaattggcatacctaatatcagaaatgatgctcatggtgtagtcgcatatacactttatactctggtcattagagtaagcagtgtccgtgtcttttctgattttgcaggccaaggagttgacgaaggaagtattcctcgtctgcattatcaatcctagacataatgtagcatatctcttagcatgtaactgttctggtttggtcagc

SEQ ID NO: 6444 - DNA, 1652 bp, Arabidopsis thaliana landsberg
ttcctatataatctacatgttgatgaacgctcgataaaattataaacctttaattattagtccaaagaaattctacaaaaattctctatttaaaaaaaaaagatagtgaaaaaatgtgtccgtaagtaaataagcgaattaaatgtaaaatctgtctcagaaaaacaaacaaaactaaactagaaaagagaaatttgaatttacttttccaaattccatttacacatcaaaattttatttatttgtttatgagtgattatccgaattacctccaccaaataaaaccctatcttatttccccctaaatgattagaaaaatataaagtgattaagattcttttgaaagtttgtgtttatactttatcttgtactaagagaaacagaacttccctataaaaagcaaaagcaagtaagaataacgtgttaaactaaaacctcgaaaacaacaaaacccgaaactgaaacagagaatccaaaaaaaatgccacaactcgagaacaacgagccacttctaatcaacgaggaagaagaagaagaaacagcgtacgatgaaacagagaaggtacatatcgtaagaaacgaagaggaggacgatctagaacacggcgtcggatgcggcggcgcaccaccgttctcatggaagaagctatggttattcaccggacctgggtttttaatgagcattgcgtttttagatccagggaatctcgaaggagatcttcaagccggtgcggttgctgggtactctttgttatggcttctcatgtgggcaacagcaatgggtcttttggttcagcttttgtcggctaggcttggtgttgcgacaggtcgtcacttagctgagctttgtcgtgatgagtatcctacttgggcaagaatgggttttttttttagttgggttatggctgaattggctttgattggatctgatattcaagaagttattggtagtgctattgctatcaagattttgagtaatgggattttgcctctttgggctggtgttgttattactgctcttgattggtaaattctcaatttttagacatgtgtcttcttgtgttattgtttcatttgtctgtgtttggtcccagttttgtctttttggtttatggttctaatagcagtttagctaatctaatctatggattgtttgaatttggtgttagttaaccattagctgtgttaatttcatctttacacatgaatttttgtcactatgtgctcatttggtcattgattcatatgtgtgttttgctcaaagttttggtctttttgttggaatcaggaaactctagtgagtgtttatggtactaattgtaatttagctaatctattctatggattgctcaaattattatgtgttaattgattagctgtgttaatgtctcgtggaatttcatctttcggtgtgagtttttggtgttatgtatctcattgattcatatgtatgtgttttggtcacagtttcgtcttcttgtttcttgagaactacggaataaggaagctcgaggctgtgtttgcagttcttatcgctacaatgggagtctcattcgcttggatgtttggtcaagctaagccaagtggctctgagcttctcattggttaagctttctttcttctcctgatcccatttcttattggaaactctg

SEQ ID NO: 6445 - DNA, 5130 bp, Arabidopsis thaliana landsberg
caagaaagaaagctaatcatatggcgttcatattagagtgaattatgtgatatggctagcttcgggtcaattctgttgggatccggatcatagtgttgaccattccacagtttgttggaattttataagaaaccaagtaaacattggtatgagctcaacttttgttcgtggttggttaatatcacaatatatgtattgtgtaaacctatgattttttaaaaaatacttttctatactgtttggtcttgtttcgaattataagaagaaaaaaaactaatcatatggaattcatattatagtgaattttttgatatggcttgcttcggttcaattttgttgggatccggatcgaagtgttgaccattccacattttgttggaattttataagaaaccaagtaaacattggtatgagctcaacttttgttcgtggttggttaatatcacaatatatgtattgtgtaaacctatgattttttaaaaaatacttttctatactgtttggtcttgtttcgaattataagaagaaaaaaaactaatcatatggaattcatattatagtgaattttttgatatggcttgcttcggttcaattttgttgggatccggatcgaagtgttgaccattccacatttccactcataccactgttaagtttcaactttttcatgcgttagatagctgtctctttccgtgtcttgtttcatttttgatgcagaaatttgtctttcaaaactaatttcaatttttaaaaatatgtgcgtgtcagaagagtattcataaaacgttggtgccgaccaaaatttaatcttatataagtaaagttggataggttcgatctgctttcaaaagtagaatattctaaatttcagatcctacataggattcgatccaaattaggatagttacgctttgactgtcgactaccaaggaaatccacatgtcaacaaaacttttaagacaaaatttaacgtatttatctatgcaaaaactacaaaatgatgagaaaaaattgattgaaattttttatcttactggataattctgttttagtagctaatatgaaactaaatccattatgcatcgaatcatcgatttggattttagttttcattagagtacaccgctaatctgaaggatttataggaattcgatttagcccactttttcgggactgtatacaactttaattaggataaggtaaagtataatacaggttccgaatgtttgattagttaagatcagtttggttttcctcttaacaattattggggtgtgtttgataaggtccgaaatggggaaggtactacgttggaccaatacaaatggcggtttgctatggtgtggttattgccaatgcgctcttgggagggcaatgcctaaaggcaatgtacttggtagtgcagccaaatggggaaatgaaactctttgagtttgtgattatttttggatgcttacttttggttttggcacaattcccatcctttcactctctacgatacatcaactcactgtctctcctcctctgcctcctctacagtgcttctgccgctgctgcatccatctacattggtactcttctttactaaaccactttactcttaattcttaaaccttttataatgttacatttaaaaggtgagttttctgttaaatatcaggaaaaaaatcaaatgcaccagagaaggactatactatagttggtgataaagaaactagagtgtttggaatctttaatgctatggctattattgccactacatacggcaatggcattatacctgaaattcaggtttcattttgtttccattctttgtttagaacaccactttaatatttattcatcaaaaacaaaagggcagtcacatgatcgactacagttatatatatagagtatttgatatatgaatactatcttcttgcaacgcaggcaacaatatcggcaccagtgaaaggaaaaatgatgaaagggttgtgtatgtgttaccttgtagtaataatgacatttttcacagtagccatcacaggatattgggcattcggtaataaagccaatggacttatcttcaccaatttcttaaatgccgagacaaaccattactttgtccctacttggtttatttttctcgtcaatctcttcaccgtccttcaactttcggccgttgctgtggtaaatacaatttttttttaacgtttttctttcacatatatacattgttattattttattttattttcgtcacttatatacattgttactaattttgagttatacaggtatacctacaacctataaacgatattttggaaagtgtgatcagcgatccaacaaagaaagaattctctatccgcaatgtcatccctcgactagttgtgcgttccctcttcgtcgtgatggctacaatcgttgcggcaatgcttccattttttggagatgtaaactccttgttaggcgctttcggttttatacctctagacttcgttcttcctgtagtcttcttcaactttactttcaaaccctctaaaaaaagttttattttttggatcaacactgtgatcgccgtggttttttcgtgtttaggggtgattgctatggtagcggcggttagacagattataatagatgccaatacgtataagttgtttgcggatgtataaaagaacatgcaaagcaaagtgagattgttatttgagaatattacagtgtagagcacttttttaaaagtatttacgtgattagacacttttcaaggagtaggtattttgtatgggcaatttgacttatttaccctttaattacatcggttacaatctcttgtctctctcctttttctatctcttttttttcttcagaaaacacaaaatccagcggaagatgatggttgatgggtttgctagaattacaacttggtttaaaaatctgaccctgataattttgttgtctatgtgtttattcatgtaattgtagtttcatgcgttctacctaaagttcattcaattgctccaaaaccttaaagtttgcagttttttttcttccagttcttcacttgctagatcttagaatttcagagaccataaaatatggagaacaaaagaaaaaaaagaataagtgaacgagcgaccgagtgaaggatctcgtgtagcagtagaagccgcgatctcgtttctctggtttttggtggcaaatcatcagtcgtggttctcccacttctctgataatcacagcggcgagagaaaattttgggcttatttaatcaaagttgtgttctcttatatagcacttttctcaattttcaattagtttttatttccttagagtaaacgatttctcatttattctatattggtggtttaagattttagcttgagagagagagagataaaaaaaacttgatcagtggatgcttttgcttcttgtggagtgtttgaagattttccattgatggagcagctttgtatcaggttctttccacactgatttattcatattgagttttttttattgggtgtgaatgttatggtgaattgagtttaaacttgtttgagtagatattcgcttgttatgatgcatctgattccccaaacacttgcttttgtgttgatcttatattctctttgattcaattttgcagatgattctttgcattacattaatttacatcacaaactgacgtactgtgcatccatgaattcaacttgattcaaatgattggtgaccatagatgatagtacaaacatatatggtcagctgaacgcctgcttgttaatgtcatccaagggaatctgtccattcagacgcaaacatcgatattatgctccttttatacactatataagtaaatctgtttcttgttatatctaggattagtagacaattttggttataatgttgggagtttccatacacaagtgaataaatggttaaagaaaaatagacgatgtactttgaatgggtgtttgaattggtgattatcattcatgtataaacttgtgaattgaaatgaaacgacctcatgagtcactagattaccacatggactaaaccgcttggatagtcatcaatggacaattatgtctttgatttgcttcaaatgtgttttattggttggtaaaattatcattttttttatggttcagagttttgttttatggttttagatttagtggagaaggatcatgggagggtttgggtttaattttagggtaagtaaattaggatttagtgtaaagcgttaagggtagagggtttacacactcgtatgaaccatttttgaattataatcatatgaatattaccataggaatgatcctatattttacagtttttacattaaaatgttttatctgcacaaacaaatacacgaaagatgaataacaccaaatctaaacattgttcaccaaatctaaacattgttcaccaaaatcaaataaaagaatacttcattagttggataacatatcttcgaagagtaatggacggattcctatagctgacaatcggcaagtacgtgttcatctatgatttttagaagtagagttgtatccatgaaacatcgaccaaatggatatagtgcaacaaatgaaggtgtatccacctagcgccgaacaaatggatatacattttcgtgttttctcgtaaacttttcttgacatccatgagtcgacataagtataaagttgccagacaagacactagagctcacagcggccaccgcagcctcatggaccaaagtttcaaaaaaagctcataaacatcaaccaatcttcttgcataaccaccacatacccagccttatgcgtccaatcactttccgtctacgcaaatgacatccaaacatttttcaattcaaaaacaaagacaataaattcaacagatctaacaaaaataaatttaaagtgaaggataaaatcataaaattaagaacccataacaaaaaaaaaagtttaaagatttacaatctaaagcctaagctaggatcaacgaatcacatgtaccgttggcctttatgattcaaaaccaaagaaacctattaccaaaaaaaaaaaaaccgaaaccagaaaccgtaagtaagacaagagagaagaacatggaaccagaaaaagagggagattaagggaagagggaattcgg

SEQ ID NO: 6446 - DNA, 829 bp, Arabidopsis thaliana landsberg
tcatcttagcaaagttttacaagaaaacagccaaagttataattatatttctcaacttcagattgaatcatgaatgtctaaaccaagtttctactgatttgtgagttcgaatgatccatactcaaactcaataccgctaagatgatccgcaaagttttacaatttcagaatgaataataagattctccaaaccaagtctctactaattctacgaatccaacatctctaaagaacgaatagagtatcgaaaggactcaccaatcggaagcagtaataacaacaccagcccaaagaggcaagaagccacggctaagaatctgaatagcaatagcactaccaataacctcttgaatatcagcaccaatcaaagcaagttccgccatagaccaaagcacatacctagcccaagtaggatactcatcacgacaaagctcagctaaatgacgaccagtagctacaccgactctagctgacaacatctgaatcaacaaccccatagctgttgcccacattagtagccacaacagagaatagccagcgattgcaccagcttgtagatctccttctagattccctggatccaaaaacgctatactcattaagaaacctggaccggtgaataaccagagcttccgccatgagaatggtggtggtgtgtctccggttgttggatcgtcgggtgattcgaaatcgacgattaggatcttttcgtttgtttcgaaagccgcttcggattcggaatcggagcatgggagagattgtcaaggagcaggaggaggaagaaggcggtcttcgtcttcttcgagattattttacacggtgtgtttac

SEQ ID NO: 6447 - DNA, 822 bp, Arabidopsis thaliana landsberg
gcacccgtctttgcctcttaaaataactatataaaacggtttaatcatgcattactactcttagaagaacctaattctgatataagttatacgatgaagagaaatggttacctctctctcctgttattgagggccggacttgcttcttaggctcattatcgcctccaacccacattttctcatcccactcctgcccagatttcaacatccttaaaatattatcaactcttgggtcctctttttctttcctccataccaaagattttgggcaatcactgtctgctgggtccacaatatatgtgatatccacctacatagataatcattgttaatttcagagtgtatgtacttcatctttttataccaatgtacttacaacaacaactgcacaaacctgttcagcagactcgcacgccaatatggtggatgtcttgattggacgcagtttggaaaggtttttaatagtcctctctgtaaagacggcggtatctccttcagaaggtaggagactagcaatagacgggatagtttcgaatgcaaggagttggagtctaagtgggaagccatggagtacataagaatgttgcttgcaaccactccggagttttttaacgtcggtctctcctttgaaacttgcgatacgctccaaagtaagcagaaatgatgtcctttcccagggatatttacaggagaaatcaaggttcttcgtcagctcaactgtcatctcatttggtctcagaggaggagacttgtcacatattagcaccccatccacaatgataattagggcgagagcctatttcttccatgcaggcatgtcag

SEQ ID NO: 6448 - DNA, 2908 bp, Arabidopsis thaliana landsberg
gaagataattattaacgataaaatttaaatataaatttttccggtttaaaggaaaattttcttttctttttggtccaattggatcttaatcccgttataagtatctgaatccctatatagttgagagaaggtagcaagagataaatattttaaaattgtatatagtcgacacgttgctaccaatgcttttatagtatgtatatacaagattctcttgtttacctagctagaacactatcgtccctaaattactacagaaattagaaatgttttaccagtaaacgatcgcgcgttaccaatgaccaaatgagtaatgtgttgactatattttaaattatttcctgtttatgaaaaaaatacctgcaactcagtgtaggaaaatccaaaactagaaggattcaaactgttatagctttattatgatagctagacctagattatatatgtacttttaaggaaatagatcattaatgagctttatatagatgcaaggaaagtaaaagagggaagattactggaagaacactataaccttggtaaataatagattgatatcatacaataagtgggaataaggacagttgttcaaagtggcatcaactccccaagttactacattgatgctcatatcataacagcatgaatctaaacttgttagaaaaagttaattacatggatttgtgaacttctcgtgagataatgtttggcttctatgaatgctctaatacttaattaggtccttcttgactgcaagcttcgacctcgttaccagttgaaaaaaaaggtttggattattgcataacaaacgcaatattcgaacggtaacaactattaatcagtaatacggttttactcgactcgatggtaacgattttttttttgttagagagttccctagtgttcatggcatggtttgctacacagcattgagcatggcgcgagctgattatcttcctctgataaagagaattagatcaaatcacgtatcacctcatgcacttgtcgttgtttatatttcgtcggttgcctccaattgataaaatcagtcttttcaagccacacaaacatatggttttctgcttttcgtctgccaagtaagtgcatagaaaaacttgaaagtttattctctacatttttgtgttcaaaattttgtggtattaaaagacaaaacaaaaatctagaatattgcatggttttacaaacaactgcagagtaaagatcaattttattttacaaaacaaattaatcaatcaacaaaacagagtataataaaaccctagtaaaaagcttataatagaaccataaacgccgcaacataaaacgttataaaggacaaaaccgtgatagccccatttcgtctgccaccactagccatcggaagcagatcaggaagcaaacattcctcaccgttaaatatcactttcgccggaaacccgtcacgttccgccacattaatccccggcgtgagtttcttgctgaactgtatcacggattgttgtttaccaggaatcctaatattcttcttctttggatctttttcatcagcctccgccacaagataatctagacccggaagaccttccatgaagatggtgttgtttacacctccgtccacgctaaggagactcgcgttaaacgagtaggctttctcgaaccctagaagcgccggtttcttcatctgaaccgcaaggaaccagttgggaaaatctatctctccccagttgaaaatcgtgatcctcactgtccaaccacctctataatccgacgccatgtgccagttaatcgatacaccgcaattgtccccacacggcattggattaggtagggttttgtgtttgagtgcgttccaagcaagcgttagagcggttctgttttcgaaaggtaagagaagagcgtctggagggatgagaagagacggagtttctgcactgcatgtgcgtcgcgtttcggaaacgcaaccacaagcgcaagtgttacaagggatgatagagtcgttgaagaaagcagagaaggagacacaacattttggtatctcggttttggcttgcgtgatgttgcatacgatctgccaactggcgaaagatgatttgttggtcggcataccactcggatccggataaaaagtcggggttacccgaacgggtggcccgcacgagtaatccgggtttagcgtccctttaatcctccagttctgcggtgggaaaagcgcggatcggttgaaatcaggaggcattttggcaacttgcatcgtgaagacggagactgatttggaagggtccatgatacgtggtaagatggtaccgtttctgcagcaagaaggaatatttcctaaagtagagtcatcttttttggttggaggcaagtctatgatgattggtcttctttcacatgtgagaacgtcagcgaaatctagaccagtgtagattagggactgaggaccaaagatgcattttgtggcgtccacgaccgttggatatgcgccttgcattttttgtatgaactcgtctcgcatccaatcgaaactaagctcccaatggtcaagcctgcctagcgggttgtggttttccatggttacttcagttaggtagttctggtcgtaggctcggatcacgtcgtacattatggtcaagtctccgggttgtcgtgggaggaatttggtggtgattgttgtgttgactataatgctcgcgtctcgtatgcagcacgtcgttagttctcttttgcctaatggacacaaaattagttaagactaacattaatattttcacttcaaattttactgcatctccgtaaaaaataaagttacatgtatgtgtattttgtttcctaaaatattgtattcatataatattagaattaggaaaaatatctacaaagtatttataaactttgttatttgaaagtccac

SEQ ID NO: 6449 - DNA, 2562 bp, Arabidopsis thaliana landsberg
tgatgttctggtttatcttgaagtagctttagaacttccacctttggcctgatgggatatcacacagaaaataaaactagattaagggtagaatctggatgagaaacaaaatcattaatggacctcataatgatactgaccctgaacccaaaccataaatcctttctgatggtatgattacacctgctatttcacgcagtaacgcttctgcaaagcggccctgcaatttaacccacccatactaacaaagtttagctcattatagtgacagacagtatgtgtatccaggacagttttgaatagaattggaatcattactgcacctgtttcgtggtaacgatataaatctttgagctggcaaatttcagtgcatctgaaactcctgggtagaatctgcaaatatagtagaagactatatcaatccttattttttataagatgggtctctgaaacttagagttggttagtaagatttgatgttgaaggcatacctattggcaccaatccaagttgtcaagtccttgttaatccaatcatctctaacttttccaaacaaatctaccaaagcatctctatcttcatcccaagcttccatgatcacgggcttaaactttgcccagctctccagtatcccatcaaccgtcaacccctctgcaaccttaacaaacaaagtgcaattcatcatctacaatacaaaaaaggatcacttaaccagaactaagtatagtgaagaagattctgatgagcattcacactcactgaagattttcgaatagacggtatcttggtctccaataacagccgcacaagtagaagattttcatagccagtttcaaccacaggtctcacctacaaacaccagctcttgaatcttcaaattcttcaaattcagagctagaaataatctcaatctaagctatttcagtaaccaacaatactttctaagctgagaaaaaacagtaatatacaatatgcatttgatcgacgatccattcctctaaagcggaatcaactccttcgaacaaatcaggccatctcactttggctgcctataaatacagaacaatcaaaagatgttcaagcaaaactgggcaagaaatatcacaaaactccaaaatttcaaaatcagaatcagagaaacacagaagtatctcaaatgcgaaaggtaaagttaaaagagtgaaattgaccttaacagcagatagagagctttctccacaactatcacagagaactccatcgaagtccaaagcgtagagatctcccattctccttctccttcaccactactagtttcaatcagctgccacacatttgttagagacgaaggttttgttttttactcttactcttcgagagccaatgttaacaagccacgtgtttgtgacgtttttgtaaaaacaaaatcgcatatatttttccgcgttacgttgcgtttgcgttagtccacacgcatatatatgtaaaaaacctgttattatcggtggcgtacccaatcaattaccgactgcagccggtcgcagcgtctattcagccgacctaagaaccggtatcgccggtatcaataaatgctgatctttttcttctcttcttccccagattctcaagtctctctaacttggagaggagatagaagacatctcatcatcaatctccggatccaatccaattctgcatcgactcttcagaggtatttccgatgaaccattattttccccttgtagaaattattctcctttctcaattgatgattgtccacttagctagattttgtgtaaagagatattttgtattatagattgcatctactgctattgtttcccgattgattgaagcaagtagacaagaaaaggattcggttttgtctggttctgaaatttccattggttccaaattgtcatccttgatgaagaagatactttgctatctattagaaaccagaatggctcgtgtattgcctgattctttgtttaccttttggtgattagagtgattttgcaattggagatgttagatgttctctgtttgttttgtggctactaacccaagaaggtttcttttcagttttattgggtcattggagatttttttcggttgaggatggctaacaatgaggagcatcctcctcgagggaatgaatgggaagtcgtctcgctcacttcatcagcttatgctgctgctcctggtccgtataacgttgaatcaagcgatgtgcgcaagtatgatgcttactatggagcggaaacttcacgtgatctgtacatgtctgaacactttgtattcccacctagtgagcatgagaatttacccattgatgaatctttattcgtggcggagcaaagaaaggatggccgagacttgatgctggaaggtcagggattgtctgatcagtttcattatgaagctggaaacaaccaacagagtatctatggtgaatctgcgcttggttcttctagacacatggaatcattcggaagcgaatcagccgtgtatgaacacggattagttgatgcagagggaaacttagatctccattctgatggtgagggtgaaagggatgtc

SEQ ID NO: 6450 - DNA, 1018 bp, Arabidopsis thaliana landsberg
tagtcgtttaccagtacgattcacttcagtagtggtactttatgatcactattttagtattttcttgtaattttaaattgcatgctctctctctctctctcttggacttggtcagcttaatgattccgctgtttatgagcttatcacttaatgagtctcatttaaatttatgcatttttgataattacgaagttcatacccaaatttggaccctagttgtctctctattgcaatcagctatatctgtgaatagtagaactcgagttcgtatatgtataaatgtttccatgaccagttgttctttgtttttttttaagcacaagtcgcttgtcttaatttcaaatcgtaatttgtatgtctaaatctcaaatagtagttcgtcattgatgcaagttgctgccattgtggtttattcccggaacctagagatcacatttttcttcattgcgaagtaagtgaagagctttggcgtgaggttaaccttttcacctttcaattcacacttgggatgctctctcagtttggttggatttaaaagactatagatctccaaggtgtcttcgtagactgattcctcatgccacgctatatgcaatttggacggaacgaaacaacagatatcacaacaacatatatatctacggatgctcgatcttgttcaagtgtcttatgcagatttggctaaaatatgagtagagcttttacttaagcggttccttccttgtttttatctttttttggcgagggatgttcttatgttttaattttttgtaaacttctacaaactttcattttaatgatattcacatatttatcaaaaaaatatattgtaatttgtatagatatgtagatagatagaataaagtgccatattagccaaaacaaagtgctaagaaattcactattgagtcaaatacaagtggaaagaatgttagctagctaaatgactacactccgtgatttggataatgcttagataattcttgatggacagagatatacccatgcaaaagttgca

SEQ ID NO: 6451 - DNA, 546 bp, Arabidopsis thaliana landsberg
  unsure (1)..(546): unsure at all n locations
gagagccgatacagagctccagagtagtatcttgaagctcaagcaacttctgtgcggtagaatccccaatctcagaccctgaatcacttccatcagaaagannnnnnnnnnnnnnnnnnnnnnnnnnnnnnnnnnnnnnnnnnnnnnnnnnnnnnnnnnnnnnnnnnnnnnnnnnnnnnnnnnnnnnnnnngatcccgctaccgttttcccattctctaacacaatcccataaacaaaaccttgagctttatatcgctccattgtcttagacatgtacttcaagatcccatcttgtgccttgtacatggttctcttactagagtgctctnnnnnnnnnnnnnnnnnnnnnnnnnnnnnnnnnnnnnnnnnnnnnnnnnnnnnnnnnnnnnnnnnnnnnnnnnnnnaacgctgcttgtctctccagatcttcttctcaagctcctctatttccatttcctcatcactactcagatcatcgcacaaagccgtatgcgaatcagacacatatgtccctctgtaatggaggcgccgagctacaactaaac

SEQ ID NO: 6452 - DNA, 736 bp, Arabidopsis thaliana landsberg
actcttctgtggcttaagcctttaaggattttgatttgttttcatttcacatcttaagattagtcttcggagaatgaggtttgtattttcccatggcccacacatagtttgccacatcatcgtctcttaccatcatatttcgccccttatataagaggccctcttaagttaatatagcatttaattttattctcaaatcaatttaagaactcactaaaaacttaccaataaggatgctcttacttatacacattctaatttggttttatgttcaaaagtcttaaactaataagtaataaccaaaaccccttcacatcaaactctccaaataaaactgttaaaaaggaaaaaaaaaaacttcttaaaaaaaaaaggaaattgttaggtgacaaagaaaaaaaggaaactagaacctaaaatatctgaacgttgaagacgcgtatatatatcctcactacgtaaccctaaagcttcacaaattctctcctctctcaatctgctctcgctagtcactacgatttgccaagtcttcttcttctacttctctgtttctctttccgtttcaaaacatgaattctcgcaaagtggaatttcgcttcaccaatcttcaaaggaaactctcttctccatcacatgcaaactcagtcatcgttgagatcgataccaaatctgaagagatctttgttaaccaaacaaccgatcaccaaacccgccggttcacctcggctactctatc

SEQ ID NO: 6453 - DNA, 1231 bp, Arabidopsis thaliana landsberg
tcaaataattgttttgtcgtattgagtcaatctataacatggaagtcataaaggagcggcgagtgaagaggagaggtcacgtgagaaaaaccgaaacataaagctttcttattcaccacacatgcctcctttaactctttgccaattggccaataacaatcaatggcaatctcgtaaattttccaattttcaatttccactgtcctcggtctcatcgtcattgacaaatacgaacaccaatccttgattctctcctataaacacaaaaacccttctgattctaatataaccataacccatctctcaattttcgaaatttactcagaaatgttgaagccttcgtgtcatgtaactgaccatatacacaaccttttctccaactctcgccggatttttgttccggtgcatcggcaaaccagacccatctcttgttttcagttaaagaaggaacctttacgggcaattctctctgctgatcatggaaacagcagcgtccgtgttgctgatactgtttccggtacttctccggcggatcgtctccggttggtcgattgatggaagatgggttttcttataaggagaagttcattgttagaagctatgaagttgggattaacaaaactgccaccattgaaacaattgctaatctcttgcaggtttggggattttgtgtcttgtgtgtactcaatatactaaacactattcttgtgtgttgcaatgtttgtttagttggttatgtctttgtgtgattgatgtttcgagtatggatttgtgtaggaagtggcatgtaatcatgttcagaatgttggattttctactgatggatttgctacaacacttaccatgaggaaattgcatcttatttgggttactgcaagaatgcacattgagatttacaagtatccagcttggtaaggctttgagtggtttgaggattttgtggtttggagttgaaagttttaagctttcttgttttggttataggagtgatgtggttgagattgagacttggtgtcagagtgaaggaaggattggaactagacgtgattggattttaaaggattgtgctactggtgaagttattggacgtgctacaaggttttgactttttcaacttgtcataccaaactatctgaagtggttgtgtattggtagttttgacattagaagctacagaaactgcatatgtgtgcttgtttagttatttatatttatgcgtattctagaacag

SEQ ID NO: 6454 - DNA, 3724 bp, Arabidopsis thaliana landsberg
accaaccttctttcttagttggtcactgtgtattcaacattttaagatgttctctatgtgtcagagactgcactaaaacttgacactttagttgtgatattgaggatgctgtgatgtcttctttgaataaaaacttaagaacatctcggtcaagtggttttgaagtaagcacactgtcttcagcttagactgttccgtagttttagccagtgtgtgtggttcaatgttctaagtttttactgatttcaggaagtgcgtctacatgctattaaaacacttaaaacgacagaagagatactgagttcagtagcaaagagacatcctcggtgggcacgtcttgtttctgctgttgatcatagagttgatagagctttagctatgatgagacctcaggcaattgctgattacagagcgttgctttcttctcttcgatggccacctcagctttctacactaacttcggcaagtcttgattcaaagtcagaaaatgttcaaaatccgcttttcaacatggaagggagcctcaaaagtcaatactgtggaagttttcatgccttgtgtagcctgcaggggttacagttgcaaagaaagtcgcggcagcttgggatccataagggagaaaatgttcttttccaccagccactctgggctattgaagagctggtcaaccctctgacagttgcatctcagcgacattttacaaagtggagtgaaaagccagaattcatttttgcccttgtgtataaaatcacaagggactatgtcgattctatggatgagttgttacaaccgcttgtggatgaagcaaaactagctgggtacagttgccgagaagagtgggtttcggctatggtaagctcactgtctttgtacttggtgaaagagatctttcctatatatgttggtcagctagacgaagcaaatgaaactgatcttcgttctgaggctaaggtctcgtggctccatctcattgacctgatgatctcctttgataagcgagttcagtctttggtatcacaatcaggaatactttcgcttcaagaagatgggaatcttttgagaatttcctctctctcagttttctgtgacagacctgattggcttgatttatgggcagagatagagctagacgagaggctcgtcaaattcaaggaggagattgataacgacagaaattggacagcgaaggtccaagacgaactcatctccagttccaacgtttacagaccaccaatcatttccagcatctttctacagcatttgtcatcaataatcgaacgatccaaatcagtgccggccttatatttgagggctaggttcctgagactggcagcctcaccaacaattcataagttcttggattgcctccttctcaggtgccaagacgccgacggactaactgcattaactgaaaataacgatctaatcaaggtctcgaactctattaatgctggtcactacattgaatctgtcttagaagaatggtctgaagatgtctttttccttgaaatgggaactggacagcacgatccacaggaagttccaggactggagaactttactgaaccttctgaaggtattttcggagaagaatttgaaaagttggagaagttccggctagagtggataaacaaattgtcggtggtgatcttgagaggctttgatgctcgaatccgagaatacataaaaaacagaaagcaatggcaggagaagaaagacaaagaatggacggtgtcaagggcactagttggggctctagactacttgcaaggaaaaacgtctataatagaagaaaatctaaacaaagcagactttaccgctatgtggagaactctagcctcagagatagacaagttgttcttcaacagcatcttgatggcgaacgtgaagtttaccaatgatggagtcgaaaggttaaaagaagacacggaggttctatatggggttttccggacgtggtgtgttagacccgaaggtttctttcctaaactaagtgaggggcttacgcttctgaagatggaagagaagcaagtgaaggacggtctgagtagaggcgataagtggctacgtgagaatagaattcgatatttgagtgaagccgaagccaagaaggtagcgaagagtagagtgttctcttagttagatatttttcagcaaatcaatatctcatacgaaggtacattcataggtgagatcatttcatttatttgtggattaagatataacacacaactttggatttttaattgaaattgaactaaccagctctggttctgtttcgtcttaaattaatgattcatgagttaatagagaaacaaaacaaaaaggaagcaccgacacttaaattctcactttgggtcaaagtattgttttgaaacaagaaaaaagcctcttgaatagtaacaaaaataagtctctttgttttcaaactaagctttctaatagaagaagctcattcatcttcaagtttcagttagtttcctttcacaaaagaaacttggaagagaaggccatggccagccattgttcgtcacccttctacttaggattgttaatagtcagagcttaggcttgagtcttttcttcttccagttgttctccgtttccttcagcttcatcatcttcaactcctagggactggtttaggtactcttgagcgtcttctaatgcagattcatttgcatcggttgcatacagtatcttcttcactgctaccactatctgcattccagggaagcatatatatcagattcaaacaaaagtatgttcataaagttgagttcatatgatgaaaaacataaaatgcggtcgctgatgaaatctggtggtgctatgaggagttcattggtaagagctctttatcttcctcttaattctaagaacggtatgtgtacttataacagccggtaaacgaaattctggttctagactattggaaaacttgtcttggagctaaatagtgaagttggtggctataccatgcaaggtacacttaaacaagattaaaaaaaaaaaagaacaggctctacggaaacgtttaccggaagatcatctagctcaggagtttggcagagtatctctacatcccggagcttggagaagtaaaagtctctttctttttccaagagatcagtagagatcttgagatccacgagctgtatcacagaagatgaaaaagggttatatatgacatatgatggatatttcgttcattagaggatatgtgaaaactaagagcgatggtatctatgtcaatgtacctccttcgacaaagcctgcacttcagctgcttttgctggtttgggccctgagaataatgatgataccaacatgttaagaaaaatgcaataaagaattattattgtttgcatagaaaaatctgtttattaaatgacagacctgatgctttgctaagaccaactgaactggaattgggtggaggatggttattgtttgtttgcagtgactttggaatcttattagatcccttcacactcctctctttaccatttcttgatcttcgttccactggattatagttcctataagagaccatacattttacaaacttaattgtttggaaaacaatagagggttagcaaacacaaaaaatctgacatactcattcataatgccaccattaatggaataacagaaaagtttcagccattgcagaaactccaagttatccagtggccggccttgacaagcctgtaattgcaat

SEQ ID NO: 6455 - DNA, 546 bp, Arabidopsis thaliana landsberg
acagattcatttgcatcggttgcgtataatatcttcttaaccgctaccactatctgcacacattgtggtttcaacaaaatcatatatggtttgagttcaaactaagaaaaacaaagacagcatatcgacaacaaaaatgatgacatttaccggaagatcatcgagttcaggagtctgacatagtatctctatatcccggagcttagagaagtaaaaatctctttctttttccaagagatcaaccgagaccttgagatcttctacctggtattgtgaaaagaaaatttcattataagtctatcttttttaacaagaaggaaagaatgaaaccgaatggttaagagggatgattagatgtttgattacctcctttgacagagcttgcacttcggctgatgagttgctcccacctccaattccatgtgattttgcttgcttgggacctaggagttataattttcaatgaccttgagaaaatttggataggcaagcaataggataagagaagcaaattcaaaggcataccagctggtttgttggaaagta

SEQ ID NO: 6456 - DNA, 3004 bp, Arabidopsis thaliana landsberg
cttctgttaactgcaatatttaggtaacctagatggctaatgttcagaagatcggaaaggctgtttataaaggaccaagcgtagttaaagagatcatatatggaataacgctcggccttgcggttggagggctgtggaaaatgcatcattggaacaaccaaagacgaacgaaggagttctatgatttactcgagaagggagaaattagtgttgtcgtcgaagatgagtagtttgcgtgtacgtatctcggttttaatcttacattttatatatttgaatttggatacatcagtttaaagtgtgttgtgtgcttaactgaactgaattttgattgtgtaattgttttcctgatgtatgaaggaattgttatctttggaatcaagaaccaaaaggaatgtgtcttggcttgtgtgaggtatgatttcaaacgttttgtttgaatatattttagaacaaatgagagtctacaagatgtctttaatgggtagtgttttgttgatgaaggatatattgtaatcagtttgcaaaatctttgtttgtactgctaccggggtaattcacatgttgtatttccgcttagggaaattagtttactcaataattctatatgcaatcagatgacttttgtatacacctacctcaaaaaatggtgaaatatattctaggcaaaaaaatcattagattgaacgagtagtagaagattctgaagaagtataagaagcttgatcggttttgaccatcgtgttaaacgtcgtagtactattggtgctatgagatatagtactactgccctctaggtctgtagttagagagctaaccctcaagaagggaggactggttggagatggaatcgggtaatctctctcggttagcatacggatcacttcttccatcgacggtcttagcgacggagaagcttgtgtgcataacaatcccacacgaagaactttacaagcttcagcttcgctgccttgcacttgaagaaactcatcttttagacatgggtcaagagctttgaccagtctattcagtgtataaaggttccagacctagagagaagaaacaatggtggatttgagattcatatcaaccccaaaactttgataacaatgacggagttttgtagggattcttactctttgtaggaggtgacctgtctctggtacgaaagcattgattcttgttccacaagcaatctcgagaacaagaactccgaagctataaacgtctgctttctccgttaactgtcctctaacaacatactctggagccatgtaacctctgtataaagttacaaaactgagtttcaaatatttatctcgagcttgacacatgaaaattgggtagtgattcgaaccatttgggttctagtgtttttaagtagcttacagagttcctgcgatgccggtgctaagatgagttttgtccagaccaaaacatcgagccaaaccgaaatcagcgatcttaggattgagctggtcgtctagaagaacattactggttttgatgtcacgatgaataatcctcacgggagatccaccgtgtaggtaagccagtccctccgctgttccaaggattatgtttagcctctggctccagtttaagaccttgctttgactctcatctgaaaatcacaaagaaatcacttataagattctactctatttttaatacatttgttaatgttcttttttcttatcaatttagccctagagctttcaaaagttgttcaaatggtcttttctctttatgatagaaccgatcaaagtctattagcggaaacatcaaatagaatgcaatacaaaagcatagtctaacaattaatgaaacaatgcaatgctctagagatagactcaaggagaatttattaccaaagagaaattggtcgaggcttttgttaggcacgtactcatagaccaagagactctccggtccttcaatgctacaaccaagaagcttgacgaggttcttatgttggattccactaattagattcacttcgttgaagaattcttctacccagtctcttgtgttaaacactaatcttttcacagccacgttcttaccatttggaaggattcctaagaaaacggtgccatttcctccttgccctagcattttcttgtgactgaagtaatctgttgccttctctagagtctcgtacttgaacttcgtctttgagttgttgaattttctcgaaaccaaacctaagtttcttttttctgctcgtgaggaggtaaatcaaccagaagttaggcatacgcatttctgatagcgaatcggaatattaattatcatcatttaaacgaataaatattgtctaatcaaatattttggattgggtacggatataaagagatgaccgaaagtcgcaatcacatgcctataatttctaagctagaaaacgaatgtttcgatatatggattcaacattatcatcacatatgcatttaaatgtttaccttgtttagtctttgatacttttgtcataatgacatacgttgccaagaggatgagcatgacgaatgctgacgttgtcaagacaatagcaacgatgactcctttgttaaaaagcactaccaacaaaacaaacactacattattttggtttaatgcgtaaaaaagcctaaacatgaatttggattataatttgagtaaattagagattcgattattatttttcttctgtttctatattcttaagtaaccaaaaatgtagaaacacaaaaatagccgagtccaaaccaaaacaaaaataggagtaatggtcaaaatataaaaagtaaaattttcaatccacatatccaaaattgacacaaaaccaacatgatgaaataataagatgataaatcttaccatgaaatttatgatgtccatcaccattatagaatttatgatcagagtatctaagataacaccctgtattcatagctcttaaatctctcaaagaaacgcagcgtttcacttctttaacagctttctccaaacaaacccgacaatcttc

SEQ ID NO: 6457 - DNA, 633 bp, Arabidopsis thaliana landsberg
  unsure (1)..(633): unsure at all n locations
aaattgaaaggaaaaaaaacataacaacaaacaagtatacaaatgcgaacaaaacgctantattgtctagatataataaaactaccacagaaaaaaagatataagcaaaacttacgtaaagcaacatgaactcaaaattcctgcgagttgctgcaagcaaaacaagtcctcaaaacttcacaccatcaatgccaacaatattcctactactttagaaaaatatataccaaagaatagatgagttagaaaaaatatataccaaagaatagatgagttacttgtactcattcatcaaaattatatcaattttccatatttgcgtataacggttatattggaatatttttgtattttgtaaacactttttgatatcaatatatttgattttgatttgatggaataaaatttatcatgtgttgggaaaactttttgatattcatgataaaatattaataagatactaaacttttaacacttcaaaataagtatcatccagaacaaatcaaaatataaaaattctaaaataactttaattaaataagttgactcttggaatataatttttaaattttattgttacgaatttcacatcggaattgaatatgactnatagtgggaaccatgcaaaaagca

SEQ ID NO: 6458 - DNA, 1564 bp, Arabidopsis thaliana landsberg
aggggaacgcaccctgagggttaggccttggcccagacgcggttagattggttctaatggaccgggcttgtttgatagaccaatctagttcatcggcaggttgttgaacatggactgaattagcagaagatgagtggctatgtcttgagttggagtagtggatagtagatgagaccaagagttttttggcgacaaattttgtggagacgacaatgtcatagtcttggtcaggctggtccatggtgaccaagaccgagtaagactgtccaacgtgaatgtcgagagaggtatacatggactggactgtgtgtgttccctctacctcaacgagcttcatctgatgaccttggattctgaaatttagagtgtgttgaagccctacattcgatatcctaaatctgtatgttttacctgataattgttccacaacaaaaaataaatgatgagataatataatgcttttcttcgtaatcaaagtatttgagtgtttttaggatgaacctttgtggacggtgatggaagacatgtaactgactccttggccattgatcaaaaccccttgaggcaaaggtagcttgtgtcctctatccaaaattgccttcaaaacctgaataatgttacatttaattatggtccttgtataacaatgacaaatactaaaacgaacataatttgttaattcaagaaagaaataccttgtggtcatgcttaaaccaatcaccaatgaggaaggtgaaatctccagcgggttcagggaaagggacggggatgcgagggcggctgaggatacggaaaccgccaaaaccaccggcagctttgtgaacggcgagggaagggaaatagaagaaactaccgatctggtctttgacttggatggcataagtgtagtttttacccggtgggattggacaagtcgtcccatacactccatcttggtaagaattcttcctcagttgcactccgttccttcattagtatttaccattttgtattatattaattcattgatattatattaacatgaaaacttgacgtctcgccaccaatataatctctaacaagaatgtgaagaaacaacactagtgcatgcaaattggctccatcatgccatttaccaaactccaatatctatttcctctaatataactaatgaatgaaagaaaatggtagagaaggggagctagataaatggtaccaagataagagaaagggctcgtcgagatcgttgtgaacattgatgatcaaattgtcattggtgactgagtaaatatcgggtcctggatattgtccgtttatcaggattccctgcgtgtatgaatagaatataaagcatgcatgatcgagcaaacaaaaacagaaagcatcccgccatttttgtggatgttggaaaaaaaaaaaaatcccctttgaggaatgccaatgggagaaatgttgccataagtgactctcctgtcgtaaaaacggtagggatcatcagctcgaacaaaagaaatgatggacatcgtcatcatcatcatcgaccaaactgtgccatttagccaccaacacatactcgctttgacaa

SEQ ID NO: 6459 - DNA, 1796 bp, Arabidopsis thaliana landsberg
cgactgattttggatccgaatccaacgaaacttcagctaaaatatcttccatagcacggaccataattccacgatcagcgacatcttcttcccccagttgcccaagtgtatatgtcttaccagacaccagtctgaccataggccataattgttccattataaccatccaaaacaccctataccaaaaaagaaagactcaaattcatagaatgttttcaacaacaataaaaaaaactggatactgatgaaggtctagtacaacttctatatacctccacaacaggtttagccacaacttcgtaaactcgcttctgagaagcatactcggtaagcacttcatcaaactcaaatgtatcagtgtcccaattatttttccggagtttcaacctcttaagctaaagaatcaaacaagaaagtcacaaaattgagctctctccacatttcaaaaaccagactttagtatataaataacactgtacctctggttgtaactcaacacaatcagcaaaatctgcatcagcaatcaattcttcaccattacgtggccttaatctaacagctactcgaactcttccaggaacttcaaaaaaacaaaatcacaatcaacaacaataagaaaaccaatttataatctcaaacacatcaatcataaagtttctatctttggggagaaaaaaactaaacagtgaaaatttataggtaaaaaaaaagatgaacagaggatttttgtttttaccaccggcgtcgccaccgcctccagacttagagctaccaccaccaagtgcggcggggctgctttttctaaggactgacttggatttgacagaagctttctggccaccggaggaagtagaagcagaggactgagttctgagtgagcttctttgagttccatttctgtaactgacacctccggttcctgacgtcgttgacatttctcgacctcaaaaaacgcataaatccaaaaacgaccaaacaaattctctgggagagtatcaaaaaacaaagaagcttcttttgtgttccacaattttatgagttcccgagaaaattcctttaattttcttcattcacggcgtttaatttctcgggaagattgcaaaaatttagagaggagagagagagaaagagttgagtgaagtggagggaatcgtgtaagaaggcgtgacacagttaaaacttacatcaacttgtgtcctaactattttaccggtttgacataaatgccctttactggtcccgttatttaccccgtttggaccatctaccgtacgcttgttgttgttccgcgtgaatcatttcattattaatatgctattcgagcaaccctgtcacgagagatgtgaccattttaattgcttactatttgtagcaatctcatttttccaaaactcgtgtatgtgtttagtcataagatcgttagataactacaaatttgtttgaattcacaaaattttagtccttatcacatatgttgtgaaactgtaaaacacattttgtcgagatggactggtttgaactttgaatgagtttttatatattaaatttgaattcgtttctttaaagcataattataggaagatcaattaaaagaacaaaaggttttggactgagaaaaggcaataacaacaataaagggattcaagggcccatagaaaaagtatatttgtcaaatcgtcccaatgaaaagagttttcttttcaaatattttggccgaaccaaaaaaaaaggtgatagaatataaattaaaatataataggagaaaataggaaatcaattcattaacagcaatatgt

SEQ ID NO: 6460 - DNA, 1325 bp, Arabidopsis thaliana landsberg
  unsure (1)..(1325): unsure at all n locations
aagatatgcgatttccgctttatatgacattttcgctttcccttcttttgcaccgttgttatatttttgttacatatagaaatttaatagaatagtttaggtttgtaatcaaaatataccaatagtgatttgaaaagtgtaaaagagggatgaagaattgaaatagaataagtaaacagtaagagttaatttaccttatgatgatgtgttttcagactaattatcaagagttttatccgagttacttgtatcacaaatttttctatcgtgtgtgttggtaacttggtatgtagatataaaactgagctaatcaaagacaggtttctttcaacagaacctcgataagaatattcattttagttaagtactagttagtaaacgaagaataaaagcatgtcaatcttaaaaacaaaaagaggctaattattgtcttataaaaaatcaacatttcattgttaggtgtaagataaacaagcttactgattattttaacagatcggaaggtcttatcttttttactatgcaagtactcggaaaaaaggctgattttttcacaaatacaagaataattaataagggaaagagggtaacgtttccgttggttattgggtacaaaaagctttgatttgtctttggtatataaactgtaaataaactgtggacagtttacttgtgtatatgcaagttgttgttactggtgtaccctcttcttgattttagccatcttggtatcggtacttagctagtttgggtttccgactttccgggaacgtctacatcagatttcatgtcctcatcacttcagtgcggatgtcaaagtaagctcagcttccccctccctccatcccaaatggtcgaataacttaccatttgctatcttcacatgtttaccggaaaaaaaacttactatttgctctctggttatcgtcaaacacacgaaatctgtatgcgacgaataaaatcaaccatccgaaatacctaaaaactatatgagccagatattttatataataattatatgtcgtaatatcgtatattatagttacgcaatttgttaaatcttagtgaaacttgttcaattttatatagtaaaatatattttaaaaacttttacaggtatattaaatttatgttttattatatttccagctagattataattaaatgtaaaaatctaaatatttgtgaaatggagaaaagtaaaaatttatcatgacatttgtcttcatttcccttaatcttaatcttaacatagtaaaaatatctttctttaatttcttctatatataggattttactntaattatttttacaaaaatataata

SEQ ID NO: 6461 - DNA, 609 bp, Arabidopsis thaliana landsberg
acaagaaatagcttaattcgcttctttttgtttttaagattaaacatgcttttttcttagtttactaactagtacttgaataaaatgaatattcttatacaggctctgttgaaagaaacctagctcaattttatatctgcataccaagttaccaacacacacaatagaaaaccttgtgatacaagtaactcggataaaattcttgatacttagcctgaaaacacatcatgagaaggtaaattgactcttaatgtttacttattcaatatcaattcttcatccctgttttacacttttcaaatcactattagtatattttgattacaaacctaaactattctattaaatttctatatgtaacaaaaatataacaccggtgcaaatgaaggaaagcggaaatgtcatgtgaaaggaccgctaagttgagaagttagctcggataaataaagaatacaaagatcaaaagacactaggaataaagtgcactttcctctgtctgtttgaccctaaaaataggaatatgaaacaagcttgtgcgctgtaatgtttctatttgatggagtttcgactttggagaaggggaagacagatatctatcctcgaatatga

SEQ ID NO: 6462 - DNA, 573 bp, Arabidopsis thaliana landsberg
aggagtactatacggcttgagaatggcggttatatgcctcattttaatgcttaccacaatgtaggttgtgataaagaagttattactaggaaagcttttggtgaaataaattctaaccgaggagatgtcacggggatgtctgcgccttgcgtgttcttgccagagcgtactcagtccaacaactttaccggaggaggaggagattttgatagattcggaaaagtaaagtttctttgtagctttggtggtagaattatgccaagatccactgatgaaaaactgaaatacgttggaggagagacgcatattatttcgatacgcaagaatctttcgtgggaagaactcaagaagaagacctcagctatatgccaacagttgcattcaattaagtatcagcttccaggagatgagcttgactccttgatatcagtatcttcggatgaggatcttcagaatatgattgaagagtacaatggacttgaaaggcttgaaggttcacaacggccacgactgttcttgattcctattggagagcctgaaagaaaggctcagcagaactctcctgattgccaa

SEQ ID NO: 6463 - DNA, 1322 bp, Arabidopsis thaliana landsberg
aagcaaatcatcaatcactctctcgaatggtgttttactcgtcgtcatacaaaaacagcgaaatatcgcattgtcaaagttaagagggcttgcttttgtgacaccaaaaacaaaaaacaaaaagcgatgggtaagtacgttgggctttaaagataatgttgggctttattattgaggctcgaattgggctttcttctctgttttgcatttgttgcgttcgacctctgcttgaaatgctggtttggcaacattccggttagatctcttcggccgccggagatgatggccgccataagagcagcgattctgaagccgcaagactattattctcacctcaaaacagctcttttccattcgactcctatcttacaacgcaaacatcaatctgtcagtctctctcttttatgtttcctcttctgcaaattctcaatcgatgcttggattgtgcctctctttgaattgtgttggatcaatatcaccttattctcagagtttgatcttgtggataagtctcgttttgatttgacatcatcttctgacagaattcaaaagctcgaagcaaaaggtttggaagaaagaaggcaaagcaagatttgcgtcgtaatgtgaatgcttttgcacaacacttatttggggtaatgtcaagtctctgtttttgttttgtcgtaatgaaacatttcttttgtcaatgtaagaactaaaaagctttcaattttgatgcaatttttgtaatttggtttcccagatatggagtgatgggtttgattactctggtaagcacacctcatggtttgagaaacagtactctagggtttccaaaaggaatcggaatggtaaaacacacatccctcaacatttggataaaagtaagtaagacaactactcttctttgcctctgctttctcctcaatggttgaactatagttagtgtaactgcttctacaatgaaggaaggtttatagactgtgtagctaccaatgctagtgatatagtttatgttaaggaaaagtcaattaagtgaaatttaaaaggtgttgtttgttggtttcagtatttgcatgtagatattaatctccaacaatgctttcatttatgtaggatgttttgattttagcgaagttgatgagggataccaaattgagtactttttaaagactgcgttgggtggatcccgaggtttctcttggtcaaacactcgtgaggggggaactcgctcagggaggtactctaacaactttagaaaatcttggggttcaagatatcgcttagatgaagaagaagaagaagaagaagaagaatacgagtattcttcaacaggagtg

SEQ ID NO: 6464 - DNA, 574 bp, Arabidopsis thaliana landsberg
  unsure (1)..(574): unsure at all n locations
agacctagttgaggcctccgaccaacaaacaaattagcgacactgttcatagcagactgatcaacatccgtttcgcgaatcaaaccggtgacaaaaccgaaccggtttacaatcagttccgtaccgatgacctcatctgctctaagatgctccttagcaaacctctccaccataactcgaggcattctcgtgaccacgaccctcttcttacacgagctgaaaaccctccacgtgtccatgcttacgtcgtccatgtagaattttggcagaacggctctagccactgattcgatctccggttcacgtagaccaacagtggctacaaaaatcttgagcttgagagctgcgtttttgtagctgaaaacgtcaaggagtgtgattacgggccatagaaacaacaagatagcgaaacgaattagaccagctgcttcgaaggctacgagcatgaagtnagagaatgatnctgcgttcttcagtattgttccttcaaactctgacacgaccgatacgatgtcgttccagcttgctccataaccatttcttttgttttttgctcgaatattattttgactcg

SEQ ID NO: 6465 - DNA, 921 bp, Arabidopsis thaliana landsberg
  unsure (1)..(921): unsure at all n locations
tcctcctctcttctccaaccatcacttccctcaccgctccctccactttctctctgctaatgaagtctccaactacttgcatcatcttcttcactcccacactcactcctgttttcaacacttgtgtcaccaatttctcgttgtagaactgctcggctcccacgggccatgtcaccattggcaggcccgctgccaccccttctaataacgagttccatccacaatgcgtcaaaaatccgccaattgctttgtgctcaagtatcagcacttgtggcgcccaccctcggattatcaatccttttcccttggtcttctcttcaaacccctctggtaaccaatcttccttctcaactatttatatgtaatgcaaacgcaaaagttagagtttgaaacagtagaatcctaattagaccattggtttttctctaaaacaaaaacagaggattttgctgcaaagagagtgatgtctatggtaccttggctgccttttctgttaaccacccagacaaaatcatgtcctgacatatctaaaccagctgcaatctctatcagctgctcgtttttaaagctagacatggttccaaaggccatgtaaatcactgaatcacatttcttggagtcgagccatttcaaacattcatgctcatcaatgcttgcctttttgcctctttctgctttctcctcgaactttctatttcctaaggaaagcggaccgatatgccacgctcttttcgccacaaagctcttgaaataatnnnnnnnnnnnnnnnnnnnnncgtagaagctgttcaccaacacgccaaagctatctctctctgagtctcttattgccttcataaacctccccattacagactcttcttctgtctccatgacctgttcctctgtaatcaaaatgtctcccgggagatcaggaatcac

SEQ ID NO: 6466 - DNA, 587 bp, Arabidopsis thaliana landsberg
gatcctatcgaagctcatgttgtgttcttccctttcatggcttatggccacatgataccaactctagacatggctaagcttttctctagcagaggagccaaatctacaatcctcaccacacctctcaactccaagatcttccaaaaacccatcgaaagattcaagaacctgaatccgagtttcgaaatcgacatccagatcttcgatttcccttgcgtggatctcgggttaccagaaggatgcgaaaacgtcgatttcttcacctcaaacaacaatgatgatagacagtatctgaccttgaagttctttaagtcgacaaggtttttcaaagatcagcttgagaagctcctcgagacaacgagaccagactgtcttatcgccgacatgttcttcccctgggctacggaagctgctgagaagttcaatgtgccaagacttgtgttccacggtactggctacttttctttatgctctgaatattgcatcagagtgcataacccacaaaacatagtagcttcaaggtacgagccatttgtgattcctgatctcccggggaacatagtgataactcaagaacagatagcaga

SEQ ID NO: 6467 - DNA, 695 bp, Arabidopsis thaliana landsberg
agggctcagaacttgttgccacattcttagggagccttatgcaatgagaagcacataaagagaagtagcctgtgccgtggaacacaagtctcggtactccgaacttctcagcaactttagtggaccaagggaagaacatgttaccgacaagacagtctggtctcattgtcacgaggagctcctctagtggctcttcgaaatatttcattgcgagtaaaaacttttgactcaagtcacctatgtttaggtcaggtgtggagaagatgaaatcagtattctcacagccatcaggcaaaccaagctctgtgcaagggaaattaaggatctggatggtgatgtcttcgagtcccgggttgtcttggttgaatgatttgatgggtttctcgaagaagagcttggcattgagaggtgtagtgaggatagtggatttagctcctttggtggcaaagagcttagccatgtctagagttggtatcatatggccatgagccatgaaagggaagagcaagaaatggagcttagagacttcgacaggagttcccatgtttaactgatgagaaatcaagatcctggtttttgtagagctaatttgggaactcgtttcagaaagagataagaatgtgcttaggaggttgaagcaagaggcaaggtaagagagtgaagttagggagataacgcccgctttacatatacag

SEQ ID NO: 6468 - DNA, 1278 bp, Arabidopsis thaliana landsberg
  unsure (1)..(1278): unsure at all n locations
tcgcgaaactaccaaaacaactcctgagctcttcacttccgattccctatacttctttcataaactttcccatgtcggattctccatcggcatctatgatctgttcttcagttatcacaatgttcccagggagctcgggaatcacaaatggctcagagcttgaagccactctcttctgtggtttatgcactccgatgcaataaccagcgcataaagagaagtagccagtgccgtggaacacatgtcttggcacattgaacttcccagcagcttcagtagcccaggggaagaacatgtcggcgataagacagtctggtctcgttgtcccgaggagtttctcaagctggtctttgaaaaaccttgtcgagaaaaagaatttcacgatcatctcgtttttatcatcattgttgtttgaagtgaagaaatcaacgttttcacatccttctggtaaccccagctccacgcaagggaaatcgaagatctggatgtcgatttcgagacccggattcagattcttgaatgtgtcgatgggtttttggaggatcttggagttgagagatgtggtgaggattgtggatttggctcctctgctagagaaaagcttagccatgtctagagttggtatcatgtgaccataagccatgaaagggaagaacataacgtggagctttcgatgatgatgatcactacccatgattggctggttgaaaagaaaactagatgtttcgagaaatttgagaaaaataattaagagagacgaaagattctgaagttcgtagaaaatagtactatttttcctcgttgtatatataataatggttgcaagagtgtggagtatatataacgtataaagcaccaaaatttgggtttagatgattaatgggtaacggatactgacgtcgttgcatacgtctctagttttggtttctttggtactttctctcttaacgtgccagagtagtgtcagttttcaaggtcttttggaaccaaaaccttgtaacttgtaaactaatttccagattaataaatcatgtttaatttattatgaaaagaaaaagggagaagagaaaaaacataaggtatatatacaatcaagttaatccaaaacaaagtgtggttaattgaccaatataaaaaaaaatcacggccggattaatattattgtattaattataacaattattttgttttcctgactttnttaatcatgacacaacacatacacatacacaccgttaacatcaatacaaagcaatggggtacttgacttggtcaatg

SEQ ID NO: 6469 - DNA, 4020 bp, Arabidopsis thaliana landsberg
tttgccagattattactctcatagtcattacagctaccccaatgtcacaccctggtttttggttcttccagatatgcaagatcaaagatgaggaaacagtaaaagattatcataaccacaaagcctcacttctcaaatgaagaatgtggtggataatgtaccatatgccaaaggtagtctcttatgaaaacaagatatatagagatcataagcaaatgaaagctgtatttcttattttaaatcttcacttactatttgttgtcatgaagatgaatccttctatgctgacactgacttaagagatacatgtgaatatatttattcaagatttactaataagatctccaaaatcttatgttgttatgagcacgttgatagaaagagacaatcagatatttgtcatgatccagtgagtaaaatccatggaacctctgaacgtactgacccaccaaagtcctcgccatctttgggcttttcttgtgtgttcaattttgaatttttttgataattggtgatgcggataagtagaaaagatactgaggaccaacgcatcactgtattgacaggcaaagtcagattcaaacatgacttctctctcatgcaccattattacaattttgaagacttccaatgtcgatgtcgcaaggagaaggaagccctctcattgttttgttttcttctgcagaacaattctattgactctcctaaaccaataattcaaattcgaaaaaaggagaaaaagcctctcttgttgttttgttcttttaatactcctttaccaaaaacaattttaaattccttgataacatatttagcaactgtttttgcatcttaccccactatacaaacaaaaaaagctgtgttgccagctttggaccacatcacttaaaacagaggactttactaaataccctatcaactaaacttatcataaagcaaagtagtgtgattagtattgcttgttatggtttagttcaaacctctggcttctttccctctccctcaaagctagtcttggcgtttcaacagacagcctttcactgaacctatccgagccatcattcgttagctgaccgctgtaatgatccgcccagaacctcccgcttcggttgcctgcctctgaacctggagttgatgcgtagtttccatccattatcatatctccttccagtatacgcaacaccttcattatttaccagaagttttagtatcatcagaaacttaaactgaatgatcctgagactgagactgaagagtgatttcaagaagagcttctggttacctgagacatgcgtggcctcaaatgtggatctctacgtatgcacaacgaagctgcatgaagcatacaaatgacctcactttctacaaaacggttcccaagcctcggatcgataagttcatctatcgcatattcttccagtagaggacgtgcctgagatcacaagccacaaaaggagagtcagttctgttactttgctgaaaactaaagatatgaaatcattacccattcagtcaggcattgctggcctttcggcctggtgatatcaatggctttgcggccagtgactagctcaactagaacaaccccgaacgagtagacatcagctttttctgtgatttgcccgctttgagcatattcgggagctagatagctgcacaccaaccaagcaatttcttttagcaacagacaaattgttaagtttcaggagcaaaatgatagctttagtaggtgtctcacccgaaggttcctatcactcgtgtatctacacccatttccccatcaggctgccatcttgctagaccaaaatctccaacctgatgatattatcaaagttgactcaggacgaaaaagcatatgaaacagtggatatctgctgttacgatgaatgagcaagaccatatttatacataccagtggctcattatcatgagtgatgaggatgttgttaggacgcatgtctctgtggacaatacagccaactctgcactcttcgtgaagataccgaagacctcttgcagctccaacagcaatcttttgccgtgctggccattccagagtttccttttgacgacctagaaaagagcttgatactgagcaaacatttttcaccacaagagcttcaatggaaattttaagcaacatttttttttggataaaatatgaattagtattacccaaggcacatgtgaattttaagcaaatattaccgtatagatgagagtcaagtgaaccattgcaaatgtattcatagaccaagagccgtctgctgtcttcaatgcagaaaccaattagcataacgacgtttctgtgctgagcacagctgagaacttccacttcggagcaaaactctacatctccttgagaactggccaatttgtgttgctttactgcaactacctggccttctggtagcacaccccgatgaacagatccataaccaccctcagccaagaagttagcctgtgaaaacccacccgttgcaagctctaattcagcgtatgtaaatagccttgggggtttcccaaatactggcgccttgtgctggcaaattgaacagagaggaggtggaccaggaggagcacttcgagagagtgatattgcatctcttacgtttccactaaactctaaatccatccttcgactagacgacaacccaacttcaacatcaagtttagagaacttttcaagcaaagcctttgtagtggatatttgtgccctgtcatcatttttccataataagctttcttcggcctcctgggatgagtggcgatgggtgccaatatattctgatatccatggctggaatctcatactcgttgacgctaatgattggttttcactctctgtttcagagccagaatcatcaagaccatcattctccttgatcaccaatgctccatccttcttcatgtatccgttcattcccaatgtgaagaaaggtgaagttcccaggtcggagctcgacacagatgaagtcccggcttctgtacttgtgaacggtgtcccagctcagggctgctagtaggagtgacaggtagtcctctatcattatctaacaatcctttagtgttctttgagtgtttctcagatgctgcttctggtccagatggtaagggacactcttttccagcatctttcttaggagatccaacaaggtttaagcgtagaacttttgcctgcgaacgcttcatcaccacaatgttgcattgcaattcatccatacaccgtttctcttcctgcttgaggtgtctgcaaaacaaaccacacaacaccagtgtaaattggtgaaagtaaatataattgtgtaacccatcattaagagatttcaactttaaaatgttcacaaaactaaaggaaagtaacaggatatatatgaaagtagagattattacttgtccattactacccagttcgcttgcgctttcttcgactcagcagcaactgctccacagggtgatccagaaacaatcttaatcttgacatttatcttcaaagcaatcacaaagaacaacaaaagagcatgagaaacatgagatgatttcacgagatcatcatagctaaacatagatacataaagagctaaccttattcgggtcatagacatcatgaagctggagaatcatttgggaacaagtgtcagtgagatcacttttaatctccggtagtgcttcagaatgtgatttccgatgaccacttgcacaatccccagcaaacatagggaaactcttagtgaaaccccaaagttttcgtcctacaaattcatcagaaagcaaatgagataagaatcaaccaccacaacacaagaccagaacaaacaactaaagatcaacgaaacagacgcaggaaaagtaccggagttgtgagaagggacaacaacaataagggtaatgcaatccccaggctgaacaacatgagtcaaagcccaaatcaaggcagtcaaaagaatactccctagatgctttaacagcaacaataaccttttgagctccatcagatacaacaggcttttcctgtttccc

SEQ ID NO: 6470 - DNA, 1617 bp, Arabidopsis thaliana landsberg
gggcttggcacaaggctcctattggtgatgagattggtgagcatgttgaacgcaaagctatagttcgaagagtcattgatgagcgttcaggacacttgacgcttctcggtgggttttccaatgcgaaaaatgatttgaatcagtcctctgacgatgagcagccttttggaaagcgacgtcgcatatagctgagatgataaactaaagttatcgtgttaattgcatttgtttctgtggggtgtttttgtaagtctactgtttctgaatacaatgaagttaatttatcttatgaatatactgtgactgtgtgcgcaaattaatagggagctatttttaacttcgcttagaacatcaagggacttgtatgtcactaaatccttttgactttttcatgtttgctttgaagttcccttaattgaatcaatttgtctggttgttcttgacgaagatgagagtgtaacagactgtttgtttttgtttcttgtacaattgaatatcagattatatagaacacaaacactatgctacatttgatcttctttaaccttgttagatctaaatgtattaaaagtcaaatttgcttccgtaaatttatgtatatgtggaaatcttaagtcaaattctcaagttaatgtatcattgtactgagaatgtctcctttgtaatctcataacactagacgagtttaagtttgctgttttgtttctcctacatgaaaagaatatacaatccatcttctttatgactatatatatatatatgtctttacttaactcctccaaagtaaaacagagacacaaactgcttctatcatgaaaagcaggggaacaaatttatcttgcttcctcgctagaaatctctccatcagaatcaaataaagagactcgatcaggaaggcttccttcagcacagagtgtgtccaggtgctgaaaaaaatctctaattttaaccttcaaaattctgtggctcgttcaagctctttctattttctaggctacaataaaaagtccataatcaacaatactgactgaaatcagaaacaaaaactcacaaatgatacatagtcgctcgaataacacttgaatgaataaggggaaaagaaaagaaaaaaacaaatgtcaccgagggacaaaccttgtacctttccagccttcttacgaatatgcatcaattagttttttctcctagttaattaatccggtttagaaagtttctttttgattcttgtgtactcattacccttctctaacttctccaggtgcggaactagcagcaaccaaagatgatgtagcagcttctttatatatctgagccctcttgtgacttgaaaatagcatccttttctccaagcctctttgaactcgtggctgcatccaagaccggtggctttcaaattctccacggcaatgaagaccaatgacaagttcatttggcatgtcactccctccctgcatgtgatgttttgccttgttcagatacgttgtaaatagttggattaacctcttctccacattctccatttatctgctccaaacctgatcccctattactattagtaaaccgtttacttacctctatgcattttctttatccagcgtatgtttgttctgcattcca

SEQ ID NO: 6471 - DNA, 1933 bp, Arabidopsis thaliana landsberg
aaatgtgttgggcctaaataagctcaattaaaacgggccttttctcaagtacaccggtcaaaatcaaattttatccacaaggagtcgcttttggcttatccactgaaacaaagagactcgttggattcgtgaagccgaaaaaaaaaaaaaaatggtaattctcagcaacgtctcgttgttctcctgctgcaacatctctcagaaaccatctctcttttctccgtcttctcgtagttctcattgtcccattcgttgctcacagtcacaggtaacctccaaaattttttctccaacctcctctgaaccgctttgagaaagaagaaaaaaaacggttgtgataaagaaagagccaaatttgaatttagtagttgattacacttctagcttttgtttagtgaagattcgtaggaactgattcatgtttgatctttgtggtctatcttatgtagttatgttagaacatatgttcatgtttgtatgtatagttgatactagtattgttgatacattgagaagaaaactgattttgaggtaatgtttgacctagacaagatccagttttatatttccgttgagattcagacaatattcttttttgtgtttttctgtttttgggcaggaagggaaagaagtggttaccagtcctttgagaagtgtggtttggtcattaggagaagaggtttcaaagagaagtctatttgcacttgtctctgcttctctcttctttgttgatcctgctcttgcttttaaggtaaccttttgttctacttatctccttttaattctattcttgaatctgtagtgaaagtaaataaaggaacttacatatagtggtagtacacaattggtatagattataaaaggtcgaaactttaaagcaagtgatgatcagatcaccatagataagttattgtgagcaaacctttcgttttttatggaaattttatcatcctatctaaattggaaaccattgagtcttaagattaggcactttctttgttagcaactagaatgataagttgaaacagtttgccctgtagtttcactgtcaagctaatggtagtatggtactttgtttaccattgtatatatggcctccgaattattttaggtgtctgtagcaacaaagcttcttggaaatgttatcttagttcttgatggatttcatattctagtgactaagatatcataagatgttcttctctatagctcactttattttctggatttggatgaaaccgaaagggtggaggtccctatggtcaaggagtcaccaggggacaggacttatctggcaaagatttcagtggccagactcttatcaggcaggacttcaaaacggtaatacattatgcagttatagaaaggacttcaaaacggtatacattatgaagttatagattgttatatatcatcatgaacaccatattaatcatccttttatttgatggtattttcgccagtccatcctaaggcaagccaacttcaagggtgcaaagttgttaggtgctagcttctttgatgcagatctaacaggtttattttcttttctttattgaggtagtagaagaactgtaataatagagaccacttctcattcatggatgttaaactcttatcatggtgaatccaggtgctgatttatcggaagctgatctccgaggtgcagatttctccttggcaaatgtaacaaaggttgtattcgatgttacatatacgtgttgctatatgatcttaaatgtgtataaagctaatgataacaaaaagatctttgacattaatggcccataatagttaaaaatgctacatcttgcaggtgaatctaacgaacgctaacttagaaggagcgactgttactggaaacacatcattcaagggatcaaacattacaggcgcaggcgaaaaaagaaaagaaaactttcatgataacaat

SEQ ID NO: 6472 - DNA, 934 bp, Arabidopsis thaliana landsberg
  unsure (1)..(934): unsure at all n locations
ataacattttaaacaaagtctatacatcaataagctcctaaaacagaccttaacaaggataataagtgtttaaacagacccttacaaagataaataagtgtttagacagagtcttatacatcaataagctccttccaattcttgcctaaattcattcaacaacaacaacaacgaaatatcatattagagatacaacaagtaaatgctacaaagagaatacgtgaatcatattctttgagacatgattttattgactttgagacatatacgtgaatcatatacgttgattagaaatcagtgatatgcaagtaatgattttattgactttgagacatcaatgatatgcaagtaaatgctaaagtaaaccaattctagaccaataaagagaacacaaagattttgttaattctagtttaaagtggacagaataatgattcattgatgttaaaagcaaacacatttcatctatttatgaacaatgaagtaaaccagtccacaagattgatgaaagggtaccttaaaagcaagagaaggataaccaaagaagagagcaacagagacaaatgcaagtagacttctctttgaaaggagggtctttatgctctagtataagccggcaaacaaagcatcaagcatgagaacttccctttgttacacaacaatgagaatggtttagtctttagaatgtaagtctttagaaaccaatccattgcatcaaaatcaaatctaaagacactcattgtacaaaaactctttagaaaccaatccattgcatctaaatcaaagctaaaacgaaaactgagaagagaacaaaatttgattttcttaagggcaatgcanatctaaatcgaaataactccaatggccaatagagaacaaatgaagtttagaaaaaaaaccaccaagtnagagagtagctaaactagctgagaga

SEQ ID NO: 6473 - DNA, 600 bp, Arabidopsis thaliana landsberg
  unsure (1)..(600): unsure at all n locations
agacattaatagaaaatatgcacactcgttttagtttcttacatacccaaaccattgttcatctcattgataaatatgcaaacatatgcatgatgttcttttctctctagagtaagaatcaaactaatcttcaacgtctacaaatgaaagcatacactcactcttcgttagaaagaactactctttttgtgtcctatacttcaagggaaacattatattccaagcatcccatactaaagcagagagagtcttctaatatactcatctatctctatcagattttggccctgatgaaccagtgggtctcttgaaaacgtctacaaactccataactaaatcctcatgatcnnnnnnnnnnnnnnnnnnnnncaaggaaagataacaaagcaaattaaaccaaagaactaatcactagtttttaccaaattcaagcaacactttaaccaaattcaacactttaattgaaccaaagaactaatcactagttcttaccaaattcaacactttcatcnnnnnnnnnnnnnnnnnnnnnnnnnnnnnnnnnnnnnnnnnnnnnnnnnnacaagagtacacgttgattagaaatcaatgatatgcaag

SEQ ID NO: 6474 - DNA, 1621 bp, Arabidopsis thaliana landsberg
  unsure (1)..(1621): unsure at all n locations
aacgatcaagctgtgaaaagggtatttcgttacgtaatttccataagcgccacattatccaaaaaggtattcgtcgttgctccattttgttatttgtttaaaattttaacttttaaatcttaccaaacaaaaaaattgagagcatataaattcttttaaataagtttggttaaatagataatttatttatttaatttgaactgaatctcattttggaccaatataaacttccatcaaacaaaattaaacaacagagactaaattttgtctattaaaccaaaatagtggtttttnnnnnnnnnnnnnnnnnnnnnnnnnnatagttaagtcgacaaaaatgagggaagaaaccaacaatatttctaagtatgatccgagcgaactacaatccacaccgcccaatctattaacccggctgaccaataagaaaaaaaagaatttgttttctttttgaaccaagaaagaattcacatcacattattattgttgacttaaataatacttttaatgatttttcttaacgtgataaagagtgtatgcaaatttaaatggcttctcaatgcagaaaataatatcatcacgttgacaaattaagatagtataaatatattagattttgggacccctaatgaatacaatcatctaaccacaaatttattcatttcacttaaaaacttaattatagtaaccagatttagttattttcaaaagtaatcaagcggcaaaatcaaaattagaaggaccgtatttatattgctatggtagagaaatttctgcaataaggttatataaagatggataattccttgtttatagctaatgcttttattaacgaatgagatgcttaactcgcacacatcataccaaatctgccgatatatcctatgggagaggtaacttttcctgaccagtgactgttttcgtatttgataccgactcaaataacataccttctctccggctctccatggtgcattttattggtgacatttacccatatacttctttttattgtgcccattaaaaattctgctaatttgaacgttcgacttcgtgctatcatctcaaggtgttgtaagtaaagctcattggtcattgctacaaaatgaaaaatgtgttatatgggaactacggtttaacaatacaaaaatcaaaatcagaagatagggaacatcatccagaaatgaacgcatgcgaaatagagattatcaataaacaagcaacgtttcaaaaaattaacaaagggaaagtaagtatatagaaacaaccaaacaagatactagccagccaacgtcttataacttgccacttttgtaagatagaaactaccaccatgtagatgtattttctggacacaaaaggcatttcatttatttgaaatcaacccttaatagtacaccagccaaagtcttatatataactgccccacttttgttttctccagccaaaactccaatcaccttatcgcctgtaccgaagtcgtttaaagttgaagtatctcagcgtttatttcttcaagcaagcctttgctttatatctattgaggcgtttaagaaccgcttccctatactctaccactttggctgctccagagcgcagctgcgattcgatgtcaaactgc

SEQ ID NO: 6475 - DNA, 3030 bp, Arabidopsis thaliana landsberg
ttatgtcatcatccacaacaatgcgctggagcagctcgatcggattgtgctcatgagagattcttccgttgtcgcttaatggcaaaacatcaccaattacaacgcgagaagtatatcataacttttttttttttgtttttttttttatctcaagttttattgtgtttagttggagttatcgtttgatgagatttaggttaattagcatttgaattcattggttgatttgcttagcgaaattttgtagtttaatttgtcatttttacttattttaatggttaaatttaactctaaaattcagtataaatatttcaaatttactatgataagttaaatacggttttcaattttgaaaatatatgtataccatgtttctctgacattgccctataatattaactcattattaattgtcgaagttcatacgtagtacgtattcgatgtacctagtttaaacaacattgcacacagccgctaaccaagtgatggtggaatgtggtaaaaatatttgtttagcaactttaacattcttaatgagctcatttgaattattctaaatttatgagaggacttttgcgctagatctgacagcaaaagtttagttttttgaactttctccatttctaataacttatcttaaacataaaattttactagtcaaagttgttatggattgtatttttttttttttgttgataaaagttgttatgaattgttgtcatctagttatctttaatcacatggtcccttgaattgctaaaacgatgtttattacgccgctaaaacttatatcacaaataagatggattctttaaaaaaaaaagatggattattaaatatgcttgccttaaagttaaggaaattaaatttaaaagttagaaatcctaaaaacacatcaagatatatacaaaggcaaaggaaagctagctacctaacttaacatataatgtagataataaaaaccagtttcatggcagcacaatcgggaagaaaaatacgtaagatgtgagccaaataattgagatgataaaacgtcggtttagaaagaaaagaaaagaaaatcatctcccttctccaaagagggcggctcaaggtcaaggtcaaaagctaatgtgtttcaagaggccagtttagataaccacatagttttgttttcttttcttgtttctttaatttatctaatgcaccccttaatcaatcattttatcattaatcctcgtattatcatgtacttgacacagtcctaaccccacatggctatgggctacctatgtaataaagtattttctagatggtagagtgataaaatatacaaattggtacgacacttctttggctagtacgttgtacatcgacctgcaattaataatacaacgttaaactcgattaaattcttcatgtgaaaatcaaattgttgtgaggttctcaatgtagtactaacactctgtatgttttgttttataaaatgttttggatgaatgtgtggagattaaaaaaatgctttgagttatctctacatttgcttattaaacctcttcgaccaataacaagttaatattacgcaactagctattatacatctgatgttgcataaaaatcggaaaaaataaaaacatatttattaaacgaaattgaggcagtgtaacaggaattagcttataatttgcaacctgataagtttgatcgatggaaaaactctgaagtggtgagaaacataaaaactcatatttttaaacccgagtaaggacgatataattaataagagaatgtgtgcacagtaaagttgttggaccaaagaataaactacaactttggaccatataagaggtgtgttagagacaataataaaaaatatgaatggaatttgaatataatgaaaacaaattattataatacaatgctcttttttctccattattcaaacttttgacatgagcaaaaaaaaccgaaccttttgctttgctcaaaaaaatacaatttgttagccaaatccacgcattaaatcaccactcattagtcttcttggacgtggcgtgatgttgatatgtcgccctatttagttgcaggacttagcacttgggaagatccttaggcggcggcaaaatcgactgattgggtcctttgccgttctccaccaagaaagccatctttaatccccacgtcgtgtgtacctccaagtgacaatgcatgaaccaaacccctacattttacaacatattaatccatcagttttattataatagtatttgacttactaccacaagattttatttgtcttttttgatagcatggagattgcaagtctagtcataaagtaataaccaaagagatattgatctatgacctaaatctacatggcgataattaattaacccactaaatcttttgattaactttttcttaaccaaaaattagtgtgcgtaccgggattatctgctctgaatctgatgacgacccatccaccggatggaactccgattgtgttcctctcaaccggatctaccaaattgaagttttttgggtctttcgtggagttgaagttacctaatccacgaccgacttcaaaaaagttaaaaccgtgaagatgtactggatggttctctggcgctatgacgccggtatcttgaaggacaagctgaacagtggcgttatacggtagcttgtagagccttgtgccggtttctgtggccatgttcgtgactgatcctccgctgtagttgaaaacgtgtggtggattcttgggaaagtctgtcgtgaaaactccacttgtgttgaagtaatgagccgggagcaaagcggttttaggcataatgaaggttacattgttgatgctagccacgacacggcttccgtttccggccttgcaagtagggcatgcgtttagcccaaggccgacggtgaagaagaggtggtggtcgatggtggtcgggacaagagcagggtacttcttggagttgagactacgaagagagtttgtgaagttgttggctatggaagtagcgttttgcgggggaggaagggttaggattg

SEQ ID NO: 6476 - DNA, 2558 bp, Arabidopsis thaliana landsberg
cctgcttcctcctttgtccaatgctcaaagatgtctctcttccattgaattaaaaatgattttgttaccagcaagccaattctggtttatgaatgaatcaagaattagcaaacagaaccaactttgagttcatcatcccatctttgccgacctcaggacgacaattaaagcccacatgatcattcttgtttttccaaaacctccatctttatagtcttcaataaagtcttttctctccctgtttcacattagagatttagaatcagcacctccagactaacagaagataaaacaaagtacagcctgaatcatggccttacagtcgaaagtagcccagctcgacggtggtgctatggtggttcttctattctggtttacttcactggagaaattctcattcttttgatttggtttcttgaattctggtagaggtacaacatatacattctccttcatatctaccgaaccctgcattgcacaacagtttatggaaatgattcaaaatccttctacaaaagctttgttaattcttgccactggacaaacaaggaaactgaatgaatttccaatctagtgatcataccagaacccaaaaagatatagatttgttgtcataccgcacgagttctcgtttctggaggtgttacttgaagaacatgatgaagaaggatctcttcgtcaagtgaaagagttctagctttctttggagtttcaggtttatatccactctctaccaagtgactaactttgcagcttagctggctaactataggagccggttgaatcgctcccggtgaaacccatctcttctcactgtatctaaaacacacacgaacagaagaaaaaaagattcaagctaaagttgtgttgtagcagatgaggaagcaaaagcgaacatagaaaagaatcaatacttggctcttataaacgtgtcgcttgaacttctctcgaaatgttgaggcaattctgattcccaatactcatttcccttagcattaccggtagctagaccgagaataagatgatcaagctatgggattgatacaaaattcaactactgaatgtgttcattatatacaaaagaggagcttacatttcatgaaagcaacctgatctggaagccatgtatccagagttatagaccttacctgtgtccaaaattcatcagtatccctaatttgtatgatccatttacaacacaatcaattaaaagagagattatttagggacctgagagatgtggacgccaaggctacgatggattccagaacattgcatacaaatgaatatcccaaggttcacacttgcccatcttggtgccctgtaaaatagatagatccaaacaacacaatgctcctaaatcgtttttgttacatgatcatgaaagagataatgttatcaagatgcttactttgatctacaatctgcacattctcgattgtctggatgcttcaaaagtgcttccaatatctataacccacacaaaatctctaacctttcaactttccagacgcaaaaccaatggtgaaaaatcgaaaaggaggagaaaaaaagatgggacctttgaatgcttggcgttgagctccttggaaacagaggccttcctgttcattctgatgaagatgaatcagagaatgagagagaaacagaggcaattgaaaaatcaaaccaagtttgtaaacagagagccaaaatggtttcaaggaagaacggatttgaaggagagaaggagagaaaagaaatgacggtttctcgtacccttttatatctgtcactgcgacgcattatctctctatttttaatccaacatggagtcaaagcaaagcaataaattcaaatccctagctctcgaaaacccgacttgatcactatgctcatacgaagattccttcgataacccaattgaaagaatcgttttttcatcccttctcggtgctaatcgctcctatcaccggcgtcacaatcggcgaatcaccaaaaacccctacttaccttcattttcctcagctcaggttagcatcttctctcgtctgaacctaaagggttacagcaaaaatctatttttgtgttcttaccccacgtaagtctgcggttttaaactgttttgacaatcatcaatcagagccctttcatatttaaaatctttatatacgagttacattcaaaatcgtcataaaggtaaaagaacaatttgagcatcattacactttcacatggttgagatgttgttacttatttgagttttaaatggatcctttcaggaagttgtcgacctttgaattggttgcagaagagagaaacttcatgcaaacaggaggattaactccggctatagcgagcacggagctcggcaaagaccaaatgccatctccgcatatcaaaccagaagccaccgctgtcccaaaagcttcagccttggctgcatctactctttcccagataaaaagtatcaaacttcccacacacatgtcaattgcgaagtaaggtcccaagaaaaacggtatagccattgccatgggaagtggaatgaaccttccccaattcctatggagcctatc

SEQ ID NO: 6477 - DNA, 949 bp, Arabidopsis thaliana landsberg
taggaggtttaactccagctatagcaagcactgaacttggcaaagtccagattccatctccacatatcaaaccagaagccactgctgttgcaaatgcttcagcctttggcgcatctaacctctcccagacaaacaaaataaaactccccacgcacatgtcaattgcaaagtaaggccccaagaaaaacggtatagccattgccatgggaagaggaacaaaccttccccacctgttaccaagacaatcttttattaagttaatgagtatggccacaccgaaaaacacgtagcacagcataagacagtctcttggtagagacgagacgccttcaaccccgagtttagccatacttcggtacacagtagcaaacggagcagggtattcactgtttggtagaccaagatcatcaaacgccttgtagaaaagccagaatacgcagggtgaaaccaagcagcccatagctgttccaattacctggctcacaaacatggctcttggagatgacaatgttaggtaaccagttttgaaatcctgcgtcaggtctgaagctgtcgatactatattcatcatgactccacaagccgctaagcctgccagaagacctccatgatccgaaccagcccatgctccaattgtaaatatggcaagctttccataggttgatgctagcgaccaatcagtgagcccggctccgtaagcattgcagaaagctaagataggagcaaagatatagatgactataatgtagtaccatctcagctgagagaacatgtgaggaagtatagctgtagacactgcagatataaccacatagcctccaacagcaaaccaagacggtatttgatccttgaggaagaatcttgttcgacgttgctcatcataagatatccttggggtcaataggaaagcaggggaagcaggagggtcttctttgtgtgcaagagagct

SEQ ID NO: 6478 - DNA, 897 bp, Arabidopsis thaliana landsberg
tgataattttcatttcatttcaatcatttaatggattcgtcgattcggaatctgtcattttcttcacttgatggaacattatatgtgagatacagaaatttatgagctaatgttgtctcaaagattttgataccaccagcgaagaaaattgactcttcaggtaatcacgccggtttatgaggacatgtggccctctaattgcctacggaagcaagtgaaatatttgacatttaacgaataatatttctattttatttgtaactgttgcgtgtcttctaaggtactttgatcagaagaagagtaaccaattcacgtgaaccgactccatgaagtaagtagcttgtgattgagattgaacaataattcaaatttatgaaacaaaaactaaggttcaattcaatacttattcattcatctccaatattattacaaatgtaacaaataaatacacagcgagcaaaacagagttcgattttcgaacaccattttcgctcaccatcttcaatttcgattccacaaatggaattccaaaaaaaatcaaatcaattaaacaagaatattaacataatttaataaactcaataaaaatgagagcttgatgaaccttttttgtcagaagactagttattattggcatgctttacgaagaagctctaacaaagatatggctttccttttgcctctctctgttccattcttcgatagatccatcaacgggacaaccgcaccgagtctaccgatagtgatcagtttctcagtgtctcttttacacagcgaaagcaatatcgctgctgcgttctctcggtttctagtttgatccgtttggagaatacctatcaacgcgggtagagtattcgcttttactatcgcggatttcgcgtcttgattatttgcaag

SEQ ID NO: 6479 - DNA, 3264 bp, Arabidopsis thaliana landsberg
tcttgtgtttctcgaccaacccccgatcattgcctaaacctttgtttcatacattgtgttcttgatcccagaccttatcgtttgcgtgattctcaagtgcttttctttgcgagctaaaacagagtgtttcctctcatgctctgttccggttttgcttcacgttcatgcttgttggggtttggtgttgaagtctggtttgggaatcagagaagcttcccaagcaacttcgctttcattttgggttaatgttgtcttgttgagtatttacgttaaattatcgccttcttgcgccaaaacatggaccgggttctccccagaggctcttgagaacgttatggtgtttctttggtcttccatctgcattcatggtttggttagactggtggtacacatatatgattcatgtcttcttgtatatatcatatctttaatgttgatcatatcttgatggaatcataacgatttggtcatacaagaaaatggtcttcctctcagtctcaggctttacttccaaaatcctgttttggaaacttcagttttccccacttggtaaacacactcttttgtaactttctgtacattagtactaaaatcctcaatactttctcggaaattgccttaatctctgtaatatgtagcaataatggtgcctctcctcatagtttccaatctcctcataggttatgtaatcataacaacttttggtgaagaaagctaaaggagagttttgctagtaataccggagacagagtctgaggtggtctcctgactcgatggagaatagaataagagaagagcaactaggagccactcacgtcattgtctatataatcggaagctttgaatataaaaaaaaatgcgtggttgtgaattgtgagcatctttcaattgttgttgtcatttaataaaacaaaatataatctgcctcagggggaagtagaaaagaaattaatttctatttaccacataattaaaagatttcattccttaaaaaatgcataaatatcaacgacggctccacaaaccctaaagactaggaacaaagagagagatagtttgttgttattctatttctcttagtttttttttgacatatttttttgggagaaacagagagaaaatggaagatggtgtgacgcctccgcttctgatcacagagaaagacacgacgatgattcgtgtgaaggaggaggtgaagaagcagctatggctttctgctccactcattggtgttagccttcttcaatactctctccaagtcatctccgtcatgttcgttggccatcttggctctcttcctctctctgccgcctctatcgccacctcctttgcctccgttaccggcttcaccttcctcgtacgtttcttcgtcccatctctcacgatccagtcaaaaaaaaaaaaagagtgcattcaataacataaccttagttatcctctgttttgtaactttgttcaaagtttgtgtgtatgtgaaacagttgggaacagcaagtgcattggagacactatgtggccaagcttacggagcaaaactatatggaaaattgggaattcaaatgcagagagcaatgtttgtacttcttatactctctgttcctctctcaatcatttgggctaacacagaacagattctcgtattggtccatcaagacaagtccattgcaagtgttgctggctcctacgctaaatacatgatcccgagcctcttcgcctacggactgcttcaatgtatcaacaggttcttgcaagcgcagaacaatgtgttccctgtctttgtctgctctggtatcactacatgtcttcatttgcttctctgttggttgtttgtgttgaagactggtttaggatacagaggagctgctcttgctatttcggtctcttactggttcaacgtcattctcctctcgtgttatgtcaagttttcgccttcttgctcgcatagttggaccgggttttcgaaagaggcttttcaagaactttatgatttctctaaaattgcttttccttcagcagtcatggtctggtaagtcatcaaacataaaatgctgcattgttcaggttccagtatctgcattttaatcaaattctgtttgaaacagtttggagctttggtccttcgagcttctggttcttgcctcaggccttcttcctaacccggttttagaaacttcggtgctttcaatctggtagatttcggttatctttgtcttatggtactcagagtttgtgtacttcttctttatatttgatcaacctcatttctgcaacttttcagtctaaatacttccctaacaatctggcagatttcggttggtcttggtggcgctgcaaggtcagtaacaaaatgtatccaagagctcataaaaagaaaatctcatcaaaccaacctatctcactttgtgtgtttctgttaacttgcagcataagggtctcaaacgagttaggagcagggaatccacaagtggcaaaactggctgtatatgtcattgtaggcatagcagtagccgagggaattgtggttgtaacagttttgttgtcgattcggaagatcttaggtcatgcttttagcagcgacccgaaaatcatcgcatatgccgcatcaatgatacccgattgttgcatgtggaaacttccttgatggcttacaatgcgtactctcaggttttgaatgatagaagattggctttggttccttgtttatatatgtccggttcgaatcctggtcaaatagttttgatttatggttgcaggggttgctagaggatgtggatggcagaaaattggagcatgtgtgaatcttggatcatattatcttgttggagttccattaggattgttacttggtttccatttccacattggtggtcgggtaataatcttaaactctccttctcattctcaagttcaaacacaagactagttttatagaaacttttattttgtggtattttcatattgtaggggctttggctgggaatcgtaacagcattgtctgttcaagtgttgtgtctttccttagtcactatattcacaaactgggataaagaggtaaaaccttttaactgatcggctcagttttatatgtataataactctgccataatgtgattctgtttcttgttttacatgattaggcaaagaaagctacgaacagagtcggatcttcagatgacaaagatggtgacgtccaatgatcaataaacgtcctgaggaaaaagcagttgcaaatgagcttaatgagtgctttattcttgtaggccc

SEQ ID NO: 6480 - DNA, 515 bp, Arabidopsis thaliana landsberg
  unsure (1)..(515): unsure at all n locations
ctcacccaacagaggannnnnnnnnnnnnnnnnnnnnnnnnnnnnnggttatcattgacacatgttttgtagtcttcaaacttcaagacaaaacaaaaagaaaagaaataagtaaagtttgctatggtgacaaaacttgaaacagtagaacatattaaaaatgagcttttataaaagtttttattggccccttacggtagaaggccttcctctgttggttcccatgtgtctgtgatgtctgtggatccaatagatgtgttctgatgaagatcagggattcttctctgcaatacatattaaaaagggacattttcaaacacccatctgaacaacacttcgtgaattggacagggcaaatttccaaaaaaatacctttatcagttctacaatgtgtacagtcttgttgattagttatcccattggtcttgattactacttctgtttgaccatttttctcttttcatacaaaccaaatttttaattttatttgttaattaaaaaacaaaatttatgtt

SEQ ID NO: 6481 - DNA, 2789 bp, Arabidopsis thaliana landsberg
  unsure (1)..(2789): unsure at all n locations
cttctcaaatatttgatggtgtagccaaactccgtataagtctttgaatttacatctctaacaaggaaacacttttttggcttttatgatttggttgcggttctagttcttatnaaaagagttcttgttagctattgaagatgggcaaaatcccttggttttaaaatgttaaaaacaggaaccttagttgtttaagaaatccaaatccgctaaatgtatcaaagtgttgagaaagcttctcctagagttaagagaaaagaaaataatgattagaaaaaaaggcttaaaagattcattaatgcaaagggtagagttaagttcttatattgggattgaagatgaggttaccattagagcttcatttgatatactctgggtagatgggatcgtatctctgtatgcatagcttgggacttacctttagcattctactaaagcttaatcattttttgagagatcccctgttattgaagcctattctgtaagggaccatctttgtctcttgaccttttaccttagccaaatgagttcattgatgatgcattgcttgattcacattctagaactaatgaatgttaaagggattggtagatttgaaaacttgtgttggtcgagcatatgagtcggattgattgatgatgaggtatggctaacgtttttaagtagaattcaatcttgcagcttagaactttcaacttggacattgatttcatctggtttatctggtgctttggctttgagtccccgctttcaaacctcacctccagcatgttcttgattgtttgcttgagggtaagcaaaaactaagtttggggagttgataagtgtgtattttacatgttttgagcatccatttgtcatcactttagcatcatatcatcactgttttataccatttctcatcatttgtcatcactttacatgtttacgataggtttgcatgcatgttgcatatttgtgttgatttcaggtgatttggagctgttgacgagctaactggaagaagcggacctgatcatgacaaaccactcgacccaaaggtcgggtaggagcttcaagatctcaagagatcactcgacccccaggtcgagtagatggcatcaccacttcacctcaccactcgaccacgaggtcgagcgtcttcatctccatcacctgaccatcactcgatcacatcactcgaccctgaggtcgagtgtcttcagcaccattacctgatcatcactcaaccatatcactctacctggaagtcgagtatcaccttcaccaccactcgactacaccctcgatagcaagcttcagagtcttcttcattccgcactcaaccagacactcgagcacgaggaagaaaagaagactccagctattcactcgacatcccactcgaccacctgggtcgagtacagttcttaatccgtcccaatacttcgtcgttttaagtattagggtttcagaatatttggctataagtagcatgtacttcacattttcgcaaacaagtttttatctagttttatttcacagaccttgtgttctaaaccttttgtaatccggatttctctttatctattcagtattcagtattcagtttctgttcttgatttcgtttactattgttcattctgttatcatcatgctgttacactgctgttatcaagtttttaatttgttcaacgtttatgctttctgttatgatgtctgagtagtgaataggtttctgaggatgggttagagtagtgtcaggattcttagtatgctaggtgattgagtattgattgactagatcccttctgattaagctgttcttaatgtctattgctttctgatcaactggaatttgagcctagacatttccgcgcccaaaaggtgttcgatgaaatgtctgaaccactaattacagagattcgtgaccctataccaaggtattggttgcagggagcgttttggctttaacttgttgattcgtaatgcttgttaggttagctctcgtcaatggtgattgagtctgggactaggttagtttgagaatctctgttgcggtggcacttagatttggttaatgaacttgttgtctagggttaatttattgagcatgtcaatcacctgtaaactgaggaaacgaaactactcaattaccccatcattaggaattctttgtctgattgattttattgtttactgcatcctgtcatctgttgcttagtttatgcaattctttactgttactcgaccttgtactcgaccacccagttgtctggcaacagactgtgcagtcgagtatccctgtttcattttctgtctgttactcgacctgtcactcgacctcacccagtgctctgcaaagagctgtgttggtcgagtgtttcaatgtttctgtttgattttcttttttcttcatgttcatttaggactactagaacacaccaaaacctgttatgcttagcttgacttagtgacttctgatcacatcttgattgttagcatcacacccatttggattgacaacctaaaatactacaacgacatgattggtgttttaggataattgacttaaaagcctactatcaatttggcgccgttgccaattgggtgtttgtttgttacatttaagatttcaaacttgcttagatcaagttcttttttaatcttctttttagttactaactgtgtgtttttcttgttgtcttcttgatccaggtacacctctactgtatgcgaactcgatcaacaggcaaccagaacctccttttcaacgacaacaacaaccgcacagcccgggaaatcagaaa

SEQ ID NO: 6482 - DNA, 548 bp, Arabidopsis thaliana landsberg
  unsure (1)..(548): unsure at all n locations
acccattttatcccccaaagctagtaactcctgcaagtttgtatttttatggttttagctttcatagactgggtgagtgggtgactgttaagctacaatagtccaaggaccaagaagtaaaacatgcaagactgacctcatatgacatgttatcgatgtcaagcctcatatctctatgctgatcgtagaatctgaacataccacttgagaatagattggtctctatagaagccagttgctatgggaaaagaagcagaacagaaattagcatcgtcaggaaaaccataagctcagacaaaacttgttcatatcaaaataccaagctgctttatacctcatatgtaagctcttcatcatgttcaatcctttccagggccaacaatacctgaaacatttttaaaatagtattttgttatcaaaattcacgaccactcgggaacaacatatcaatgacttcagacaaaatggtgatggaaaatacctctgcaattccattcatgttgtagtgactcaaaccatcccggttcnccaaagagctcggagggtca

SEQ ID NO: 6483 - DNA, 1488 bp, Arabidopsis thaliana landsberg
aataatatgtttgtgcctttttctgccaatctgttggagtcttttggctcaagaggttcccagtcaacaaacgagtccactaacaaaagtagacatcatccacaactgctaagattagaatcccagtgggatgagaatcatcttagtggaaatgatgaagctggagtaaagaagattaagcgacttgaaaacgacgcccttgggcgctttagcagacttgtattgcgagagagggatttgggggatgaggcatggttagatagtataatatgggactcagagaaagagttgagcagatctaaactaatttttgatcttcaagatgagcaaatggtctttgaaattttcgataacgaggaaagcaaaaatcttcaacttcatgctggagctatgattgtatcccggtcttcaaaatccaaggatgaaacctttcaagaaggctgtgaatcaaattctgggtggcaatttaatctttccaatgacaagttttatatgaatgggaaaagctctcagcaactgcaggcaaatactaataaatccagtgttcatagtttgagagtttttcattcagtaccagcgattaaactgcagacgatgaagagtaaattgagcaagtaagtggtcactcgcatatcgtttttatttccactcttttgtgtcctctaaaatgtttccacacttcaaatgcaattatgtgcttttctacatccattttagtagtttctattaaaatgtgttgagttaactcgttgcagtaaagacatagcaaattttcaccggcccaaagctttatggtatccacatgacaatgagctagccattaaacagcaaggaaagttaccgacccgaggatccatgaaaattatagttaagagcctggggggtaaaggaagcaagctacacgttggcatagaggaatctgtctcttctttaagagccaaggcttctagaaagctaggttgttgttctattttcagttttttctactgcattatgacatagattctatttggagaacacacttttttaatggtttcacagaaatatcttgaagctcacttgctacaattgttttgcagattttaaggaaacagaagcagtgaagatgttctataagggaaaggaacttgacgatgaaaagtctcttgctgcacaaaatgttcaaccaaattccttggttcatcttatacgtactaaagtacatctgtggccatgggcacagaagctacctggcgaaaataaatctttgagacctcctggggcattcaaaaagaaatctgacctatctactaaagatggccatgttttcttgatggagtaagatgaccttctatttgagagtcaaattggaaactttgtttagtttttttatgcatgttactttgtggatcttgcggttattttgatctaggaaaagacatttattggacgtctctcttttattgcattgatctccgtaggtactgcgaggagaggccgctgatgctc

SEQ ID NO: 6484 - DNA, 849 bp, Arabidopsis thaliana landsberg
caagatgagcaaatgatctttgaagttccgaacaataaggaaagaaaatatcttcaacttcatgctggatctaggattgtatctcgatcttcaaaatccaaggacggatcctttcaagaaggctgtggatcgaattctgggtggcaattcaatatttctaatgacaaattctatatgaatgggaaaagcgctcagaaactgcaaggaaatgctaagaaatctaccgtacacagtttgagagttttccattcggcaccagcgattaaattgcagacgatgaagatcgaattgagcaagtaagtgagtcatttgaatttttacatcttattgtatttgtacgcttcattgttacattcgtgtgtggtctcaatgttgccactggatatattttttaaatacatttttttagtggtttatgttaaaaagttttgatttaactcattgcagtaaagagagagcaaattttcaccggcccaaagctctgtggtatccacatgacaatgagctagccataaagcagcaaaaaattttacccacccaaggttccatgacaattgttgttaagagtctggggggtaaaggatcactgctaaccgtcggcagagaggaatctgtctcttctttaaaagccaaggcttctagaaagctaggttgtttgttttcctttcattttttgtctaccccattatgacatggattctatttggagaacatgctgtactattcacttgcaaatcttagagctcatttgctacaattgtgttgcagattttaaggaaacagaagcagtgaagatgttttatatggggaaggaacttgaggatgaaaagtctcttgctgaacaaatgt

SEQ ID NO: 6485 - DNA, 1351 bp, Arabidopsis thaliana landsberg
cgatctgagccgtatatgcggtgcgctgaagagacgtttcatctcggccgtccacgttgatagctatttaccttgcgtatctactcaatatctttcggttcgggaatctgaaattaaatcatttctattgagtttatcctcaaaatcgattgatcttatcatatctaccatttcatctataatattttcgcaatcttacctgacttagatgtccggtcatcgagttcgcctactcactcaatgggctggggggcaaatgttgaagctggatttccctccaagaatccacctgcgaaaataccaggccagcccactaagcccaccaagcccaccaagtagagaacctgcacaactgatgagcccacgtacgcaaatgggtacttgggcctgataagcccggtcacctgataaagggagataagcgaataacaacctacaaactaacacagatatatttgcggagcgtacctgatatctcggaactgacctgccgaatatccaggaggatctccgcagatcccggacggagcaaccacgtgcgtagacctatataagggagcaaggacgacttggaagggacattcaatctaattcacattggcacacacacacttttacacttgtaatctcttttctcaatgtaaaagctttgtcaaaatcaatacaaaagtccattcgttcttagcaatataactctcaaggtttcagtgaagatctagccctcctttctcataatcttaagtacaaatctctattgtggatccgcgaaggcctgtagttagtcatgtctagtctctcagcaacagacttaggcatgtggttgatacttgatcccagatcacaaaaagagcaagtgaacctgcttgtggagatagagcaatcaagaacgaagctacctggatccggaagcttctcagtggtctgatcaagagtaatggtgcggatgtagtcagcaatgtccactctctgtgccttttctttccttaccgtaggcagcatgattgcactgatgtccctggtcagcagtttagcttcatctaagctaataccattgtcaacaagtcgcttgacatacctgttgagtggaacaaaagatgtctcagaagcatccttagggagagaagggaggatcttttccatgataactgtgcacttagcagcatgaatctcttgcctagagcgacgcttcctcggataagggacatgaggagtgtaggcagactctggcttcatagggattctcacctcatatggtgcagtccggacccagtgtcgatcgacaccctcgtgaggaaccgtttttgaaaacagtgttccatatggtgtcgatcgacactggtaggtgtcgttg

SEQ ID NO: 6486 - DNA, 3979 bp, Arabidopsis thaliana landsberg
ccgtacctacctccgtgctttctcttggctctcttcataaggaatcagtaaaagggtcttcgactttaattccgctctctttcaacaagtcagctttgtttaataatccctatgctccatattcttgcaatgttcgaaaggcagggtgttagctcctgaccatagaaaaacaaataccagtggatatatagacaatgcatgagttctctgacttcaagtaaatggtcacagaaactaggagaaagaatattacttgttcttctaggttttgctcaattttctgtttccacgttgaaacacgggcagccagatctgtttgcttctcacttttagctatgttagcgagaagagcatcctacaatataaagaaccaaacatttgagcttccataagaatatagagcaaaaacctaatgcggtctactgaaaattggaacaactgtacttccaacgtataaaatcaaaccaatggtagttaccaggtgtgagcggcagagatcttccaagctttcttgacaatttgattcgccgttttcaaatccatcgtagttgtgaaactcagcagctccaccatcattctgcattcaaattcaaatgagcggataagggtttcacatatttcgaccaaaatagatcaattagtgaaactactcaccatattgagaacatcttcatccatgaacggatgttctgcatcatcaccatcatgctccccaaaatcatggaagtcgccattattggcttcatcatggttatccttgtcattgtcattgtaattgccgttagcaccacaaggttggtttcctccattcacaagcatctctcgaagctgacatccaaactatcagttttttttgtttgttgcatttcaatattatataaaaggtatagagaaacacagaccttctcgtaataagggatgtcttgtgatgcttgctcgtctttactagcacaaccgtgcattttccaaatttcaataagctctgaactgatgggaccgtttggtctagcgagagggaacatggaagtcatatggtccttggtaatgctccatccaatcttttttaaattttttactgcaaatggaataaagtagaacatgaactagaagtaagatgcaaatcgaaagatatagcttcagatattaatcaagaaaacaatagccatttcccaaccttttttgaaaggcttcactttcaacttccctggttcatagggattcaatggcttccacggatcatcttcgtcagcatctgtatcactaaaatccatggctcctccatattcattatccatgtcaaaaccatgatcattgtcttcaaaaacaggaggctgagacccttggtcacaattttgatcattgggaccattgccacatattggggacaagttgacattggtgccctgattctttcccacagatgacttacgagcacttcctccagaacgtccaacagatgagtgaaagcttttacgaactgagctgcctctgtgggcactgttccttcctttaccaccatagttatcacctaaaaattcattcaccgctacagcatcacatgggtctaatagtataaaatcccggtagagatgtgtagttgccaactgcaagagatgaaagttaaaacggagttcaagccccaagctctttctgtttttcatactctaagaagtggaaaaacatgctataccagataggattccaattctcctccgtcaccactagtatccaaacagtcaccttcaagaacaactagattcgctggaggcttgacaaattgacttggacaagtatctccgccaaccgaactgtccaatctattctttgtgtccactatattatcaacaatagctggattagaaatctgctctctagagtggcacaaagataaaatgtcaaatttcagaaatttctctacctgggatgtcatctacattccaggagagatctttttctttttcatcaacctgacgtgaggagcttgcttcattctcatttgatgtacctttagactgttcctggtctctgttagcaagaacaattgactaatcagagaacctttctccaagaattgtttaaggtaatggaagcaaatttccaagtgagtatcaactagcaaggtgaccaaaactaaaatttatatgaaatcagaaagtaacagcttaaacacagcacctaagtaggaaaaagatacgttttttagatgcaaccatggtataaattttcttcatttgtgaacacaaaacaaaacccatccacatagaaatagatggaatcaaagttagcccctaaaccctgagatgcttggagtatctaacacaattactaatgttattattcctgttcaatttcactaaggaaaaaacagggaatctaaaaggacaaacctttgcttcgatagaaactccaacgtgcgtagaactaaattatacaagtactcaactttcttgctgtaaacctgaaccgaaccctgaagcagcaaagcagctaaacaaaaatcgaaacccaattcttaattacccaaaaaatgaaatagcttgacatcaaacgagaaagttctgaaattgaagcaaaatccacacagaccttcagcgaaattcacaggaatttgcccatcttcttcatttccagtgatttctccggaacaaattttgaggaggtactcttctagcttctccgacaaatcaacttcccaattagccaccaaatccctctccggctgtactgtatgaatcctctcgccgcggacttccccgccaccgtgactggtcattctcggtgaagactcacggaatttaagcttctatatggagagattggataattcatatccctaatcccaaacccccaaaaagaaaaagctgaaaccctaaaaactctgaattgggattccaactaaaaagagaaatttcaatagaaatatctgattttgtggtgaaattggagaaatttttctgggagacgaagggattgtgcgatgtaacacgaagaatccaagtgattactgaagatagaaaggaactgtgagagagagagagattgagagttttgggaaagagagatacgaattatttggcttctctagattttcccgcttctcatcaaatgcaaatagtgttactattgggcctaattaatttgggctgtagcgagactttaacaggccttggaccattattaccaatcaaaccccacttgtgtgtgtactttggtcggaagcggaagtatccatcctgaattcctgatgacgatgaagccagatggaataaatgtttttcagatggagtaaattaacacagtcgggaagcaatcggtggaaaaggaaacagctttggaaggttgattccattacagattcgattcgaaactatggttcagatttccgatcttccacgggatttgacagaggaggtgctctctaggattccggtgacatctatgagagcagtgagatttacttgcaaaaagtggaacaccttatcgaaagatcggagctttacaaagaagcacttgcgtggagcaagaggagcagcaaagaagaagcagacgaaggagtttcaggtgatcatgatgattcaatttagggtttatttatacagcgtcaacctccttaatccatcaatagagcgtataggtaaacttattagcctagacgttgaagatcatgtcgacatatctaaaatctttcactgcggcggtttattgttatgtatcaccaaagacatatctaggcttgtggtttggaacccttattctgggcaaacaaggtggatcaaacctagaaattcttaccacagattggacaggtacgctttaggatacgaagagaagaacaagtcgtgtcgttgctacaaaatcttgagatttatggatgattacgaggatgacagggcactgcgcctaattcgtgagtttaaccctccccttaaactctgagtcatggaaggtaaaaaaattctccagatgggacgtagagttt

SEQ ID NO: 6487 - DNA, 8479 bp, Arabidopsis thaliana landsberg
tttttgggaattcggagtttaaaaaaaaaatggcaacggcacacgtatgaaggccaaggaatatgcccgaatattgatattttctaacccgacctgactcgaccgattcaaccggtctgataaggactcgagtcaaattaatttccggttaattattgtagccaccggttgggcattcttacaagttacaagatttcaaaacctcaagtatataccaaaataatcaactaaagaacaaacgaattaaactgtgaagtatggtattatgatgctatacaaaacgtttctaataactcactcggtaagaaaatttcgcgaaatttacaaactcaagaggtttcttcttgtctatattattcaagtattggatgggtcgattctgataacgagaggctcttgtagatccggtggtggctctgcgatcgggagtacggaagcgtcgtcattcttcttcccatctaattcagtaccattctcagccaatgctttgtccaaggatgatttcgccactcttgttatgcatattatcagaattactgcacccacatcattcaaaaacccaaaaaaagacgggttaaaacacagaccacatggtgtcattccacttctcacaatgtagtgaagctagctagatatatatttggacatgactgcagaagagacttaccagctagagctacgccaaccatcataattacctgcatccacaaatgacaatgcagaagaaacgagaaatcagacttacaatgcaagggcactcagatacttcaatcaaagctacaaaataccaactaaataaatgcagatgcgagactatcacaatgttcttccctacacataggatgctttggacttggttataaatcctcatcctcaggatttttaagctacattctcaatatttcagatcccagaaatgtctatcatattatggaaaataagcaactctacattatattgagggatatacaccaagatgtttccaataaacctcataaaataaggcatacttcaaacttcatttcagacaagttgttatttttctaatactacaaacttctaaacctagtaatctcagtataaatgataagtgataagtaattatgcattacagcagaaacacaaaactatcttcattcttctgacttcattcaagctcatctacaatcatttccaatctactagtcaagtggaagtaaatgagcgaaaacttacccaacgaaatactgacacctcatgccatccatgtgtaatatcagaaagatctttcagagtagttccaacatatactagcgcaaatgtaatgggctgctacatcaaaacaattcagaagattagaattactattatgtataatgttagcaatcagcactttaacatgcatgctaacttcttccaccattattaaagtataaatggccaatatacaagcggattttaaagaaatgtcagtaccatcattcccaaccaagtggccagcatgtattcccctaagcgaacaggagttacagataggaggtaattcaacatattgaagggcagtatggggacaacgcgtagcagcaagactatctgcacaggaagaaaatatcatcatttagttagtagtcaatcaattaaatgtagccaggaaattgaggtactttgccatacgcatagtagatctctgaaggaaaacaaactgtcaattattatagagagtgttactagattttcatgccttgaagccagatttttgaattgcaacggaaacagcttgaaactttgggtaatgctttatttttgaagtgacataagatttaccaatctgcatgataccagaaagacaaaagatatatcattagcaacaatgagacagccaagatgcaacacttagataaaatgcctagatgtgaggacgcacaaaacaggaatcagtacttctgtggttatggcaagcaacacaattgcaagcgaaatatattaaaacagatggaaccataagagacataccgttctaccgagcagaaatgccgctgttgcacctaatgtagctccaagagagtcggctacaaatcctactggcaggccagaaaaggtaaccaccacctaactgcagagagaaacaatcaagactatcagaaccggattaaaagtctaagtatcctatcttgtaatgaaaactttggacaaacatcttagaaaagcaccctaaatttcactacatagttatgaatccagaactaccgtgagtacagaagcaggaaccgccacaattgtgagaggaatataagccaaagccctgaaaaatttcaataaggtaaaaaaggctcatcacaagattttttacggcagccagaaaacagtgtcaccaaaacaaaccaataagtggtagaaacaaaaatgagtagcaaacatgaaaaacttacaatgcaagtggaccaaaaggtccaagatcttccttaatccataacaagaagtccttcaatttctgcagaaagggatcataacaatgatgattaatgatgattctaaatcatatataaagtaccattcgcctgatctaggacagtttctctagtgatctagcgagctccagaaatactccgttgtatcaatttctaaacttagaatatacagaaactatcgttgctacattatcactaaagctacacgcgaatgaggagggagggagaaattgcctgttcgaccgggagaaaaatgacggcggagacgatagcaacaagaaggagcaacgagatagcgattcgaaaagtggacggagtaaaggacatggctgccatatacaaggatctgagacgacggcgccaccaaggcctggaatggtcgtcttccgaaccgtcgtagtcatattgatctccatttatacaagctcctggcttaagccacggcctcgcccttaggccctccactttcgccagatttgtctaccctcccaaaacgaaaatctgcctcttcttctcgccgcgtttttcttcaccccgattacggagatatgcttcagacgcgtcgtctctctttcttccgaattgggaagcgaaacatgcgatgacgagagatggatagagagattgcagagatggagaagcttgtgcttcaattcttcgatttcactgtccttcgatcttcagattctgttgcgtctcgctcgttccggtttcactagtcaaataaaaaaaaaaagtaatttccgccaagtctttttgggccattattaggctcatagtttgacccccaaaagcccaaagaaagtaaatcaattttataccaaaatctttccgatgaattaagggaatttaaataccggtttacacttaagaaaatatttacgattaaattatcattcacgttgaccatacgaaatctttagtgttacaatttgcgttgggcagaacaaaatgctgtagctttccaagatttcatccttttttttcctttttcttttgtcaataacattagctttgtaacttgaaaaataagtatttacatatttttttttgctagcggtccaaatgtaccttcgataatctcaagaataatgtgattagaggtaatcaggtaaggtgtatatcgttctcgggcgttaaaaccggtggacgctgaataaataagatgattagcaaaactcagaagtcatcaataatccaacaaatcaattaaaagaagaataacgcaaaaaaacgcatgagttaaaaaaagagagagaaaaataaggaaataacgcatgtaggatgctgacgtgtcaggtggtccatgtatccccgtatcaaaggtattcatcgtcgtcttcttccttaccaacaaaaaaaacacacactctctctctctagctccgtctctgtttgattttgtctctcatcgaagcgcggcaatggttgttctgagcactttggcgttggtaagagccgcttactcgctcaacagtttcgtctttgaagccgaggacatccgattcggttctccgtggtggttcgtcgtcgtcggtgtcgcgtgtttcctcgtactcttcgccggaataatgtcgggtctcacactcggactaatgtcccttggtctcgttgagctcgagattctccaacagagtggttcctccgccgagaaaaaacaggccggtacgcctctttaatttttttcgactttcgatatctgtgtgttgttggctcaaaattacatacctgacttgttcaattcgtaatggctatagaatttcttaaaacttgatttctaatttcttattctgtaatttttgttaaaagcagagtgatagagtctctatttttactcttgacggagttacttgaattgtttttggatattgcagctgcaatcttaccagtggtaaagaagcagcatcaacttcttgtgactctacttctttgcaatgcagctgctatggaggttaattattgttgatttgttaccctagtttttctgatttacaacgataaattactgtctttgtgcacctcagaatcagtgaattttgttcttggatcttttgtctcaggctcttcctatatgcctggataagatattccatccttttgtggctgttttactctcagttacttttgttcttgcttttggagaggtaacttactttacatatcttcttggtatcaaattgtgttctcttcagttatgactgatacaaactatgttgttgcaattctaaccagataattccgcaagctatatgctctagatatggacttgctgttggcgcaaactttttgtggttggttcgcattttgatgataatctgctatccgattgcttaccctatcggaaaggtgatgttgttgtagactactctttaatagagcactaaatgtcataataaatggttttgtttcactagttgctacaatagtcagaacgttatgttacaaccatggaagatttggaaatttgttgaaaaatctagcaatgtctttaagaagtggtacttgttagagctaactgcattgattatatcatcaacacaagttgatacatttattatgccacagtggtatggagctgtagatgtttacttttatcaacgttttacatgcctcaggttcttgatgctgtaattgggcataatgacacactatttaggcgagctcagcttaaagcccttgtctcaattcacagccaggaggtagtttccctttatgatctaacctggcgaatccagaataggaaaaggacagatattacgctgtaaccttgtctgatttgtgaagtagttagttacgttgcttgattatcaaaagtattgttgtttccagctcccattgacatgctatttctctccaacataggctggtaaggggggtgaactgacacacgaggaaacaatgattataagcggagctctggatttgagccagaaggtatgtatttgaattagatgtgcgtatctgaaacctacacaggtcatgctgatgaacaagttatgttgtaaatgaaatgatttacttgctattccccattgatctggatttagattctccatgaaaacttgttgcacgaggatgagtttactttgttgaactgatgcatatactttgattctttcgccttccagttcagaacatatcatatactgcttcaatattacttccaatgatctaattcatatactttcgtttactggaagttcagactgctgaggaggctatgacgccaattgaatcaacattttcgctggatgtaaatacaaagttagactggtgagttaaggttagagttggccttttttcgacaaattgttttctctatctggcaagtctttgaaaagtaaactattttccttggtctatctgcttagtaataacgcatggtttgaaatcatgaattttcacctcctaaatgcagggaaacaattggaaaaatactgtcacggggtcatagccgaatcccggtctacttagggaatccgaaaaatatcattgggcttctattggtacacctgtcaaacttttgcattacttcattttactaaatcctactagattacatacgtctgtatccgctggtatcatctaggttaagagtcttctaactgtacgagcagagacagaggcacctgtaagctctgtttccatcaggaagatcccaaggtatatctgacttccctgagtataagttgacctactcatattatgtttctagatagaagtataagttcccatacattgcctttccagggttccatcagacatgccattgtatgatatcctcaatgagtttcaaaagggaagcagtcacatggctgcagttgtcaaagtcaaagacaaagataaaaagaataacatgcagttactgagtaatggcgaaacacccaaagaaaatatgaagttttaccagagtagtaatttaacagctcctttgttgaagcatgaatcccatgatgtagttgttgatattgataaagtaccaaagcatgtgaaaaataggggaagaaacttccaacagaacggtactgtgacgagagacttaccgtgtttgttggaagataacgaggatgcagaagtgattggcatcatcaccttagaggatgtctttgaagaacttctacaagtacgatcttatgcttttcgtttttccttttctgacctcaaaaatctctcttttatgcatatttttttctatatacatttcactttacggagctttcctttggtgatttactgaaaatgcaggcagaaattgtggatgaaactgatgtttacatcgatgtacataaaaggtattgtagtggtatttattacttctgagtcacttatctaatgtttaccaaaggaaggttctcactaaaaagtaaaagtgcatcatattttgctattatttcagggtacgtgtggcggcggctgcagcagcagctgtatcatctataacacgtgcttcaccagcggtaagcaagcaacattggctgatcaaatcttcggcatctcttaaccaataaatttgaaaacttgtgaggggttaacggttattttgtgtgatacaggagattcaaagcaaggtaggacaaacggtgaagaagctagttgggaaagaagcacgaggtacaaagaattacacaacaaaaatcacagagcctcttttagcagaatcagatagatagtagttaaaaaggtttaaggttcagtagcacttactttgttgtatgtttgtgtgtgtctatatataaagttgaaataatgaacaaaaaaaagagaagaaaagagttttgtttctttcaaaaccaataaaatggtacatcccgatttcatcagcttgaacgatatgaagtatgagcacaaaagtggccgatgactcaaaatgtatttccatctttctccttaatgcccaaacgagagatatcatctatagctcgataccaaatccattaagtaagtattcacgtaatgtagtaagcaacttctcaaaaggccaatcccatggccatgagtaagtgaatggcatgtcgtttaagcaatgcatatgggtcaatccaatctctggtaatatttttcttccgtggaatgttaatggatttgatgatttgagttcatttatccaggcaaaatcttgttattaattccattataatcaactaaaataaaagcaaattttttgctaattacagatccaaataaaatcaattatggaaattgaaatgaaaattaaaatgaggttgatctatatacggtaattggtaaatgttaacaccaaaaacagataaaaacacaaaaaagggtagacagagaaaaaacaacacagagacctctccgtcgtgttctctccccctctcttgaactttccggtaagcttcgtcgattttcctgttggacaagtgattgtaaaagtagatagttttgattaacctagatatctccattcttgtagaaacttcacctatagctcagtcgggtctgattgttacttcgaattgagtcgattgatctgccttataaaccctaatttcgtggtccttgtgcactctcacagtttccgaacccttattcttgattttctgaatttcctgagctctctcttgttactaatttgatttgaaagatggatttgggagtcaattcttctcatcgatggctctgggttttgaaattgagttcgttgtttctatgatttttgagcaaatatcatctccgttggttacttttagtgtgtttaagtttttgaacagctaatctctgttagttacttatacggtgattgatctgttttcagtttattctctgtatcaatgcagattttgtatcaaacacgaacctaatactgcttccttgactggtaatgtaagtatttgggttgttaactccatggaaaaatcaggcccggtgcagaaagccgttgttctccagccatttgtcaagtaaatctctataccacagaactttcctgttcctattcaatcacagacatagcgatacaaaatgaaaaaatcttcgtgtatatgttcacatagtgcccttaacaagtgttt

SEQ ID NO: 6488 - DNA, 1323 bp, Arabidopsis thaliana landsberg
agtcgagcatgatgacccgtgaagcagcggtcagactaatcccttctgcgcaagctgtgatcgaggccaggaggactcgggatgggtttccaggttcttcgaatttgtctatcactcgacctctttcaaacagctcaagatcaccggttaaggtcaagatctctctgcctctttgccacctgaaaatgttctcaaacagttcggtaaacatacggattggcgcaatgttgtggcaaaagatcaagatcttctccctcttgaccactcggaaaataaggtttaacacaaacatgactttagatcctttctttgcgtcgtgcttgagttttccgatctcggaaagttcttgcgggttgaagaattttgtgcaacagtttgagcttgtgaccaaccacggatgtatagctgctaatgttatctgaagctcgacctcaagtggatacccaaagtacgtctttattacatcctgaagtttcgtgagtatcttatgctgtatatccgtcgagttcatcactaatgtatagatctgtagacctggaagagcatcaccacttccacttccactcccttcatagttatcaatgaaaccattagtcatattcttcaacatattgagaccttgaaggcgttcatctcccacgcttgcatcaatcttcttggcaattatatcgaggaataatttacgagctctattctcgagcaagtgaggcgccttattcacaccgtgattggtcttgaatttctgatctaactccattagaacctcatgaataaactttggtctagccaaacatagcgtgttgaagtactcgcaaaagttgttctgaaacaaagtacccgaaagaagtattcttaagtcagtaccaactttcatcaaggccttacgtagtcttgacttggtactcctcgggttatgcccttcatcaagaacaagaagcccgggactctctcttagcactttagccatgtatttccggtgagcaaacttcgagtcttccctcatcaaagtcgtaaacgaggtgtaacccattacaagaacactcggatgagcatgccatttctgtattttttctaggcaatcaagaacatgcataacatctcggctcggtttaggaactccattgaactgaaccgttttgttctgtttgaaggtacaataggttcttcgaccgtggatcaaatgaaccggaactgggatctcccatttgatgaactccttgtaccatgtgtacaaagttgttttaggagcaagaaccaaaggttcttttcccgggaaatagcttcaagtagctagggaggaaagcaatgattaggaatgtttta

SEQ ID NO: 6489 - DNA, 1931 bp, Arabidopsis thaliana landsberg
cggaacaaactgcgtctgaagatatctggcatatgagactaggacatccaaattatagaagtccttcagtatctgcaaaagaacaaagctgttaatatcaacaaaagctccaaaggcatctgtgaagcatgtcagtttggtaaaagctcaaggttacctttctcaagctcttgttctactacttcaaggcctatccagaagatacactgtgatctatggggacctgcaccagtgaagtcagtacaaggcttcagtttttatgttatctttgtagacaactactctagattctgttggttttaccctctaaagaataaattagattttctaccaatattccataagtttcaagctttagtagaaaatcagtttcaaagcaaaattggaagttttcatggggatggagggggaagagttcactagcctcaactttgtgaatcatctgcatcaacatggaattcaacagttaatccctgtccttatacaccacaacagaatggtttggcagaaagaaagcataggcaccttattgagttagctctggctatgatgtgtcacatccgcatgccactgaagtattgggttgaagaattcttcacagcaaccttcctcattaatctcctgccttcttcagttctgtcagacaacaaaagtccctataaggtattatttggtcagaaaccagattatacttctctcagagtctttggatgcacctgatatccagcatcaaccgattatgcaaactccaaatttgatccaaggtctctgaagtgtgtgtttcttggatataatgaaaagtataagggatacagatgcttactgatttcaacaggtcgggtctatatcagtcgtcatgtgctattcgatgaagaagactttccgtttcatcaggtaccttcttctcctcaactcatcactacttcactccgaatggcttggcaaaagagttttcaacctcagacatcagaagcaacagtcagttcctgacagaatcaaagaatatcggctcagattgacattgaaactccaacaatacctgttactactacttcttcaactagtgatgagactgagagttctgggtgtacggcaggcatcgatcctgttcctataggcaacagctctacagcatcatcacctagcttggcagaagtagtgacatctacaacaacgaaaacagccacaacaagacagttagtgcagacaacaaataaaacagaaaacagtggattttcagtacctccttccacacctgttagacagtcacaaggacatcacatgattacaagatctcaggtgggaactcgaaaaccaaatcccaagtatgctcttcttacctctagagttaagtatcctgaaccaaaaacagttacatcagctcttaacgatgaagggtggaatatagcaatgcaagaagaatatggaaactgccaagaagcagaaacatggtctcttgtaccttatactccagatatgcatgtgttgggaagcaaatgggtctttagaacgaagctcaatgcagatggatctctggacaagttaaaagccagattagttgctaaaggatttgatcaagaagaagggattgactaccttgaaacttacagtcctgtagtgagaactgttactgtaaggactgttctccatgtggcaacaatcatgggctgggaaataaaacaaatggaagtcaaaaacgcctttctccatggggatctcacagaaactgtctttatgacacaacctgctgggtttgttgatcctgcaaaacgagattatgtctgtcacctacacaaatcactctatggtttaaaacagtcaccaagagcatggtttgacaaattcagcacttatctcttgaagtttggcttcatttgcagtatgtctgacccttctctcttcatctacattaaaggaaaagataaaattat

SEQ ID NO: 6490 - DNA, 1220 bp, Arabidopsis thaliana landsberg
ccatcatggctctctatgttttgtaggcaagtccacggatcagatttaacaaggaaggctctctcttggctgtttccgcaaatgacaatatgattaaggttatggcaaactcagatggtctaaggctattgcacacagtcgagaacttatcttctgaatcctccaaggtactgaattttgtgctcactggatcttcaacaagcaaattactaacccccaatttgaaatttcttcaacactttatttttcatgtacatttgcagcctgcaatcaacagcattccgatggtagagagacctgcctctgtcgtttccatccctggaatggtacgaaaatcgatactttttccgtcagtttctctatctcttggtctgggtccaatcatcgttgttgatcacttacctttccaacagaatggagattcgcggaatatggtggatgtgaagccagtgattaccgaagaatcaaatgataagtctaaggtatggaagcttactgaagtcggcgaaccctctcagtgccgttcattgagactccctgagaatatgagagtcaccaaggtactaacacatagactgacataactgtacttatatggcttgattctaatgactcaaaacttgagcagatatcgagattgattttcacaaattcgggaaatgcaattttggcattggcatcaaatgctattcatctgctatggaagtggcagcgaaatgaccgtaatgcaactgggaaggtacttatggtctaaaatcttcctttaagatcgccaaaagagttgaaatcatgatgaaattcaatttgtgattttgtgtaggcaacggcttctttacctcctcagcagtggcaaccagcgagcgggatcttaatgacaaacgatgtggctgaaactaatccagaagaagccgtaccctgttttgctttatcgaaaaatgattcctacgtgatgtcagcatcgggaggaaagatctctttgtttaatatgatgacgtttaaggtaaaatcccagctacagacagcactatgtctaatgtatgcaaacaatgcttcatctgttacatttaattgtgttgttggctaagcgcagacaatggctactttcatgccgcctcctcctgctgcaacgtttcttgcttttcaccctcaagctaacaatatcattgcgatcgggataaatgaaagtacaatcagatttcaatgttcgtgttgataggtta

SEQ ID NO: 6491 - DNA, 3382 bp, Arabidopsis thaliana landsberg
caattttgtctcatcagaaccaatttatcaatattgagacaacaagctctttaatagctttttattaaatagatggtctccgtgattgtcaaaatctatcattctaaggcggtttgggttggtttttgttatacatgtgttatgttcattagaaatttgagaaacgaaatattttagttgcattttttagttgaaataaaacagataattaatgcttgtttcatatcgtttcataacaagcatgtcccatcagcataatctcacatgcctaatcaaattttaattcatcccagaaactatcaacattctatagttgattcatagaacaattaaccaaggttgttccaaatctttgatcatccttttaaggcgttggaggtggttggtctgcacttcaaccaccacaacgacatccatagctcagaactctgttcacatatatacacttgtaacgaaacaacactttctattgataagtggtattttcatctacacatcatctctatcggactgagtacattttgcctgacccgactgatgaatttttatcaacaatatgtacaatacacgagggtaaaaaaaacgtatccagaaacactatcagaggaaaagctcttgcggtagtgacgtgggacaaagcttctttgctgcaaacttgtactggcaggagaagaaaagagagtaaacacttgcaagtattttgatatgaagctattaataataaagaaagtggaaggctcgttactttgtgttgactgtacttctttctgattgcaaccacatcagatgagagtttctcattacacagctgaagaagattcttaacgcatgcttccatatgtttagccctgtacgatgtgtaatgctctagcgtagcattctgcaaaacccgaaatcagcaggttttaatagaacgcagagttgaataaagctaacaactgaagaaaataggaatgaaaatacagtcttgtggtcatacccatggttttcttgaagggtgtagagtgtattgtgccaagaaaactgcagaggctgcaacaagtgatggagcgtatcgaagcatagcgtaatctaacagcgataattcggtgagatagcaggccagacactcagacagcagtgatggtacctaatagaaaccagctactagtcagaaacgtatataacacatcacccattgcgttgagagctcatttttaattttcatataacagaatacctcctttctgccttgagcagcacgaagaaagcgcctaaccacatttttaaagtctagatcagcagggaaccacaaaaaatgatgaatgaagataacatcaatgtgacaagaagatacctcaagaaacattttgctgtaggagttgttaattcgaacttcaagtagttcagaacagaagactccatctccaaaagctgttaaaaagcttaaaggttaacaacaatatcaaaaccacaagaagaagagtttgtccagggatgactaaacatgcaaacctcgttacctcatttcttaagtatgtgttatcagtgatgtaacagaaatcctccacttgcggcacacacacttcttcatattttctggaattccagtgtctctactagttagaaattgcatacttttgaaaagaaaaagaatgaagccaaagagtaaaatttctagatttcttacgctgctatcatcatgcaggtaacaccaagtagctgcagattttgcttgttgattgcatttcctgtaagataccgatcaacgtagtttactgccaaatacaacgtctcgggcgaaagcctatactcttcagcaacctgtaggtttatgaaaatccagaaaacagctttgtaactacctattgctataaaacatttggtgtattctattactaaacttattgccttatcaatcaaaactaaatatcttgccttaatgaaccaggattcatcaaaagcttacctccacaaaacagtcaatcagtatagaacgcatgctagcattgatgcttgactgagttctttccatgtaatctagagccggtcttttgttcacctgcagagcataataagcaaaatttcaactttgacaattcagaaacagaatcaaatcagtatgagaactgtggcagagtaaaacaacagccatcctacctcagatacacgcaaatgctcgtagatatcacaagcaaaagaagcacaaagctgtggatccatcaagtcactatcaatgttaacaatctcatcatcatcatcatcatttccatcatcagtagtgctctcgaccatgtaatctacaacgtggttcgtcaaagagtcatgagtggaaattgacgggtcagattgagtaggagaggcatccaaggataatgcaggtgaagaacatagaagactatcatcgctttggagcaattcggtgtcttcgtaaggaacgattatgtttgatttcgcatttggcttgggaggtaaaccggaatcgagaattcccaaattccaattacgagataaagcaggttttggtgctttcttagattggccgatcttatttgaacaattcaccttcagagattgaaacatttacagattcaattccaggataaaccctaaaaactacatttctcgacgaacaaacacaggaattgaaaaaggaacaaaaagtagagagaatcgaagagaaattttaccagagtagacgacggtgaaggatttctagatccattcttctgatttgtgatgtcgccgaggggagcacgacggtttccaacatcgcggagtgaggttcgagtcttggctaagttcggacgaggaatcggattctcctgagatagatttctcgacgaagaagacattgttgatgaagcaatcgaaaatatctcaggctcggcgttctcgttttccggtgagatttagggtttctcttctgcgagagtgagagagagagatcttgaaggagacgacgagaaacaaaacggaaaatgaaaaacgcggaattattttgttttctttgattaggggttttctattttatatttattataagaaataacggatcaatcttggccgtcaattaaaactcaaagaccgttacgattacacgtatttgatcatcagtgggtcccattatagtttagcgcgaaacttttccctgacttacataggcattactaggcaaaccttctccatgccctagaggggtttaaacaagagcaaggaacaactatctattgcaagtgatatcatatatcttcttatcgttttgtacatacagtctctttcagcattgatttccatatcacaaggtgatgagctcctgcaggtaaaaactgttagaacatcgcactcgtgtggaaaactgattcaatttcttttgagtattgcagagtgctgctgctcagtt

SEQ ID NO: 6492 - DNA, 1171 bp, Arabidopsis thaliana landsberg
gaaatccccacacatcaggacggagttccccagtagccggaggcatccagcgaccagaattgtacacattctcgccaactttccatcccggaacatctttcattacatcagcctcatattccagatactttttccactcagacacaaacctagaatgcaaaacggggattgaaacaagattgctatctgaaggttgctgcaggcacattgacttaaatttgagaatatggtttacctttcatcttcttctgcttgaagaatgggaagtattgttctacgagcagcatatttctcttccttcaatgccctaaacatcacatcaatcttgataagagcattaatcttgatacttactgatatcaaatcagacttgtttaggaccattgtaaatgcataagaagttaatgatcaagccagatataatactaaaacaatctatctacatagaaacagtatcccgataactactatcaaaacatgcaactagataattgctttcatcataacagattctcacatctttgcaattgtggctttaagagtttacaaattgttgacgaactttatattcgtttaaggctaaactcatgctgattaagcttcaaccaaaatgtcggggaatactaataacagaatacataacagtgattcaacaagcctatgtttccataggttaataatattaaccaattcctacgataaacatactcaagtttcaacaattattaaccaaaatgtatccttcactacattactatggtcatcaatcactccacaacactaattttaccaaggcgatctcgaattttagaggaaaaattgaaatgtgaacgagctattacaagtcgttcttacctgcggattttgtttccctggccgacctggtacattccccaagcaaaggcaccagaaacggcaaggaacatggccattgcactaggacccgtattggatatccggcgggcatatcggaccggtgcgaacccacccggtggcggaccatcctgaagcagcggcatatccttcacactcgccattcctggcttatttcttatcatcgcctccgtcatcttcaacgctcaatttcttctcgaccaaattgacttttgatcactgaatccgatttgattttgctgaaatcgagtgttctagggattccgatgaacaacga

SEQ ID NO: 6493 - DNA, 744 bp, Arabidopsis thaliana landsberg
  unsure (1)..(744): unsure at all n locations
agaaagtaattaccttattggatttggttgtaaagaaggcctcatacagcaatgccctttccaaattcctagtgtagctctgtcgtgacatcatccaccacttttaggtcaattttgtaagtaaattactcatacaaataaattaaaaaaggaaattgatcacatcaatattaaaaagtgaccgttacaaataaattaaaaaaggaactacatagaaacagtatcccgataattgctttcatcataacagattctcacacctttgcaattgtggctttaagagattccaaattgttgatttgagtttgaaatataattttaaaatatcaataaagaagtaaagaaagtattatacctgattggacctcgtttgggccgtcacaggaaaagcccattaccaaattcttcgtcactgctctgttctgtagttgatgacatcgatgaaactcaaactatcgcactcgtcgtcattaccaagtccactgaacatgatctgttccatcgccaagttattcttcgctgnnnnnnnnnnnnnnnnnnnnnntcactaatctcatgagaaccggtgaaattagggtagaacccgattgacagaaaacagaggatgggtgatcaatcacgaaacgagatgaaatcgtttataaatcatgcgcatactctgaatgggtcatctctttacgctctggatcttttgttttccttttgagaagaagatgaatggagaattatgatttcacaagggag

SEQ ID NO: 6494 - DNA, 736 bp, Arabidopsis thaliana landsberg
ataatcccaaagaatactattttaatcactaaagcaatgttaaaaaagttctttgtaaaattaacttaaaaaaaaaaaaaaaagccaaagggactatataacaactattagtcagtcaagataaaaaaaaagaaaaaaaaacaagttaaagatagaagattttttttctatcaactcatgcaaaaaatggcagatggaaacactccacatgtagcaatcataccaagtcccggtataggtcacctcatcccactcgtcgagttagcaaagcgactccttgacaatcacggtttcaccgtcactttcatcatccccggcgattctcctccgtctaaggctcaaagatccgttctcaactctctcccttcctccatagcctccgtcttcctccctcccgccgatctttccgacgttccttcgacagctcgaatcgaaactcggatatcgctcaccgtgactcgttccaacccggcgctccgggagctttttggctcgttatcggcggagaaacgtctcccggcggttctcgtcgtcgatctatttggtacggatgcgttcgacgtggctgctgagttccacgtgtcgccatacattttctatgcatcaaatgccaacgtcctcacgtttctgcttcacttgccgaagctagacgaaacggtgtcgtgtgagtttagggaattaaccgaaccggttattattcccggttgtgtcccataaccggtaaggatttcgtcga

SEQ ID NO: 6495 - DNA, 650 bp, Arabidopsis thaliana landsberg
cacgtcgactctagaggatcccctaataaaccaattgattttaccacatacttatctttagtcccggtatgggtcacctcatcccattcgtcgccacccaaatagagtccacacaaaacgaaccaaacaaaaaaagaaccaaaaaaaaggaaattcccatttcccacagaactataaccacgagcatgatctataaagctactacaacgtaccataaataaaataaatgagcatagatatttttcaagaaataagaataaagaaaattctactcttaatggcggaagcaaacactccacacatagcaatcatgccgagtcccggtatgggtcaccttatcccattcgtcgagttagcaaagcgactcgttcagcacgactgtttcaccgtcacaatgatcatctccggtgaaacttcgccgtctaaggcacaaagatccgttctcaactctctcccttcctccatagcctccgtatttctccctcccgccgatctttccgatgttccctccacagcgcgaatcgaaactcgggccatgctcaccatgactcgttccaatccggcgctccgggagctttttggctctttatcaacgaagaaaagtctcccggcggttctcgtcgtcgatatgtttggtgcggatgcgttcg

SEQ ID NO: 6496 - DNA, 6783 bp, Arabidopsis thaliana landsberg
cgttcggctttaaggattttgatcacacagcccggttgcactcctccgctggtggtcacccaaaacggtgacctccagcccctggatggggagaggcaagccgggccgtgatcttggtcccgccctcagtctcgagggtgttcgtcatcctcgctggggcggggagcgaggcgagccggtgctctacctcccgcgcgggccggcggtccacctcttcttccagcttctggtggtggcaaccatcctctagctctgcggaggagacgtcctcgagccatgccggggaaggcgaactgttgctgcccagctaggatgcaacattccgccctcttcctcgctttcgtggcgaggacgggggcgaggacctgtcggtgcgctttggagcggcctgcgttcgccggtgcggcgttggtagagaggcagacgccagtcgtcggtgctgatgtggtggcggccgggggaagcttccccaccgtcgaggccgtcagtgccccctacggggcggcctccggctctttggctttgatggctggttcgcatcccttgagcggggaccgaacgagagccttccggtggccgcgtccgtcctgggaccatggctgttgttgcggaggtcgccggcgagtcgcccggaacttgtcgccccacaggctcccctggtgtggaggttgttcgataccgctgggacggaaccggagttccgtttgtgatggcacttgaatgccggtcttttgttcattgtggctgtcggggcctgaacgtgtatgtatttttggcatgaagccatgttttttcctcatttcgagcactaggactcgcctgtcggctaactgaaccgcttcaccaagtgtgagttgcctcgtgcgaaggtgacgagtgaggtatccgtatcccgaaggcgtaggagtccctcggctcggtcggccttgccgcccgaggcttctcttgcttagttaaaggaaccctcggccgctcttcaatgagccgttgccggacaggctggtgtcagcgtggacagaggcagagttggtcgaaaagaagacttcatcggccgaagcctggccgggccgtccactggcgggaccatcaccggagtcaggttgccgaggccatgagccgggctagtgtcctcgggggacagctggctgaggcttcggggcggccggccaagccgcctgctcgggccggattcctggagaagtccctggcggcgattgcccgggcgtggcgatgacgtcgtccttcagagtggagatcctcggaccgcgtcgccgtccgaggctaggtcggacctcgctgaaggtgttgtcgatgccgagggtgctactgcccccttccagcgtcaagacccgagcctgcaggatcagagtgtcttgtagcgtgtgccttctgcggccgctgaggccagaacacacaccctcgctgtgttgtaaagctgtgtctcttttcctcttgtttcgagtatctggacttttttgttggtaacagggatgtttgtgcgagcgagagttgcttctcgcggaaggtgatgagtgaggtatccgtatcccggagtgcgtgggagtccctcggctcggtcggccttgccgcttacgcatactttcacccgtccatgaggccctgtcaccgactcggtcgagaaggctcgaaggatcgcttcggcagaagggcttccgaacgtaaagacttgttcgatccgcggagcactttatccgaacgcgagttacttatcacagaaggtgatgagtgaggtatccgtatcccagaggcgtaggagtccctcggctcggtcagccttggctgcttacgtgtactccgtcgtttccaggacccactttttgaagtagtcaaaaagcacgaaagaaattctgctaacaagagatcttttttcgaggaaaaattcgacgcagagggggtctccccccttttagcccccgagggagggtcgggctttgccgaggcgaggccgacccttccttgatgactaaaactttgcgtgggtgcgaggtatatgaacaacttgaaaacatcttaagggtagaagcgacgtagctgtttgatgttccaagcgttgctgtagatctcgccttgattgttggccagcttgtatgttccgggcttcagaactttggcgatgacgaatggcccttcccaggggggcgtgacgttgtgcctccctcgggcatcttgtcgcagccgaagcaccaggtcgcccacctagagttctcgggaccggacccctcgggcgtggtagcgtcgcagggactgttgataccgcgccgagtgtagcaaagccctgtccggagcttcctccagctggtccagcgattcctctcggctagcttggttgctttgttcggtgtatgccctcgccctcggggagccgtattccaggtcagtgggcaagatagcttcagccccgtagaccaggaaaaacggcttgaagcccgtggcacgactcggcgtcgtccttaggctccagaccaccgaggggagttccttcatccatcgcttgccgaacttgttgaggtcgttgtaaatccgaggcttgagcccttgtagaatcatgccgttggcacgctctacttgcccattcgacatgggatgagccacggcggcccagtccacccggatatggtgatcctcgcaaaaatccaagaattttttgccggtgaactgggtgccgttgtcggtgatgatggagtttgggaccccgaagcgatggatgatgttggtgaagaacgccaccgcctgctcggacctgatgctgttcagaggtcggacctcgatccacttggagaatttgtcgatggcgaccagcaggtgcgtgtagcccccgggcgccttctgcaagggaccgacgaggtccagaccccatacagcgaagggccaggtgatgggtatcgtctgcagagcctgagcgggcaggtgggtctgcttcgcatagaattggcacccttcgcaggtgcggacaattctagtggcgtcaaccaccaccgttggccagtagaagccttgtcggaaagcattcccgacaagggctcggggcgctgcgtgatggccgcaagcccccgagtgtatctcttgcagcagttcccgaccttcggcgatggagatgcatcgctggaggatgccaaaggggctgcgatggtagagctcctcttcatcgcccagcaagacgaacgacttggcgcgccacgccacccgccgagcctcggctcggtcgaggggtagctctcctcggtggagatattgcaggtacggggtctgccagttttgatcaggcgtgacctcgctttgctccccctcgacgtgcagcgtctcgtcctcgggggccgagggtacctcgggctgagtcgaggatgcctcggaccgtgccgagggtacctcggactgagccgaggatacctcggactcagccgaaggtgcctcgggcggagccgaaggtgcctcgggctcgggcgtgtcctcggtcttgacggagggtcgatgcaggtctcgggagaatacgtccgggggaactgttgttcgtcccgaggctattttagccagctcgtccgcagtctcgttgtagcatcgggcgatgtggttgagctcgagcccgtagaacttgtcttccaggcgccgaacctcatcgcagtaggcttccatcttcgggtcgcggcagtgggagttcttcatgtcttggtcgatgacgagctgcgagtcaccgcgagcgtcgaggcgtcggacccctagctcgatggcgattcgcaacccgtttaccagagcctcgtactctgccacattgttggacgcggggaagtggaggcgtagcacgtagcgtaggtgctttccgaggggcgagacgaagtaggagcctgcgccggcccccgtcttcatcagcgacccgtcgaaaaacatggtccagagctccggttggatcggagccgtcggtagctgggtgtcgacccattcggctacgaagtccgctaatacctgggacttgatggccttccgaggggcgaacgagattgtctcgcccataatttccaccgcccactttgcaatcctgcccgaggcctctcggcactggatgatctcccccagggggaaggatgacaccacagttatcggatgagactcgaagtagtgtcgcaacttccgcctcgtcaggatcactgcatacagcagcttctgaacttgtgggtaacagatcttggtctcggagagtacctcgctgacgaagtaaactggtctctgaacaggcaatgcatgcccctcttcttacctctcgaccacaactcgcggcgctaaccacctgggtggtcgcggcgacgtagaccaagagggcttctccggcagctggaggcaccaaggtaggcgcctttgtgaggagcgccttcaggttcccgagagctccctcggcctcaggggtccaagtgaagcactcggccttccttaagaggcggtacagtggtagacctctttcaccgaggcgtgagatgaacgggctcagagccgcgagacatcccataaccctctgtacgcctttcaagtccttgatgggccccatgctggtgatggctgcgatcttctccgggttggcttcgatgccccgctcggagacgatgaaccccaagagcatgcctcggggcacctcgaagacacacttctcgggattgagcttgacatctttcgccttgagacatcggaatgtcacttcaaggtcggaaaggaggtcagaggctttcctcgtcttgactacaatgtcatcgacgtaggcctcgaccgtgtggccaatgtgttcgccgaacacatggttcatgcaccgctggtacgtcgcgcccgcattcctcaagccgaacgacatggtgacatagcagtacatgctaaagggtgtgatgaaagaagtcacgagctgatcggactctttcatcctgatttggtgataccctgagtaggcatcgaggaaagacagggtttcgcacccagtagtggaatgcacgatttgatcgatgcgaggcagagggtagggaaccttcggatatgctttgttcagaccagtgtagtctacacacatccgccatttcccccctttcttcctcacaagcacagggttggcaagccattcgggatggaatacctctttgatgaaccctgctgccattagcttgtggatctcttcgccaatcactctgcgcttctcctcgtcgaatcggcgcagaggctgcctgacgaggtcggctccggcccgaatatccagcgagtgctcggcgacatccctcggtatgccgggcatgtccgagggactccacgcaaagacgtcggcgtttgcacggagaaagtcgacgagcactgcttcctatttggggtcgagcccggaaccgatccggacctgcttggtggtgtcgccactggggtcgagagggacggccttgaccgtctccgctggctcgaagttgccggcatggcgcttcacgtctggcacctccttggagaggttctccaggtcggcgatgagggcctcggactcggcgagggcctcggcgtactccacgcactccacgtcgcattcgaacgcgtgtttgtacgtggggccgacggtgatgacctcgttggggcccggcatcttgagcttcaagtagatgtagttggggacggccatgaacttcgcgtagatggcctccctagcacggcgtggtaggttcctcggaacccgaccacctcgaacgtcagggtctcccttcggaagttggagggcgtcccaaagcagacggggaggtcgagtcgtccgaggggctggacgcgcttcccagggatgatcccgtggaagggcgcaggcctgctcggacggaggacagatcgacgcgcaggagcttgagggtctcggcgtagatgatgttgaggcagctgcccccatccatcaggaccttggtgagcctgacgttgccgacaacggggtcgacgacgagcgggtatttccccgggctcagcacatggtcggggtggtcggcctggtcgaaggtgatgggcttgtcggaccagtcaaggtagactggcgccgcaccttcaccgagcagacctcccggcgctcttgcttgcgatgccgagccgaggcattcgccgtatgcccaccgtagatcatgaagcagtcgcggacctcggggaactctcctgcttggtgatcttcgttcttgtcgtcgtcgcgggccctgccaccctctgcgggtggcccggccctgtggaagtggcgccgaagcatgacgcactccttgagggtgtgcttgacggacccctgatggtaggggcacggctccttgagcatcttgtcgaagaggttagcacctccggggggcttccgagggttcttgtactcggcggcggcgacaaggtctgcgtcggcggcatcgcgtttcgcttgcgacttcttctttcccttcttcttggtgccgcgctgagtagacgcctcggggacgtcttccgatgggcggccctgaggctgcttgtctttccggaagatggcctcgaccgcctcctgaccagaggcgaacttggtggtgatgtccatcagctcgctcgccctggtgggagtcttgcgacccagcttgctcaccaggtcgcggcaagtggtgccggcgaggaacgcgccgatgacatctgagtcggtgatgttgggcagctcggtacgctgcttcgaaaatcgtcggatgtagtctcgcagggattctcccggtgctggcggcagcttcggagatcccaggagttcccagggcgacgtacgtgccctggaagttgccggcg

SEQ ID NO: 6497 - DNA, 595 bp, Arabidopsis thaliana landsberg
  unsure (1)..(595): unsure at all n locations
cgaaatgatatcattgtccttgagtgggacactttaagtctttcaagaaaccaaaacccttatcaatgaggtaaaagagaagttcacaagtcgtccttggactcagtggaggcttcatcatcatttcccatgaggtcttcaagtgagaattcatctgcatcaaccacctctccatctttaccatcccaagcttctgtcttcactatctccatagttccgtctataggcaaattcccttttcctcctttcgcagcctccttaacgaaatctctgataacacaaataagaaaaatacccgttgagctaataagatgcatggaccattggtttcgtcatataggacagagagaaagacaaaaggtgcacttacttgaggtgtttaacctcaaaaccgcttttaagtggagcataagctcctttctttgcgtttaaggctaccattgctggataaccatatcctncaacaccaacacgcttctccaaatcaggttgcttcccagcagccacccacacaaagctgcaacacacaatcaaaattcgagtatttgtctagtttcttgcaaaacagagtaactcgcagctggaatatgatgat

SEQ ID NO: 6498 - DNA, 1925 bp, Arabidopsis thaliana landsberg
aacaagctgacaacagtaaaagaacctgaatttgactaatggcagtttcttctcgaagttgcttcaaaatctaaaagataaatgaaggcacaagtaagatcactgtaaatctgattaagtggaagacgaaaaaaagcaaagcagaggaagagttaaacacctcatgctcacgaacgttgttgaggacatagtcataaaggcgaggagtgagactgataaccattttgttaccgtacttctcgtcgtcagccataactaaaggactcgcctccgtcgggcagtttccgacgacagagtctgtcggccggttaagacgaatatcgggggttctaagatcagaaccaccggagcagacgtcacgaccggatttatgttggagatcatcggcagctagtgaatcgatcaagcagaaaaccaacaaaaggaaaagaaagctcgttgaaaacgtcgtcatcgcgtggaatcaatagagttgatgattagagtgggaatacaaattcttataagcaattattgataacatgtgagtggtgattggtgaggacttcggctctatgctcagagaatatgatttaaataataggcggtggcttttgaaaagttgcaacgtcttattctacacaaattttatcttaaaagtaattaaaaaaatactatagtagaaacaacaatgagaaattaagctgtgagctttgttaggactttgggacccttttcagaaattaagatgatcacaaaagcttaatcaaaactctatttccactaatcagaaagagttaaacaatttgacaaaagtacatgcgttagtggttaccatcccaagtagatgagtcttcgaagtgtttgtgagaatggattcagaacaaaagaaatgattccctatcctgaaacatgtatatcttggcttcatggagatcctttcatgtttaaaagacttctctcttggatcaggttcactgtgacccaattggtttttcctgatgactatctcttgcggcatatcgtcatgccatcgccgatcggtacctgacgcgccaaaaaatgtgataaactcaagcgagagtttggaagagcttgttgtgttgtggacttaggagaacaaagtgatagaatcgagaaaataaacttaccatactaatgcttacacgtttatcatccattaactttttgttgaaattcctaatgctgatggtcttcgcatcattcacctgttgaatttatcgatatgagattatggtctttcctctcattcgagaagctttaagagcatggctgtgtttgtgtaagttgcataccataggatccgaaactcgtccatgccaaagaacattatccatcacaatgactccaccaactctgacctgcgtcaacagagataaccgctaaagctaacttggccaactatggaaagagactagcattattcatcttacaagttgaagaagcaattcgaagtagtcctgatacatcctcttatcagcatcgacaaatgcaaaatcatagctgcatgtaataaaaagctgaaattttaggcaatcatttcaaatagagcaactctgaacactaaaataaaagaagcgtagtgtatttacctggctccttcaccgttctgaatcatggatttcaatgattcagctgcaagaccttgtttcacattaacctgactcgagtcaacaagtcaaagaatcatacagttgttcatgatgaatctcttagaattgaatcgacaagagagcaaaacaaaatgttataagggtttccaagaggccatatatatgttgaggaaccattatacaagtatagtatcagtctttaaaaataagattcaagcagtctcgaaacagcaaatgaaaaaagttaaaacagaactctttcgtgcctaagaaaaacattgattttcgcaacaattgaatgtgaagtttttc

SEQ ID NO: 6499 - DNA, 3246 bp, Arabidopsis thaliana landsberg
  unsure (1)..(3246): unsure at all n locations
gcctcatgtctaatcctgcgcttgtgaggaatgttgctcttgtggggcatctacagcacggcaaaactgtcttcatggatatgttggtagagcagacgcatcatatgtctacttttaatgctaaaaacgagaagcatatgaaatatacagacacacgagtcgatgagcaggagagaaatatatcaatcaaggcggttccaatgtctcttgtccttgaggacagtagatccaaatcatacctgtgcaatatcatggatacccctggacatgtcaatttttctgacgaaatgactgcttctttaagacttgctgatggtgctgttctgattgttgatgctgctgaaggagtgatggtaagtctttactctctcttttttggtctgtatttttaattttttgaagtatactatttgtactgacgctaataatcttttttcaggttaacacagagagagctatacggcatgcaatccaggaccatctccctattgtagttgttatcaataaggtacttcatgcttcaacgtgtaacttaagagatactgtgtgaaattttatatttccatacatttgcttgacctttgctttttgtcaactttttccccccaacaggttgacaggctcataactgagctcaaactacctccaagggatgcttactacaagctgaggtatacaattgaagtcattaatacccacatatctgctgcttcaacaaatgctggagacttacctcttatagatcctnnnnnnnnnnnnnnnnnnnnnnnnnnnnnnnnagccggatggtccttcacattgcaatcttttgctagaatgtatgccaagcttcatggtgtggccatggacgtggataagtttgcatctagactttggggagatgtatattatcaccctgatactagggtattcaagacaagtcctccagtaggtggtggagaaagagcatttgttcagtttattctggagcctctatacaagatatacagccaagtgataggtgaacataagaagagtgtagagaccacccttgcagaattaggagtgactctgagtaatagtgcatataagctgaacgtcagacctctacttaggttagcctgtagttcagtgtttggttcggcatcggggttcactgatatgttggtaaagcacattccttcacccagagaggctgcagctaggaaggtcgaccattcatatactggaaccaaagattcccccatttatgaatcaatggtagaatgtgatccatctggacctctcatggttaatgtgacaaagttgtaccccaaatcagatactagtgtttttgatgtgtttggaagagtttatagtggtagacttcaaacagggcaaagcgtacgtgtactaggagaagggtattcacctgaggatgaggaggacatgactataaaagaagtgacgaagctatggatatatcaagctaggtatagaataccagtaagcagtgcccctcccggttcctgggttttaattgaaggtgtcgatgcatccatcatgaaaactgcgactctgtgtaatgcaagctatgatgaagatgtctacatattccgggctctccaatttaataccctccccgtagtcaagactgcaactgagcctttgaatcctagtgagctgcctaaaatggtggaagggcttaggaaaattagcaaaagcnnnnnnnnnnnnnnnnnnnnnnnnnnggagtctggggaacatactattctaggcacaggtgagttgtacttggattcaatcatcaaggacctcagggagctctattcagaggtcgaagtaaaggtatctaattgtatctctaatttggctctatgactgtgattccgttgtgcaagcaaattgctgatttggctgtttgatagctaagatccttttgctgtcttaaatttgtaggttgcagatccggtggtctccttctgtgagacagtggttgaatcttcgtcgatgaagtgttttgctgagacaccaaacaaaaagaacaaaataactatggtaagagatcttctttttccactatgatctcttatatattagactgcgatgtttggtatggtactcaagcacaattactttgtgacaaatctgatatctgtttcatgctaaagattgcagagccattggatagaggacttgcagaggacattgagaatggcgttgtaagcattgactggaacagaaaacaacttggtgacttcttcaggacgaaatatgactgggatttacttgctgcacgttccatctgggcttttggccctgataaacaggtgaaatgcttgtattcttaaaacactgcaatctggggtttactttatctttattgttatggttggtttatgtctgttttgacaatttcattgattgttgattttcgactgatcaggggccaaacatattattggatgacacccttccaactgaggtggacaggaacttgatgatggcagtgaaagactccattgttcaagggtaatcatctttcttctgttacacttttcttttactcgattttgttggctttagctaagtggcttcgttttattccttttgcaggttccagtggggtgctcgtgaaggtcccctctgtgatgagcccatcagaaatgtaaagttcaagactgttgatgcacggatagcaccagagccattgcatagaggatctggtcagatgattccaacagcaagacgtgttgcatattcagcttttctaatggcaactccaaggctaatggaacctgtctactatgtggaggtacataatccctttccatttttgctcgtcacattttttctcttagaatgataactaagagttatggttttgtctcagatacaaacaccaatcgactgtgtaactgcaatctacacagttttgtcacgtagacgtgggcatgtcacatctgatgttcctcaacccggtactccagcttatatcgtgaaggttagttttgtttgtgtctttctccttactttgttcctgttatttgactaagtgatgattcattgagtatattctttggtgttgatgcaggcctttctgcctgtggtagagtcctttgggtttgagacagatctgaggtaccacactcagggacaagccttttgcctatctgtgtttgatcactgggccattgtgccaggagaccctctagacaaagccatccagttgcgcccacttgagcccgctcctattcagcatctagctcgggaattcatggtcaagac

SEQ ID NO: 6500 - DNA, 578 bp, Arabidopsis thaliana landsberg
aaccttaaatctcttgaagaaaactttctgctcaagaatccattccattctttgtttgtttcttgatctatttgccatcacataacatactttatacaatcatttaatacgacgaaagaaaatagatatatagtggcataggtcaaaatgaaaacagctgtcgttagatatgtaaaacagagtgttgaaacagagcaaatccaatggttctcatattatacaatataatgaatgttaatgagtcttgagcactttaaaaagaggtgtttctttagtttattaacaatttgtatcacattgatcatcatcatcacttctactcttgaaatgcttgcaaataacaatatacatcaagaagctaatagcacttgtgaaagccaaaagccaataatagttatcaagtctagcttccgacatatcatctgcaaaccagttatgttttccacctcttgagctcgtgtaagtctctattatcgaaatcaacgcagcactcacaaaactccccacaccgaaaacgcttgtgtacaaagcaaatcccattgttctcatgctaacaggaacctcgctgtagaagaact

SEQ ID NO: 6501 - DNA, 2552 bp, Arabidopsis thaliana landsberg
gaaaatgctaagagagtgatagagagacattttaaagtcttattaattagttcgcctatatcaatgaggaccttgtgggctatatataggaggttttatacttatcagttatcacttgacatgagatattataaataagaaacaaagaggaagcagcagcatgtacatttttggaaatatacaacaacaaaactaaattgtcggcaaaaaaattgtttatgagagaaagtttccgtgtagaagtatacgaagggaaactcgaaccacgttaaagaccgcaccttacgagccgcaatgtatgactcactgtctgtcatgttacttcggttttgtattaaacgatggaaaattactaatttacactttaccaaaagaataattaaaaatacgtgtcttgtgctttgtgactttgtgtgcagtgagctatcagacgctgaaaaatatgcaacgaaccttccaagcacgaatcctaacatgtgcatggtgtgattcaaacatatcacgagcgatgctgctgtgaaaaatataatcaagacattaaatgaactccaagtccaaccgtcgatcgatgacaaaaaaaaatctcaacatgttaaatgaattgtcgtctagccaatttttccctttaattaacaaaataaaggaattgttgtgccttttcttttctttttgataaaattactatcggaaaagttgcactcaccaaagtgggcgaaaaaagccaatctatggagcatattatttattaactggcgctgaattcatcaaattttagagtagatgcaagcaccaacatgaatttataaattacaatgacgaaacctagctaatcgtctgtgttcatctaattgcattcactgagtttatatgtaagcaaaacataatcaactttttggttcttttctccgcaatctacgtagtatttgttctttgtttaataaagctttacgtttaacttacaaagaaaaaaaacgttaaaacaaagaaatttgtgtcaataagatttataattaaatgcgcatgtgtgtacacgagagatgttaagcggagttccagaagtccatatatggtctccgctcataatcatcgccatgatttgctctttaactcaaatttacgtccacaaataaaaatagattgaatattagttgtgattttgaatctgattttcttttaggctatgacgttttggtatgtaatcttttatatctgatctacagatccacagatttaaaatcccattgttcagtgtaatatactattttttttgtcactcagtatattagatatatataaatacaatgcaatattttttggatcaagaaatatgaatatcgatattttttgaatatcagtttcttaacgacctttttacagaagtatagaaaattatataattgaaatcgaacaatatttattttacttttgtaataatttaatgggccaaaaaaacactaacattatcaagcacaggcccacaaagatgtccaaaatcatgaagcttggtatgataaaacccactatagaaagttatccttgtgcgattcgaatcggcacgaaacgcgaaacgccccactttgaacgctcctttatcattagattcgaatgtaaccttaaacgccgatattcccgcaaacgcctccaccatcatcgatccgtgacaaccattgtgtgcgtctcccacaacaaacgagagaatgtagtttttaccggagacggtacggatgatctgagcgattgcgctttctcttccggcaacaagctcgattgctgcgagacctgaggggaccttgaagtggcggttatcgatgtacttaaccggttttagagattcgacgatccatcccggaagcggtgagattaggtcttgtatcttcgccggaattaaaattccggtagagaagttgctgaatacgtgtggaccggtctcaaatccgccgtttttcacaaggttccctggttgatttttacgtaaacaaattaaaagttaggggcgaaagagaaaataatatgaaaagataaggaccaaattgcaaaaccaaactggtatgtggaagttttggttaaattgaatttactcttcaaaaaccagaaatccaatttaacccggttaaaatataaaagaaatgaatccaaaccggaaatgaaacctatatactaagccattgtgtggtagatttcaagatttgtatgtgaatcggttaatattctaaaataaagtcaaaccggaatgtggaatgagacacgaccaataccgaaccggaattgaaagttgttacctttggtataccggagaggaagaatctccttaatggcaacagcgtcaacgattgggccacaagtagggtcttcttgaacaccaggattataaaaagtgaccttaaccaagtcagacgttgccttaaaagcccatgcgtacgtatcaccaccgttggtactgaacaatgtttggattggtagctcattggtctgaccaggcacagagattctgatgttctcgtcttgagcacaagtcctcgtgacaccaaacgttagagaatagaccaagccgc

SEQ ID NO: 6502 - DNA, 705 bp, Arabidopsis thaliana landsberg
gtctttgctcggtcttcctttgctctctcgtgatggctctcatagcttaccagcacaacggactcctcatcttgatggtaagacagttcgactatacgctagttaagtactgcaaaaattatcatataatgggcgatgttatatatatttgaattatttagtctgttatgttaattgagctatccatataaaagttatgatagcagaagaacaaaatagtttgccagttttggaattgacgtgttgccaaattaattgggaaccatgaataaataattaaatagcgttattttaaatttcagtaaaaaaaactattttgcatttcataaggccagcgcgtccttaattctaatttaatttcagcaacacatgtcacatgaagggtgaaactaatacaaagaactaaactataagctccgatctttttagtttaattaacgatgataaattgttgtttacgctgatatattatagttttcatcgtagaactaaatgtaaaatttcgctttttatgtttacgtgtagggcttctcccaaatgggaactttgagcaaattcctaacaaatcaaacatgagaaagaggcaaataattggcaaatactctcttccacattgggaaatctccggccacgtagagctagtctctggcggtccacagcccggtggtttttacttcgcagtgccacgtggagtccacgcagcta

SEQ ID NO: 6503 - DNA, 4866 bp, Arabidopsis thaliana landsberg
cttataataaaaaaagcttatcttatatagcaagtaaccaagtaagtggtttatcaataacgactcctcaaaccgtaaactaactaacctcgaaatctaaacccagtaacgtgtgcttcgttatctgctattggtgcaattaaaataaccagtttaagcttcaacaaaagtgtttcttgtgcagcaagcaactaactaggaagaagactagcgaggaatcttgaacccaaaaaattaacgaaaactaaccttaatgtcacttcctctaaataccatgtgactgtgaacttctttaagaacctggaacactcgttgctcattatcattctcaacctctcttccataaaccctaacgactgcatacataaatttgaggccttaatctatcacatgatactgttttatatatatgaaacgtatagttttcacggaaatattctaacaacgaccaaagaaacaaatatgaagaacttgaaaagaagaaaatcataaacagtagatcttggagagggtttggaatcgaattgttaccgttttggagacctaatttcgaatcttgcagattgagaaggctaataacgccttcgtatcgtatgtcgttgttagacatgacagcgacgaactttccgatcatcgatgtaacaagatcctccggaggagttgaagatgacgaagtctcacgctccattatattgttcttcagccgaaggaaatcgcgggaagatcaaggggagaataaaggctcttttagtaaatctttctcgagtttcttgctctcgctctctctctctctctcgctctttctcaatctctcaatctcttgttaattaatttagaatattacgtgaaaatgagatttatacgagaggcaaatgatgtgccgttgctacatattgggcttcatgggccatcaattagcacataaacatattgaacctaagcgtcaccgatttttcctcctaaactttttttttttttttttcctccaaataaactgtctgtgttttgtttgattcatgccaattagtatacaaaattgaacctaaaccacactattttccgcataaattaaacatatttcttttctttattttcttacaaatgaattgcattcgtgttttgattaattatgccaattagtgctatttttttattagagtgaattttgtgttgatcttttagaggctcagtgtcagtgggtgtatagaaacgaacttagcttgttgatgagtactacttaagcttaatgcatgtatacttcatgtcaacagaagttgcatagagagagggatgtttatgtcatgcaccatctatttattgagagctacttaagtttgatatacttttttatgttaatataagttatatgtaatctattgagaggtattatgccatgttaacaattttttatttgagagctacttaagcgtcgtccatatttcatttactagttagtttttgtcgttgctaaacttaaacaattgattccatagcaacaaaaaaaacttaaataaaaacaaaaacataaaaaaaaaattgaatttagcccatcaagcttcataaatacaataaagcaaacgatacccgatgaaataataacgaattactaactggtattacctagatataaataaaatataaaataaagaacatgaccaaaaaaagaaaactatatatatcaataatatatataattctgattaaaactaattaaattataagttttaagctgcaaaaaaaaatataaaaaaaaagattgaaaaaaatcaaagcaaaaaagatatggttaattattgcaagaagtccatacaatgtgagagtgcatacgaccgaggggctataagcacagcatcaagccattcgatgtgaccccagatttcaccatcatgtcccttttcaagagaaatcatagcacaccaaatttctttggttgcggttaaacgagacaccgcacggtcccaaaagacaacaagttttccaccataattacctatttcagaatcagttttataatactcgtaaagtccactcacacctttgactaatctccactcttcacactttgcgtcataccaccagtatcttttattactataacagtagcatacattctctatctcacaggtactctcacccaagttttcctcggcaacttcccacatacactcttttataaggtaaacaaagttcttcttattgctcctcacgtacacttttccttgcttcgtttggatattctttactgaagagtaccggagctcaactccaggatccggcaatgcttcccaagtttgagtctttgggtcgaaaacttcagcccaatgagtagattcatccgcttcacatcctcccattacatatagttttccatcaaggacgcacgtaaaggcgttcttacgagccaccatcatgctaggagctttgcgttgtttgccaatgagcttatcatagacccatacgtcagtcgagggtgtcatgttttgtccaccgatttcgtatgtttctgaaccaacagtttcgtggactatttgtaagcaacgagaatagggagagggcatcggtagcaaccaatgtccggtacacttgatgtcgatcgtccaatgggttaggggctgatgatcatagggttttatccagagaccgaaccatctacgatcaaaaggatgggtgggagattgaaggcagacataaacacatggttttcgggttccaaggtaggaacgttccatgtcgagctccttggagaggatgagcaaacggaaggtcttggagacaagagagagcgtttggtagtaggaagtagatatgcgagccaagatattcaaaacgatgtcatctggtagtgaagaaaacaacgacggagatggttggggaggcggacaaggagtgtttgactcgcgtggtgtacgttccatattagacttgaagcttaagtatgccattagtttttttacaaaacaaacacttgctttttgttttctaatcgaacaccgatcaaaatcttattgtatgcatgtgaatattttatagcctagatatatccttttttttttcaccagcctagattaactctcctttttttttgcttttctgtttttcaccagcctagatatatctcctatatccccgtggtggttccatattagacttgaagcttaagtatgccattagttttttacaaaacaaacacttgctttttgttttcttatcgaacaccgatgaaaatctgattgtatgcatgtgaatattttaaagcctagatatatccttttttttcttttttttttcaccagcctagatatatctcctatacccagtcaaaaccataactatttacttattaacaaaattctcaatattttttcaccctttttagctcaagatttggttgttatctaccaaataaatcatttgataaagtttttttttatttgattctaaaatacactccattatttatttgaatgaacaaacatttaaaccagattttaataagattttttttttttacttaatagaagaagagaatatttgttttgtgattttgggttgtctagttttaccaagtcattatttttagaggcccattggatggctaatcacaacgacttgtatttctccagttagccatcaaaataacacatgcaacaacgtaacgtactaatttgttttcttgtgtctgctttagtgttaacatgtgagaagaacatatgttacgagaagatatccgttaaaccaaaaaaaaaaccatgttatgagaaaaaagtttcaccaaaaaaacaattaaaaagtaggttatagagctatttaaattcctacattacctagttgctaaatgagacctgagacaaatatgcaattgttaaataattggagtcaaccaaataatgcacacgtagaaaaaccatgtaaatccattaataattaggtatatgttttattctacacaaatcaaggagcagcctctctaatacttcttctctcgtcgtctctaattatcatgtgaaagaggctgtgccttggcatgagactatcagacgccaccttggcgatgacaaatgtgtgatctacttagtggaggaaactgatcagcaaactcacgatcatcattgtgtagaagttcccgaacaaagatgatttcgagagcctgtaaattgtagattgatcgtaaattgtacagtacacaaactaattaatcaaatatgtatgcatgagtaagtattggtccacgtactttaatgtctctgaatttgaagtggattgaaccagctaattgattgcaagctactattgaacgtcttctcttcgtcctcccctcagtaccataacacatacctgtaaattaaaatgaatcaacattatatatatatatatatatatatatttatttattagtagaatagaaatcaggaaaaaaaggttctcacaattcttcatgaatatcatcgaatcatgaaatttaacatggctgataaccccctcaatcctcacgtcttcggtagtaatcaagctacctacgtgccctatagcagaattatgcctagctggtggcggcagagagagaacttcgactgactgaaacatatggacacaaaaaccaacaaactaatgtcacaaatactgaatatatataactttatatataaaaaaaacttatcttatatagcaagtaaccaagtagatgatttatcattaacgaccctcaaaccctaaactaactaacctcgaaatctaaacacagtaacgtgtgcttcgttatctgctattggtgcaattaaaataaccagtttaagcttcaagaaaagtgtttcttgtgcagcacgcaactaactatgaagaagactagcgaggaatcttgcacccaaa

SEQ ID NO: 6504 - DNA, 1370 bp, Arabidopsis thaliana landsberg
caataggtgaatataagaaccatggactataaatgggttgcagatgacaaaaaaagatataagtatataagaataatgtaccgtctatttcttatcaactttccaaacaagatccaacttcaaggtctagagacgttcaatttctgtgtcaatttcctccatttcagaatcaccatctgtgtctagatcagggttaggaaattgcaactcctaataactgggacatagtgcaacaatagaagttgggtcatgaggaaatccttggacggtcacggacttccgctttaacttatttggtcccctggctttgatgctcttcagagtcaattggaaagatgtagtgccccatgggtgattgataaagttttctatattctctgacatatctgcgtgaatagaataaatttgggtttgccagacgttggacacaacacgccatcaatgagagcaagaatagtgtagcggagacgaatgtctttttctgggaccaaacgcttcttcagtcgactaaccacccacttaacagacacgtcagcttgatcaaataacgagtaccaatactttccaggaaggagtttgcgtttgctcttcctcgctttcgcctttgggggtttgttgcagtttgaccttgtcattctttgaaactctgaaactcagaagcggataggggagccaacaaataccacccagaattcattttctttcttaaccacaagttgtctagacaacaagaaatgtatgagcttcccagaatatcctggtccctccggaatttcaaatagtttaccaaactgggaatttcgaagaaattctatgtcttcagcatccaaactgttagggattaggtcaatcaagggtagctcactataagattgaactctttcactgttgggttcgacaccttcaagaaacaaacgctgaggtaagagaggattggccatctaaacaaaaccgaagagaaaataggttagcaacgatataattacaaacaaaagaaaaagatcgaagaggaaaatatgaacaaaccttgatttttttttaacaaaacctagacggattccttgcaaaacccacagagtcagccacaaaatccccgatatcgcctaatcttcattcatgaaaagtaagagacaaaaatttgggttagtagaatataaaagaaaacagatcaaagacataatatttacaaacctcatgtgttttttaaacaaaacccacagagtcagccgcaaaatcccccgatatcgcctaatcttctttcatgaaaagtaagagacaaaaatttgggttagtagaatataaaagaaaacagaccaagacgcaatatttacaaacctcaggtgttttttaacaaaatacaggcgaattcc

SEQ ID NO: 6505 - DNA, 3345 bp, Arabidopsis thaliana landsberg
  unsure (1)..(3345): unsure at all n locations
gcagttatgtcctttacgctcgaatgttcggaatccatgtcagacttttcgaggatcggcnnnnnnnnnnnnnnnnnnncgaatgtaccagacagagggcgctccccacttcgcaacttcagatcccagatccgagctccgtgtgcattaatcaaggaccttttgaacagagataaagatatcgcgatggcctttatcaaagctctcgcagctcaacacaaaaaagctcaacgaaaaagaagaagcttcgaaagaagatcaaccaaatgctgcggagggtcactgtgatatcaagggagttacacaacctcaactcctaccctagagattggatcgaacttggaattgcagaatttgcccacatcccagattgtatgatgcccattcttgacctcgccagtcaaggggtcgaagtgttctgcaagacgagaaggatttcctagtccgaagtgtgtctaagattccggcattttttctttgtgtttatctttgaataaatttatctttgcttcttgctttgtatgttcgtatagtcgaacttcttgttttcattcgttcgtataatcgaactctccttcaatatgaataaaacaaattttattaatagctgaactcgtttccgagctgcctacgtacccatttcgagatcaagccacaccgtagttcatgtacaaaaaatgcgtgtcctttttcttaaacataaaatttctttaagttaataacattccaaggtcgttggactggcctgccctctaagtcctttaacctataagcaccacttaagtaacgatataaggcccttcccaattaattccgagcttgtctgcttcttcttcccttgtaatgtcgaaaactcgtttcaagacatagtctcctacgaaaaaggtctacttttaatcttggtgttctaatattgggctgtcgcttgctgatagttttgggtttgtaataaagcttgatcccgtttttcattgatggtatcctgtgaatcctctagcattgctgagttttctgcttcattcaaaggtgcctctgttcggcggagttcgggaacattgagttcggccggaaccactccctctattctgtataccaaggaaaatagtgtttccccagtagatcgcctaggagtcgtacgataagcctagtgaacaggttggagctcatcataccatcctccctttaaataacttagatgtttcttgagattgctcaatatagtcttgtttgcagccttggcttggccatttccttgtgggtaccgcggggtggagtagttgacttagattccccactccgagcaaaaagcttcaaacttgtgcgaaatgaattgtggtccattgtcaataaaaatctcgtatgggacaccgtgtcgacatataatgtttttccaaatgaaagtttttaccaccgagtccttgatgctcacaaatgcttcggccttaatccatttcgggaagtagtcagttaagaccaaaagatattgcacaccgcgggttgacctgtgcaatggtccaaagatatccatcgaccacctcataaacaggtatggggcggaaatggaggagaattactccgacggttggtgggttagaggtgcatgaagttggcaacgtttacaccgctgagagtacttaacacaatccgtgatcagagtgggccaataatatcccattcttttaatcttaaaagccattgcccttcctgacaaataactaccacacaaaccttcatgcacttcactcatgacaatttcgacttcgggcccataggtgcataagaggtaagggtcgctgacacctcgtctatacaacgtgtcttttgataaacaaaatttcgcgctaacgattctcatttttctggtttgccacttatttttgggagctcgcgtgtcacaatgtaatgttttattggctccctccaatcagccccccaatctatagccgaaatttggtcgatctcgtggaatatccgtggttccggtttgggatgctcatttggttcaaggatattctcctcgattagtggctcggtttctataactgtttctggaactgcgtctactgtcaaattgacaagctctgcgctactattttcttttgacacgtcgggctcgggtatggttgaaccctttgactttcatcgtttgacaggtggcaattctatctcaggttctccatgatcacgtgccgcagcttgggaccttgtaatgacgggtgtttctttctcctctttaatcctccgttctgaaatacattccaccaggatgactctttttacctcaggatccgacgttgatgttagcgcagcaagtgcatcccagtcgtattttctcttcgaggtttgcgaatgagttcaaattttttgatgttcttagccaaatctttcactactttgaggtatacttccattcttgaatatttggcttcataatctccattgaactgattaacaactagttgcgaatcacaataagcaatcatttcttcagctccaattccttgtgctaacctcagttcggtgattagagcttcatactctgcctcgttgttagaagcactaaataataaacggaatgattgttcaagaatttccaatgttgtagattccaactttattcccactccggatccttgttttgatgaagatccatctacatacaacttccaagtttgattatctggttattcttgcacgccaatgtaccggcaattctggtaaaaaatcagccagaacttaagctttcatggcgactcgcctcttgtactctatatcatactcacttaattccactgctcattttgccaatctcccagattgattcggactatgaagaattgttcgaagcggctaatttgttaacacctcgactgggtgagattgaaaatacgagcgaagcttccgagctgaggttactactgcgagtacaagcttctccatcatcgtatacctggtctccggatccgtcatggatttgcttatgtagtaaattggtttttgctctcctcggtcttctcggatcaagactccgctaactgcatgacctgagaccgagacgtatagataaagcttctcatccgcttccgatttagacaatataggtagagtggtcagatatgctttaagctgtccgaatgcttcctcgcacttcacatcccaaaggaactccttgttcccttttaaaatttgaataaaaggcaatgatttatcggtcgatcttgaaataaaatgattcaatgccgcaatccgactggttaaccgctgtacttccttgaaatttcttggagatgagcatgttgagaaaggcattaatttggtttggatttgcctcaattcgtcgttttg

SEQ ID NO: 6506 - DNA, 1439 bp, Arabidopsis thaliana landsberg
aattctttcaaacatttgatgttaagaaacaaaattcaccaaaacatttttcagttattcaggaaatattttgtaagataaaatgcaaatgtgactgacctctctttgcgtttggttttgcatcaacaattgaaaacatatgtttagagttaagggtttattattcaaaagttatacaccaaatgcaaaagaaaacgcaaaacaaataaatgtttagctgagatggaaggaaaagaggcaaacccgagtgcgatcagctggactagcagaagctaaggaagaagtgagcttagagattggaaggagaggagctttctggtgagagatcgaagaagcatctattggcaaaggaatgataggaggtaagattccttgaggaacactcgaatccattccgttcctcccgttactcgcaccgttcatatatctcattcccggggacgggttacggtgcataagctgtcaatattcaatccaactcagtttcatgattgttgaaaactataaacagactcagtttagtaacatacttgttgttgttggatgtgttgttgcatgttagtagcaccacgcctgaatcccatacgaggaccggtctgaggttgtctttgaagcggataaggcacgatgaagttgcccgggccagaacctggacgcatcccgggcatgaactgaggctggaatccatatccaatgggctgggacgggaccatacttgctccgttttggcctacgtacatgtgttgaggtagaccgggcattggtccacctggcgggtgatggaaccctgacattggccctggtgctctaatctgtgaaaacaacgcctgaaaaaattgcaaacttatgtacttagtcacacatatagctttaacaaacccattttttttaaatatgttaaaagagtttttaaaaaacctgtaagtgtgctcgtctatcttctttgcgctgcgcaagagctatgtatagaggatttcttccgatcatcttcccattcatttcactcagctgcattgtctcatatgtaacaatctctcagatatcaaaagagacgaacaataaaagaagaatatattatagttttagtaactcacggctcttaaagcttcttcaggattggaataagcaacaaaaccaaatcctctgctcattccttgtggattaagcataacctacattagttaaaggattgtgtcaaagacaacgtaacatcaacaacatatatatttatgaatatatgtatgagtttttaattaattattaccttggaggatgtcacatttccatactcagagaacatctccttgagtttctcatcatcaacactatcatcaagattcttcaaatacaggttcgctccttgagatttctcaaaccggtttatcctctcttgctcaaacttccttcttagctcttcctctctctcagacttcttttgc

SEQ ID NO: 6507 - DNA, 2766 bp, Arabidopsis thaliana landsberg
  unsure (1)..(2766): unsure at all n locations
atactagcatatctcatcattatactccagtaattatacctacagttcacgttagtgtgcgtaaactgtgtacgtttcggtcttgtttcaccagttcaaggtgggcaaataaattgttccggacgaagtagtggcgagtgaagaaagtgaaaggtaaaatgtcgcttcatgttcattgccacattagcggaggccacttcctcttgaatctcatcgcgaagcttcggtactacatcttttgcaaagaattacctgtggtaagttacttttgtgcgagcctttttgagtaaaagtctagtggtttattgtcatgttaattaggaaatatgttacaaaaatattgtagataatttgtatggaacaagcaaagatatgtaatagcacgattgattgactatattggacctattgatttataggtactggaagcttttgcccatggagatgagtatttgttaaataatcaccccgagctacaagaatctcctgtttgggtttatttccattccaacatcccggagtacaacaaggtcgaatgttggggaccgctttgggaagccatgtcgcagcaccagcacgacggaaggacccacaagaagagtgaaactctaccggagctaccttgtcctgatgagtgcaagtgttgctttccgacggttagcacgattccgtggtctcatcgtcattatcaacataccgcagcggatgagaatgttgcggatggcctgttgggaatttctatacctaaccctgggaaatcaaagggatagatctaatgtaaatgtgttttttctttttctttggtggttaggaatgttagaaggagcatgaaaatctatttggtcggtgttaatagggagtgacaattgtataacataagtttcagtattttacaaattccttatatattaacccatccacgtgttatacatgtctttttattgtatgaataatcgacacaagataaatagtaggatttgggattaagtcatgaaattaaaagacatctacttttggaaaatatctctctttgttagagttgtaagagagtgatagagagatgtgtagcttgatggcaagcttgttgctcccagcaaacttgaaaccagatttttcagacaaagagagaagtagctcaatcccttcaactactagaagttccaagaggaagaagcaatctatgtttcctgtaaaaatctaaatcttttacctgagaaatgttttcaaaactctgtttcttaaagagatatgttttatctgaaatcaaatgttagtgttatttttcattttgttttgaaatggtgaaggttgcaagactattcggacaggcgattttcgaagcttctaaactgaatgtcaagttcttaggagttgatgagaagaagcatccaccgaatcttccaagaacttacactttcactcatagtgacatcaccgctaagttaactttagctatttctcactcgatcaataactctcaggtaattagttatccattacctctctacagtttaacacatgtaaagacatggatttagaatttagagttttagcaaacctgagtaagtttttagcccatggttggattagctgcaaggatgggcaaacaggttgtaccgagacgaagtagttgccgaatggaggaaggtgaaaagtaacatgtcgcttcacgttcattgtcacattagcggtgatcattttcttttggatctcattgcggaacttcgttacttcatattttgcaaggagttacccatggtaatttttttttaaccaagtaactatattctagtggttatcgacttctcgtctaaagtaatgaatcaatttctgttgtatataattttttcatagcaaacacaaacttttaaggattagttaagatttcagtataggattttgatccatcataggatataaaatttgatattccatatgacttgtaacagtttagtggtcttttaattatatatatgtgaccaattgaattattttataggtgttaaaagcttttgttcatggagatgagaacatgttaaacaattatcctgagctacatgaagcttttgtttgggtgtatttccattccaacatccccaagttcaacaaggtcgaatgttggggtcggttatgctaggccacctcgcacgatggttgtaagactcccacgtgtgaaatcttaccggaaccgccttgctttgataagtgcagctgttgttttccgagggtcagcacgatcccctggtctcattctcatggttgcagccatggtgaagaggatgataatgtagcaatagccggagggaatctattgactaagtacatgtatacgcgaagtaaaagaaaatagtagcacatatctttcgatgtcggagagaacctaaattactttgatgctctcattaattaatactttagacgaagaatccaaacttttccttatgaataaaaagaagggttttgtgcaagaaaaaatctcgaactcatccagttttgcaactttatccttgacctcttacatatgtagattaattatatgaagtctaaaataatatacactgtaacttttctttgtttttttttgttaccactaattttgtaaaatattaacatataatatgttaaatcgaaattctcatgatgaagagttcaattctatcttcaaaattntaaaattttaatttatacgatcgtaaaaacgtttacaatatatatataaaagttatattgtaacagccgaagtctttacagttcaaagtaacagtc

SEQ ID NO: 6508 - DNA, 3847 bp, Arabidopsis thaliana landsberg
atatatctactactgtgttagtatacataaaggatggtctaatacgtgaaaacacatacctttagagcttccacctctgatgttaatgaattgattttttcagtatcctcaaccaatacgggagtctccttaatgactggaggtgcttgttcaatagctttccttgcagcctcccgctctctaattacagcagcgtttgcttcttcaacttgcaaccgcattgtctctaaagcctcctgttgttttgcgtattcttgggtttttgcttcttccagctcggtctatattagcagggattatcaatgactgtgtaaaaaaagcttgaaatcatgccagtgtatggaaatgaacttactctctgtcgcttttctagttgtaaacgccatgttaattcctcaacacgctcttcaagtttgtctttcgcctctgtaagggcttttgtgtctcgtgcggcctgattcagttaattgtaaaggtaagaacctgatacgtttcatgaagttgtgaaaatttagcagaacagttttataaaaccaaaaaaagattgaaccatcttaagtgacatttctctagaatccaagagaaagattaaaaactctaaagaatatctctctttattagtttaggaaaattctctcaaaacctaaactctcaatctctcttaaaacccataaagttgtatcacaccttgatacctccttatataataagtttttaaccttatcctaattattagataactcctaatataagataactcctaacaatatattctagattatctcctagaataataaaagcttaatttccttatctctttagtaacttgctcttcaagtcacttcttctctttcaagcttatcccaacacaaacgattcaatcctaaaagaggaaccccaaaaaatccatatgctgaattaagttgaatcttcatctccaagcaaactaatcttgagattcttttacgtttcttcgcttgagaaattggaaacccaaaaggagactcggaggagaaacaagtagccataaaactccaaagaagaatccaaacaagtacatgagcaaaaaagccaaagccaagaaaccatagatcatagccaactctttaccaattcttttgaaaccaatggtcttatagccatacaaagcagcgtcgaacaaaacaaatatgatgcagttattaggtccacaccaattagcacctgccatcattatacctaaaatccccatcgttccacggaaagttactttggataactcaaagttgtcgaaatcgaagaactcaggcttctcaccaagaaacatcatccacagtgaaatcatcgttgcaacaaggatcatgtcgtatttgatcgtgaatttgatgaaatctgcgtcggatggaatcaatctgtaactaaatcccacttgcttcatcgttttaatggagaagaaagatgcgtaagcgtaatcttgaagaaagtgaagaagatgaaacagaacaaaccaaatcagaaaaagataaaacgctgagatttatatatagtgggggagttatagatgacgagatcgtatccgttgatgagttttaatcgacggtttataaaaagaatctccacgtctatcagatcgctgacgtgtcagtttgtttttggtgtttctgggttttccaggcccatttgatttttaggatcggttgacttgatttgatctggtccaatcggttctccaaccggttcaaactatataccaacaatagaagatgcaatcttccttcttttttttttttttttctcagagtaataatcttattaaagttaacaaaccgtacatggacttttaaccaaaagccccacaaacattaagatagcaggaaacattttgtatcccaacatgggcattatatcattgcctaacggagaagaaatgataatgtgactctatccaaaccacgtgtcaagtagctggaaacaacacatccacacgatggatgaattatcaaaagcgcttcgtcatcaacctccgccgactgagcatcgattttccggtgagaaaaaacatcgccgatgttgaaatcgaaacttgattcttctggatttcaccggtattaaaccaatcgaaactccaaatggagaattagtagctaaaggcaatcttaatatgcaaacgaaaacttctttcttttcttcaacctacattgcaaatctctggattgaatcctgcaactcgtgaactcaaaagatcgaatcagataataatcatctttaagtgacgaatcacgtaaatcgctattaccaactgagaatcgatgagattattgaaaggaaaacataagaccccgggtaaatagggaagaaaagccaatctacgctagaggataaccaggatccgaccaacaccgtttatggaaaccagacgaaggcgggcaagagccagccatcaccactaaagaagctgtagatgccagacacaaaaagccaactaaatcggagtaagatagctaccggaataatatccggccgaccaaacaaaaggaaaaactttccctactctctcaaaaattttgagaaagttttcatgcactcttcctttagaataacgaattgggtcatcaagaaatgctcgtacacaatacacttaagacaagctaaacaaaccgacatatatagatgtttcagctaagcttcagaaggagaaattaattaatacataatataatgtcaataaatgtacagatacacctgcataagattagctggtgtgaaaaacaaagtacatccataactagaaggcataaataaggttttggccacattaacgataaaaactaaagcctttgtggaaacattaatctataaaatctagtaaattaggcggcttaaggacagcggttcaggtggagcttaatttccatgtattaatttcgagaactatatgtcccggtttcccatcagtcgttctcctcaaaaccgatttatagtcacaactcttggcgttgaagtttatatggaagatggcattactagacttcagcttcatacgcggctaactgtgaatgtcacaagtttccacaattatcttcttgatctccacaggtaaacaagactcaaatccgtccagcaaagaaaagacttactaaaacatcaaaaaattgcataagatatataagaagactaaacacaaacaccctgcaaggttcccactctcaagtacctcattatatctccagtaggagaaaagtgcgaattcagtatatagacgtaaccactcatttgcacatatgtcttgctcctgaacctatcaaacacaacacatctttttatagaagaacgtttctttcaaagttcaaacacatagaagaaaacacgttttacctcgtagaacctcagcttatcatcgtcagctcctagtttggacacaaagttgggcataacacctctgtaaaacttatctattgcttcctcatccacaagacagatctctccgtctacaatattaaacacacacaaattcaaacttcacagctacaacttttgaatgtttagatatcactagtaatagagtttaccaggtgttttgggtttgattctgcaaattccagtagagactcttaagtcctctccgttcctagaaaaagatcttgtgaccaaggtctgtaaagtctgtgctgaattatcagcaagatcattcacctccacggttatatggaaagacatagctttagggtattgaacattgtatttaggtatgcgcatatactgcaacttcctctcctacaaagaatgatacgccagccaataagacaagattccacacagttgtcactcagatatgagaatactcaaagtaccagtcccaacattgttc

SEQ ID NO: 6509 - DNA, 1827 bp, Arabidopsis thaliana landsberg
cgatgtagatgttccttgcgtgcttgaaaacaaaaaaaatccaaacgattcttttcagttttcatcaatcaattgagcacctgcttccttcagatttatatcactatgaaattagactttgaccgcaaaaaaaaaaagagacttgatggacttagggtagcagagaactgtacaaggtgtttaagattctgaactgtccgaattggtcttctgtcttcagttttgtttcgaatccctcccatagatgtattatataagaaatgtaggttatgttcatgatttcttttttttgggagcaaccaggttatgttccaaaaatagtatggttacagttgtacaaaacagcaactaaggagataaagttttgaacagttgaatgcagaggaaacactcataacagattttttcaagtcaataacagacacttttttgcaaactgtcactctagctaatcattaaaaactggatattgagcctgatttgttgtcttcgaactctcctattcttggcgtttcttttttttctcaatccattatgctcctataaatatactctttcaagtttcaatgcttgtaactttcttcaggacatcttttctggacttacaaacatttctcgatcatttatcgatcagcgtaaggtttcgagaaaaccacttcagttagagagatggtggaagaagcatcgaaatcagagcagataaatatcacagaggtgtggacgacgacatgggagacaccttacattatgcggctggctctctctgccggtattggaggactcctcttcggatacaacacgggagtcatcgcaggggctcttctctatataaaagaggagtttggtgaggtagacaacaagacatggcttctaggagatcattgtgagcatgaccgtggctggagccattgttggagcagctataggaggatggtacaacgataagtttggtaggaggatgtctgttcttatagcggatgtgctcttcctgctgggtgccctggtgatggtgattgctcatgcgccgtgggtcatcatcctcggcagactcttggtgggttttggggttggtatggcttctatgacctcaccgctttacatctctgagatgtctcctgcgagaatcagaggcgccttggtcagcaccaacggacttctcatcaccggaggacagtttctatcttatctcatcaaccttgccttcgtccatgtaaccaaccaaactaactcacaaatatgtttattttcttttcttttttaagatttgaaaagtctctaacttactgatcacttacacagacaccgggtacatggaggtggatgttgggagtctcggcgattccagcgatcattcagttctgcctcatgctaacgctgccagagtctccacggtggctctatagaaatgataggaaagccgagtcaagagacatcctcgagagaatatacccggcagagatggttgaagcggagatagctgcactcaaggagtctgtccgggcagagacggctgacgaggatattatcggccataccttctctgataagctcagaggcgctctctcgaatccagttgtccgccacggtctggccgcaggtatcaccgtccaggtcgcccagcagtttgtgggaatcaacacagtcatgtactacagtcctactattctgcagtttgcaggttacgcatccaacaagacagccatggctcttgctctcataacctccggtctcaatgcagtggggtctgtagtaagcatgatgtttgtagaccgttatggtcggcgcaagcttatgatcatttccatgttcgggatcataacttgcctt

SEQ ID NO: 6510 - DNA, 652 bp, Arabidopsis thaliana landsberg
tgtagatgacggatatttttgaaaacaagcaaagatgtgtagtttggctacaaatctgttactaccatcgaagatgaaaccagtttttccagagaaactgagcactagctcactctgtgtcaccactagacgatctaagatgaagaaccgatctattgttcctgtaagaatctcaaatctttttcctcttcactctgttttcaaagttactatatttgttaataatttcattacttgtttgatttatgttcgtttccatgaatatcgattaatatttctggaaattattagaaacaatagtaagttccattactttagtttgtatactctgtttttagggtttgtctctaagttgcgccttgtttgaatctaaaatttgatgactcctattgaagatttgacctttctttgttttggatggataaggttgcaagattgtttggaccggcgatttttgaagcctccaaattgaaagtattattcttaggagttgatgagaagaagcatccagcaaaacttccaagaacttacactcttactcacagtgacataaccgctaaattaactttagctatatctcaatccattaataactctcaggtaaaattataaccctacagtttgcaacgtttagtggttgcgtaaaactgat

SEQ ID NO: 6511 - DNA, 958 bp, Arabidopsis thaliana landsberg
  unsure (1)..(958): unsure at all n locations
gcgaaggaagcagtctatcaaacatactggattggtgccaccttacgttgataagttgatgacccagactatgatgaaaatggaaggcggcaaaatcgaaaatgtcactaactggacatatgagatagtagatcgtttcggagggaatcacctagtttctttaaatgatatgaaatgcagctgcaaagtttttgataaactcaaaattccttgcggtcatgctatgcttgcagctaacagtgtaggggttgattttggcactttggttggggaatgtttcaaaaccaaaacatgggttttaacttannnnnnnnnnnnnnnnnnngaggctaatgccttagagttagatcaaaatgaagaggttaaagaacgtgtgattcttccaccaaggacaaggaggccgtcgggtaggcgaaaggcaaaaagaatagcttccataggagaattccctttaagtgtggtattcaatttaaatgtacgttggcccatatattcacgattataacactttgttttgaatgatccacagaaaggtgaaggtggcaagggcaaagccaaatagatgttcgccgttgcaaaggggttggtcacaacagagcacggtacaacaaccccatataatcttgcacgttataatgtagaatcttgaaatggtttaaattgttttgtacaaccatttagtaggtttaattatgtactcgacgtacttgatgttttaatgatgatcaattgtcaagattaagatacagtctgaatggtgatttgaagacactttaaatggatatttgatggttagttagccttttatagtatatgttgctcactattgtatagataacaaaaataggataaaatcttggaagagtaaaataagggcgaccagatggttaaaccctcgaaaactaaattccaaagaaagaccaaatattaattcttccggcgtttcttggtcgtttac

SEQ ID NO: 6512 - DNA, 901 bp, Arabidopsis thaliana landsberg
  unsure (1)..(901): unsure at all n locations
taaaaaattttaaaccatttaaaggtttttcattataacatggaagattatatagggttgctgcaacgtgctctgttgtgtccaacccctttgcaacgcgaacatcttatttggttttaccctggcaaccttcacttttctctggtcattcatagaatttttagtttatcaaaaactttgnnnnnnnnnnnnnnnnnnnnnnnngaaaccatgtgattccctccaaaacgcccaacaatctcatatgtccagtttgtgacattttggattttgctcccttccattttcatgatagtctgggtcatcaccttgtcaacgtaaggtggaaccattcctgtatgtttgatagactttttccttcgggctgaaaaccatctggttaacatagccctaataaacttcaccaactccaaaataggtgcacatctccctagccgtattgcattgtttagagtttctgcaatattgctcgtcatcaaattatacctctcaccttggaaatacaccctactccaatgggctggtccaatcttctccaaatatttgtcacattcataatttcttgattttatttctttgtatagattcctaaagacactcatcttgtacacacagccaacattcaacaccatctttgctaatcctttgctcttatatcttgatgtaacatttcgctggagatggactatacatgctccctggtgtgctagtggaaaaactctgctttttgcaacgtataggcttggatgtctattagaaattattgttagtgttgcactgtcatcaataattctctctaccttctacataaaccaagtccaagcctcgtcattttcactatccactacagcaaaagccagtgggaaaagttgataatttgcgtcttgtccgctaggagtca

SEQ ID NO: 6513 - DNA, 509 bp, Arabidopsis thaliana landsberg
aaatgtgttcaatatgtgctctacgagctcctgatcgatttttaccaccatataatatttaacattgccgaccatttttgaacactttcaagtatacaacctacctagctaagatcaagatggatgaagcgtaacattttttcttttcatgcttctttctttttcaagggattttttatttttagttttctctattagtctttttttttttactttcatcatttaaatcaacataaactataaatatatctaacatactataatctactataaaaaattcatcaaacatacgatttgagtttacatttgattccattttggataaaagtgattattttatgtaaatatttatataggagcttttatgaatataggtatgttttggtcaaaagtttataaaaaaaaaaaaacatatttcacttgggcttataaatttgggtacttttggactaatgaaaagacaattttgtctttggatttattgttgataaattcacttgatcttctcc

SEQ ID NO: 6514 - DNA, 794 bp, Arabidopsis thaliana landsberg
cgatagcataaatagccaatccaatttggcaatccgacttgctagcataaacttttcctttataaccatcttctccgtcagccttatctatatccggcattatggcagcttcatactctgtgtcatcaaacagaggaggaatatcaaactcttcattatctacctctgatagctttctagtttctcttgcagtttcgtttgtattacaatcacctgttctattgttaacaacatttcctgttccactgccgtttgcaagtagatcaatgggatgcttaattgaagacgttagcaaatcatcaatttccctgttcgaacttgcaccttccatactagccactaattttgtgtctactgttggtgacgcaaatcccattctaacatcaacatcttcttccccgacaaccattatatccaatgcatttgaaccacccatgtcctcatccaagaaagggctccaaaactcgacatcataagatttggggttttacttcttcaatctcatcccaagtaagatcttcgcttccttcattcaatatatcttcttcatccggatcttcagatataatttcactcacaacaggaccctgttcacaaccaataactccttcaacagttttcgagttctgcaagaaattcttcatcttctgaggacagcaaaaactcttttagcccagcctttgatatactatcttctgatccacatacacgtttcgacttattccctcttccgtcatcttccttaacagaaatattcttcactagcccaccatccaacctcgaattgcttaaaa

SEQ ID NO: 6515 - DNA, 716 bp, Arabidopsis thaliana landsberg
cctgttaaggacctgtcccaatggatttgcaaattttgatatatgaagatttaaggatgtccgcatcgggtagcgggtgttatatggctagggaaaaggcagtacctgatgtattaggggaggatgatgatagcttcaccaaattagctgaatatttggagtttataaagatgacaaaccttggtactatggctgactttgtgacagatattgaggaaaatggtgatgaacgttttctgtatatgtttctggcatttggtgcctcaatccagggcttcagatatttgagacgggttttggttgtggacgggactcatctaaccgggaaatataagggggtcttattgactgcaagcggacaagatgcaaattatcatgtttttccactggcttttgctgtagtggatagtgaaaatgacgatgcttggacttggtttatgcagaaggtagagagaattattgctgacagtgcaacactaacaattatttctgatagacatccaagtctatacgttgcaaaaagccgagttttttcactcgcacactacggagcatgtatagtccatctacagcgaaatgtaacatcaagatttaagagcaaaggcttagcaaagatggtgttgaatgctggctgtgtatacaagatgagtgtctttaggaaactctacaaagaaataaaatcaaggaattatgagtgtgccaaataattgagaaga

SEQ ID NO: 6516 - DNA, 4753 bp, Arabidopsis thaliana landsberg
  unsure (1)..(4753): unsure at all n locations
agataagatgaaattaccataaaatactttgcagagattctttcgaaacataaaatataaacttcgaaatgcatcctcccatgccaatgttcgcttttgtaggaaatcaacttcaccttaatatagcaaaatgaggatctctttataaaactcagaaggaagatgactgataagaaggtatagcttaagaattctcattaacaaacctctgtctgatacagatgnnnnnnnnnnnnnnnnnnnnnnnnnnggcaaggtggactgaggataaacccacgagtgtagtgacatggaatttaacacctgggaaaccacagatgctccagaaccactactgttatcttgatttaccacattacacgacagcgacttcagctgtggcataccattgtatgtgctacccatgattgatctatgtaacctagaacatgagaatggaatataataaactgaatcaaactttgaatcaaaagaaaaccactaggtcaacaagatttaatatgaaaaaagtgaagataaagggaatacatctgtgtgatgacaacccatattttcatctatcatcatcaggaagtggtatgtgttaaactattacgaggtgtcaggtgtcaaggaggaatcactcagattcaacttcaaccatcatatgattctattacacaatgtacatgaatatcagaaatagctcaactcaccaacttaatggagaagaggaaacaagtcgagcataagtcttcaaggaaaggtccagaggaatcttctgcccagaaacttgaaactcggacatgaaacttccacttaatgaagcagtatcatcttccccagttatgtcgccaggatgaaccagcaaaggttcacaagtagcaagtcctttcaatgctttgttctgttgaaagatgacatcagtttcaccaggaccagatacataaccatctgacagtatcaaagactacctagtgaaacataccatatcaatatctggcaagcaggataattcttcacccctggttgaaagttgtgtgacactgcgaaatatgctctggctacatctctcatttgtttgacgagcttcagccttagtgtcatcaggaacttcagtagaagcattattctcctcactgctaatacattaaagcattaacataagttgcagcacataaagtcagcttactccagatagaaattgcctgaggggttttaccgaataagttgtcttttggtggcagcaagattcgagagtaaagaaacattgattaggctgctggattgcttcgcaccattttcctgtggtaaagacaaaaaaactaataaaaacgatgtttactaaactataatactttcacgaaatcaaaagaatcaacaatagagtcagagaggtcatgaaccttagagttttctttgccagagagcatccaaggcctagcctttttgacaggatacagttcatccatacgcatctcaatgtattttggattcttcgaaagctctggtttcttgaacccattttctctctcagcactactgccaagacaaatctagtaagaaaacataaaagttgaaaaacttgacagacatgatgctttataccttttgcaaggacgcaatgcatcaaaagcttctttagcttggtccacaaaagcagtccgtttcaattgttctccctgttgagtgagaagggtattcaaataaacaatcttcagagataacttccaataactcaacgaggaaaacattgcacaataaagagaaagaatcaaacttactctcagttcagaaggcgtcttcctcttagcaactactttcgtcatttccaaatgatactgttcgcttgatccccaaatttacctaaccccaataccaaatctgacgcacaatgttattattccattttaccagcaagacctttgtcaacattaaaaatcaattcggttcaaaaatcctcacaatatgaaccctagaaaccggtgaatagtaccagcgaagaacttacaagcgaaaaaaacaacaatcacaaacataaatgagagatatgaacatactcaccacgctcgatggttaatctcttagcgatgtaaacatagaaacccagcggcgattacgagctcgtcgtggtgtgaatctcctccacggcggagcaggctagggttttttcattattctctctattttgtaaaatttgggggaaacaaacaaaaaaatagtggacagtgagattggagggaagaggaaagagcgtgaaatcgaaaagctgcttttcaaaaaatttggtcgaaataatttgggattccctcctgttactgtttttgtaacagtcaatctaacgccgccgttactttcataacgttgactaatttcttaaatcagccattgatttgtttcggttctttccggtttatacatgtaataaccaagctgaaccagcaagcaccaaatataataatgatcaaaatcacttcaaccaacaaacaggctcctaatataacttggtttaataacaacaaatcaaatgttttgcgaccaaaaaaagaaagaagaagaagattaacctgtctctagtagcctcgacagacaaattacacataaccaacaactcttgtctctagaaaaatacatgtcttttcatattacacaatcctaaatgatctctctgcctaaaaggtaataaaacacacaagcaagagcctcctccaatccattgagccacttctttgtttacttctcttgatgcctgccgtttcttttcacctgaaccacaagatcaacaattctgtttaaatcaaactcattttacaaacacaacaaaagcaaagacatggcttcatcaatattagtcgtcatctatgtgttaatgggtctttacttcctagattgaatctaccagggggtactaaaacatctttgctattaataccataagaaaaacaaaggaacaactatgcatccaaaggaaacaacacatcagctttcacaccagtaaatatcagaagcagtacaaaagatattaaaacagagaagaggcaatgaagcagatttacctgaaccaaaactccatctaagaggaaggacataccgctgcatcctcctcagctaaagacacaacataaggctgaactttgaatgtttcagtaacattacggctgagctcgtacttcacaaccttcgtcccaaatatgttgaaccttcctgcgctattgtaagcaacctccgcatcagcacccttcctaaaaactaccctagcccggtttttctccctgtcaacttcagtctgcaactcctgtatagggccaaaatgtctgaacattttactcagactcttctcaggaggtattgtatcagtttcaaaaaagttcattataatctcagctggtgcattctcatcaatgtctgccggtttcttagtggctgaatgaggaatactgatctgagactgtcgtcttctgtatggtcgccgagtcctttgaacctgagcaggtttcaactcaaccggcacgacttgataatttcccttttcagtagccggtgtttgcccttcaccaccattatggatcactctgtcagtacagtatgtgtcgcccatttcctcaaactcaaatgcttcagttcctgctacattagaattggatggtctacctcttttcttgcttaccttttccgtggtaacttgctgcgatgctgatgagtttcggaaatccaagaaaaagccagtagcaatgtcagatacaacgttctctttaacagggtctgtggctgcgcaatgaagctgggatacaaaactctcaacagaaagagtttcatcaccaaagttactacccttcaaaactgaaggagatcctgccatctgacttgcagccctggctatgcatgcaccaattttaaaggacggcctttcggcaaaagacaccttggcgaatgaaacagtcttcctaccttctcctggtgaatcctcactcaggacatcagcctttcgtttcacaccattggtcttaacatcagaaccagcttcatcatcagcataaacaaaattgttgtgattttcttccatttctgcattttccttttggtttgggtcgaaacttggagcttcatgagtaatgtcatcttcctctatcattgtatcttgtacatctgctgttttcttgtcgaggcattgatgattcttatcttgttggttttcttcagatcccaaagttgcatcagaagtctcttttgaacaatcagttgcagcagctggagattctgccccaacaccaacacgggcttcattcgattcagtttctatatctgctgtgacagcatcctctgccatgtcagtaactttcttatcctctttcaaagatacattcccggtttcggttttaaggtcttgtatatttcctgaccaagatgatacaccactgaaatcaataaagttggtaatatcagaagttggatcaaaaagagcattatgatccaacggttcaacttcacctggagcagcatcttcagtgggactatttgggattgctgaatcagcagattcaattgttcccgtaagatcacttgtcatatcagcattatctttgcgttcatcaatttccattttctttactacattggattcattgttgtcagcttcagctattggaacatcttgtgtttgaaccatacttgcaccagcagattcattgcaagcattatccgaaccactgcctactttaacaaccttttccacatgttcccctgccacaccatcaatttccatggcaacaccgtt

SEQ ID NO: 6517 - DNA, 1990 bp, Arabidopsis thaliana landsberg
gagacggagaacgggtccaagtctcctggagatctaagaaagttgagcctccaagtccacgtgcgttgcaaattcgttcaagagttaagcaacacgcagcaaatgcaacataaattcaacaaggcgttatcttttgtttctcttttctttctgaaagccaaagatcctaaacttggtttgatcggatcgctaaaaaaactattgatttttcttggtttctctaggggcgatagtggaagttggggataaagctaaagatcatggttccaacgagatacgtcgatcagtctctgaggaagaattatcggaattacttcaatatctaccagctcagaatcctacttggaagtgagtttcttaacacttcataatcttttttgagctaaacatgtgttttgttagaagcgtcaatcagatcacgctatatgctaaattgttgccatcactctttcccagttttacaacttagggaatgttgtgtgactacctttttcatgtagctcttagccttatttgcatttttttcaaggaaatctagtggctcttacttgccagaatgtaaaacagtccctaatctctttcacagtttaggcatatgctacattgttgaaactggagatgtgcaaatatagaaacgtgctgggatttcgagagcatgaccataataagatacactgatgccaatattgcacttttctccttttttgattcctttgatcttttgaccttcacaagttatatgatgaaattttccttttaactactgaaccagcggacgcattatggattctgcctcgccgcctgagtttgactgcgagttttggtctaaaccggcatccaatatcaggaggaaggccctcagacgttcaaaggcaatgcctgcgttactcaaggtcgaactgcttcctacatgccacattctaaatgatgtgtctggcagaagcccaactctattgaatgtcgaaatgtaccttttcccagatgagaagaaaacagaaaggtactcaaaacccctttctatgaaggacaagcttcttattcttgttgtatctctgttatcagaaaacttatcatctcagggcatgtacactcattcttttaggtttacaggggaacatgctactctgttcaaggcaatggtaactcgcaaagtcatggccaaagctaatataaacggcactgaattgttaatattctcctcaaaactattggacaagacctcccaatgtatgtatgcattctgaatttctgcagagcttttagtttgtgcatagattttcgatggataacatccgttttgtgttcagcagttctcatcaatacgcagaagaaaacagaaaacttcctttggggtttttttctccagaccaagaactcactaggacttgttccagaaactgcttctcaaattgataatgattttgatgatgggggtgttgttgacatggacttagacaatgaatgcctgaccccgcgtgtggctctgaagcttattacagaatcacaaaaaactccctcaagatcaccggagaaggtgaagggagaagcaagtgtacctcctggtttcgagaagatatggacaccacccttggtgaaacttaatatacaaggaacatcaaaccctctgtctgatctaactggatcggctggaatagtgcgtgaccaatcagggaagtgggtgtttgggtacatcaggtgccataagagcatccctgaagtcgtagctgggcttttggctatataccaaggcctcaaatatctctgggacagcggtttccgaagaatccacttggagacaacaagctttgagatcatcaatgctctaacaacaaaatcgtccctgttttgtaaaagtaaaacgcttctaggagcgtgcaaggacatgatattgaaggagtgggagtgtgacatttaccatatccccaaagaacagaactcatgtgcagaatggttagcaaagagatcagaagaacagcctcaacccttagtt

SEQ ID NO: 6518 - DNA, 1168 bp, Arabidopsis thaliana landsberg
gacccacagctttgctttgtctctagagagatatttcttcaacagccttgtcttcttgagctcgttgcccctgttaagatctgcggtattttacttctctctcgatttatcagtttttttcctgtttgggatctgagattcttcaattttcatgattgtgtaatgaaaaaagtttgcatttttctgtgaggagatgagcttagatcattaaattggacctcatgaggttgaataatgttaagctaaaggagcaatgtatctttttaccaattgatgtcacttaataatagatgtctttgttgggcttaccctgttcatggagtcttggaatttgcgtaagagaatctagtttagtcattagaatgctaatggtaatagagcttgtacggtcacgtgataggaagcaagttcttcttgatcttttcttatgaaaatgcattggtttctctgcttgtattcaaacatcattaatcatggttcttatgggttcataggttgatgtgtagctttttgtctttgtattgtttcaggtgatattcatggtcaatactcagatttactgaggcttttcgagtatggaggtttccctcctgcagcaaactacttattcttaggagattacgttgaccgtgggaagcagagtttggagactatttgtcttctgcttgcttacaagatcaaataccctgaaaacttttttctcttaagaggaaaccatgagtgtgcatctattaacagaatttacggattctatgacgaatgtaaacgaagattcaacgtgaagctctggaaagtgtttaccgacacttttaactgtctccctgtggctgctgtcatagacgaaaagatactttgtatgcacggtggactatctcctgagttgatcaatgtggaacagattaagaacatagagcgtccaactgatgttccagacgctggtttgctctgtgaccttctttggtctgatcctagtaaagatgtcaaaggctgggggatgaatgatcgtggtgtctcctacacttttggtgctgacaaagttgctgagtttttaataaagaatgatatggatttagtctgtcgtgcccaccaggttagtacattgtataaatgtttcctctagtttttttgtttgggaaatcgaatctgctgctcaagaacctataatgtt

SEQ ID NO: 6519 - DNA, 1590 bp, Arabidopsis thaliana landsberg
  unsure (1)..(1590): unsure at all n locations
aaagacaaaggaagccaacatgctcttaaatggacaatcgacaatcttgcttctcgtggccaaaccatttctcttattcatgtcctctgcagatctcattcttcttcaggtcccaatcttcttctcacattcatgggaatttccagctttnnnnnnnnnnnnnnnnnnnnnnttaagttctttttttggtttcgttgttgcagatcttgaagaaggaacgccacaacagaaacagcaaatggagaagatagctaaagatctctttgtatccttccactgctattgttcccgtaaagaggtattctctgaatcaaaaacccttaaaggtccttactttgaacaaccctaatcgattctgtttgagcagataaattgtcgagacattttgctggaagacgcagacaaagttcgagccattaccgaatatgtttcatcttctgcaattgagaacttagtcgttggatctgcatcacgtaatggcttcatgaggtaattaaagttaccttctttcagattctgtaacaaaaagtttggatttttgttcaaaggattctgtttttgatgactctgagcagaagattcaagacggatttgccaacaacagtgtcaaaatcagctccagatttctgcaatgtttatgtcatttcaaaaggcaaaattgcttcagtacgaaatgcatcacgtcctgctccttaccaaaattcgatgcagcaatgtgaaattgacaatcatcacccacatactcctgacaaagcaccaaagtaccatgaccatcccaattctgcaggtttagttcattcctctttgaaaagaataaaataagttctttgcttttccaaaagctgatcaattttgtgtgtttccattgattttggaaacaggtagtacaccatctagaccgcgcaaatcagttgaagcagataggtataggaattggaagcttgttgtgatgtctttaaggttaatgtcttacataaagtcttaaaagattcaacatttatgtttttttgtagatcgccgttggtgaaaaggaagccatatggggacttctatgattcagatagtgacctttcgtttatcagtccgtcttctcatcgtgactctgacatttccttcatcagctcaggaagaccaagcgttgagcggtcttcctttagccttgattttcctgaatctgcaaggacttcaagaatgtcaacgagctcagagcaaagcattggctcaaatcgtttgggaattaagttcagtgatcctggtttccttaacgaatcctctacattctctgaagagagtggtagaacatcctcctattcatctcagagcttggttagtactattattactcaagctccttctctttttcttcttataaagattgaatacttgctaagatgggattgtcttgttgcaggatgatgttgaagctgaaatgaagaggctgcgtctagagctgaaacaaaccatggatatgtatagcacagcttgtaaagaagctttaagcgctagacaacaggtagtacttaatactaacatctaagtcaatgacattagtacatttgaatcaaatatcgatttttgaactattaggca

SEQ ID NO: 6520 - DNA, 2529 bp, Arabidopsis thaliana landsberg
tgtaagcaagggaatttggtggatgcgtttaagttaaaaaccagaatggttcaggaaggtcttttgcttgatttgttagcctatactacattgatttacgggctagctagcaagggtttgatggttgaggcaagacaagttttcgatgaaatgttgaatagcggaataagtcctgattcggctgtttttgatctcttgattagagcttatgaaaaggagggaaacatggccgctgcttcggatttgcttcttgatatgcagagaagggggcttgtaacagcagtaagtgatgcggattgcagcaaacagtgtggcaatgaagtgaactgttcgtgaactttcttatgatttgagctatgactatgagcatcagctgtattctcaaatatgggcaaatataggaaagggcatttgtaaagtgtgatcttttacatttaaaatggatgcttttaacaaaagacacatgactttgatagttatgtaaataaatatatacagaagctttttaattgaggaaatggaatctgtttctatatgtgcagaatcttattccctctggttggttgagttttgtcttcaagattgatcagtggttcctttaagaatgttgtatttgcaaagagggcatgttgctctcatcttaagccatttcacaatacaagtcgaatgaaaatggtggttacaaggaagagcatgaagctctgcgccatcctcatatgaactcagacatatgcaacaatcctgttaagaaaaatcaagtagaagaagcctttgaaactaagcaaaagcagagttcataagtaacaaatcgttgtcaaactagattcgtgtttaccgcatcctcagcaagcagtgttctttcagttgctaagcataagccattgatcggtataggaaccattttaccaggtccagtaatgttcttctcattgctatggaaagccttaaatttgtacaagggaagaacaccgagctccgcctccgatacaccttcctgtataaaacccgcaagaaaaggcgtctctaagttctttaaagtagtagacaacaaagatcgatgagatggcttcataccgttccagcaacggcataaagaagagcaattatgcaaggaagacagcaacaaagagctattccaacaaggcaagccaaaacaacacagaaaacagcaaagaagacgtcaatcgccaggaaaatcaccgataacctgcgaaaaaaacccgtaagatttgggaaacacacaaaagcaattcttagcttttgaatgagcaatatgttaccagtaaagattaggagcttctcctaaaagcttatcaccaccttcaacaacccagtagaatccaattatccaccatatgaatgatatcactgtgtttatcgactcacatctcttcacaaaactgattacaataaaacatcaatttcataatcataaaaccatgaaattgagatttttcaataaccaaaacctgtaagttgttgaattgtcatcactgtcttgttcataatcatactcaatgttgtaatcttcatgatcaccagactccaaatccctagctctacgagttgagtttcttctccaatactcagaccaaaccaaaaccacatggaacaaacactgtaacccatacacacagatccaaaccctaatcggttcattaggtctttcttcaacggtaccgacaagcataaccgctgacgcaagaactaaagcagcgttccatagtatatcagcagcaactacaggcttcgagtaaccccaatcgattcgtctctcctcgagagcacgcgccgctgtttctctaaccagcatcgacggtgctcggtggccggtgatccgtcctaatagaacggcgagagctgtaggtctggctgatgaagaagaagaagaagaagagccgtcgtgtcgtagacggagtagaggcgcatgttgatcacgcgccgccgtggaatctgaagaagacgatgacattagtaacgaagagaattgagattcttctttctctctgctctagaaaacgctaagccatggcggacagttttaaaaaatggttttagttaattaacattaattgaagattagacacagtcttataagttaattatcaagtcgtacgtctttaaccttaaaagatccggttaggagtggccattcgggtaaacgggtcggattcgggtaaaattcgatcgaatacggtttttcgggtagagaagtttaggattctataggacaaatctaaaatatcggttcgggtatagatttaggccttttttagaaccatatttgattttgcgggtaaatatgcaaatttttcgggttaaatttcgggtttcgaataaaatttagatttttgattaaaatattcatgtatttttgggttcgacttcagatttggtttttcgagtagaggaatttaggacacaagtaaattttcggattcagattcagttttgggtaattggttccggtttttaatacgggtgttactttgttagatagaaattggcgctaaagttggtaagtgtagt

SEQ ID NO: 6521 - DNA, 2667 bp, Arabidopsis thaliana landsberg
cctgtattattatgggttgataatagaaggttcttgtttgttttgtttttgatggtgcataggtgcaaatgggaacacgtccatttacatttgatcatgtatatggaagtaatggttctccatcttctttgatgtttgaagaatgtgttgctcctcttgttgatggtttgtttcatggatacaatgctactgtcttggcttatggtcaggtacataaaaaaaagtttggttttagctgcttgtgttttcttctatttgagttacataaatgatgcagacaggatctggaaagacatacactatggggactggtattaaagatggtacaaaaaatgggctgattcctcaagttatgagtgctttgttcaacaaaattgattcagtaaagcaccaaatggggttccagttacatgtctctttcatcgaggttggttgctagattaatttgtctagatttatagttgtatggatattaactgaaatcttaatctgtagattttaaaagaagaagttctggatttgctggatagtagtgtgccgtttaacagactagccaatggaacccctgggaaggttgttcttagtaagtcaccggtgcagattcgtgaatcaccaaacggggttataacactatccggtgcaactgaagttcccatagctactaaagaagaaatggcttcctgcctagagcaaggatctctaaccagggcaactgggagcaccaatatgaataatgagtcgaggtgtgtatctctatacccatgctccataagaagcaagacatagctttaaagttaccattaatgatgcttagccagtagtaaaatgtagttatattcttcttatacagtcggtcacatgccatcttcacgattaccttagaacaaatgcgcaagatatcttcaatctcagtggttaaagacaccgtagatgaagatatgggtgaggaatattgttgtgccaagcttcacttggtagatcttgctggatctgaaagagctaaacgaacaggttcaggcggtgttcgattaaaagaaggttggaaaaactaagcatcctatttttaatcctcttgagaacgttaactgacattcttctttcttctctgaaacaggaattcacatcaataggggacttcttgcacttggtaatgttatcagtgcgcttggggatgagaaaaggcgaaaagaaggtgcacatgttccataccgtgatagtaaacttactcggttattgcaggttcatttctatctttgcacttctacatcctgatatgtgtaacactgtacatattataactatacatatgatttgtaacactgtagtatctttactggcatttaactatacatacatatgattcatgtgacaaattttccattaaagatgtcctttacattactgcaggattctcttggtggaaatagtaaaacagtcatgataggtaaacttcttagttgtatgaggtaatcccctggaaatctcttatcagttcacagattcaacttctctctgtgtttgtgttattcttgtagcttgcatcagtcctgctgacatcaatgctgaggaaactcttaacacgctcaagtatgcaaatcgtgctcggaatatccagaacaaacctgttgtaagtaccaaggaactatcttagatgagctttcaatttttctgcatacagaactccactatcaggctatcagctaacacaaaaagtacatgaggccaaaaaatagattaaaacaggactaagattgttcacttcggagcactaacaggaaaggcttctttatttgggtgcacaggccaataaagacttaatatgttctgagatgcaaaagatgcgtcaagagctacaatatctacaagctacactttgtgctcgtggggcaacctcatcagaggaagtgcaggtatataacttctgctgatattcttcaaaaggtttataaacttctcatcaataatagtatagatttcaattttaaaggtaatgcgagagaaaatcatgaaactagagtctgccaatgaagagctttctcgagaacttcacatctatcgcagcaagagagtgactcttgattattgcaatattgatgcacaggtaatttctgtatacattaggcaaccacaatagatttatttggcacatttcttcactgctgaaaacaagagttgttctacctcaggaagatggtgtaattttttcaaaagatgatggccttaaaaggggtttcgaaagcatggattcagattatgaaatgagtgaagcaacatcaggttttggtcactgtcttctcaagaaacttattctatgaaatgcattctgcattctcccttacttttagcctgaaatatcctgattcaaggtggaatttctgaagatattggtgcagcagaagagtgggaacatgcacttaggcagaatagcatgggcaaggaactaaatgaactaagtaaacgtcttgaggagaaagaggtatagtcaatactcaattgaaaatttctgtgcctaatgactaagattggattattttgaaaatcttatgatttaatatatgcagtccgagatgagagtatgtgggattggaactgaaactatcagacaacattttcgaaaaaaaatgatggaacttgagaaagagaaaagaactgtacaggtgaaactaa

SEQ ID NO: 6522 - DNA, 501 bp, Arabidopsis thaliana landsberg
ttcgagaatgtgactagtaagaaaataaatcaaaaaagggagagagaaaagaaagtcatcattagatctattctctctcctacatatttaatggctgagaataaacaagttaaccatagatgggttaactgctcacatgatagaaagggaaataggtattgatttttattaaatagcgaaaaaactcaaaaaagtgtctactccctgcaaagtgccctaaatacactaaaaaacttggaaagtgcccctaacttataagcatgttaaaaaaaacataaccgcctccaagagttcaatagttatttctttgcccgcatcgttcgcaatcatggctttttaaacccaataagaaatatttaatacctgctaacccatatcagccctctcatttaacattcaactagagttatatggttaagagcatcttaatcaatgtctgttgtccatgattgcaaccaaggtgtgtcaagtggggaccacatggaagaacattgtgtcatt

SEQ ID NO: 6523 - DNA, 3325 bp, Arabidopsis thaliana landsberg
agatcagatctgaaatgatatgggttttttgcaactatcttgggttgacatgataaacactaatttagatttgcaatactacaaggtaaaaggtttatttccattctcaaagaccttaataaaaagcaaccttttttcatcacgtaaccaccaaaatatcaatccaataattttaaatgctaaagcttaactaatatttctccccacagtcaagatatggaatgacataccatccacgagtctgatcaagaccttcagccacaaaatcaccaggaaagttcttctcaaataactccttgttttcaaacggataatggatatacgcgtaaggcattgacccactctcaaaccaacaatcaaaaacctgtaaaagcgtatataaacttaagcttgggataagaccccggataagtgataaatgaaagaaattggttcatcttacatcttctacacgacggagcacaccaaactcatcgccacgactagatggaattgtaatatgatcaatatggtgacgatgcaggtcaaagacctgtaccataaatcatcagagaaacaaatgagtattagactttttgacaactacattctccagtactaaataaagaccaaaccctcatagagtgtcataaagttgacagaacatataaggaagacttctagaaaaatttatccaacagttgagtagtagcaaatggttgcatataaaggtaccgagatcatgacagtagactttcccaaagcatcagtgagctatttgctgatataaagagagatgtaaataaaacaaaagaagagaccttaacaccagagagcttttcaagcttctctacggaatccatgatcacaacttcctccccatcatcacttatccatatcggaagaggcgtgccccaaaatctacttcggctgattgcccaatcccttgcattttcgagccaattgtgaaaacgtttatcctgaattgcacattaatcaaaaaaatgtattcatatcagaaacttaacaaaacgaactagtaatatatactcagagtactgatcctttcttctaccgaccttcacataaccaggtacccattctgtctgttcattgctttttaacaacttttctttcaactgctccacacgcacaaacctaacaggtcaaaacacaaaaaaactttaaagtcatagccacacctgaaaaacgacagaataaagttcataagttatgaccataactacgtgccatttaggtcagatactacatatgaaatctaaaataaataaatgaaaacatgggaaatcaaaatatcctaaacagtttggtgattattgtgcaaaacaaatacacaaagatacctaatacagctccgaaaaggggctgccagatataatcataagagccaaagttcaaggcaaggacaagagagaccgtctcactggaactagcactaaatgatccaactactaagaccttagctcaaactcatatgaaaatgaagcataccaacttggaactgctctatatatgagaggggtgtctgatcgccagcaaaatgggtatgagtgagtaaagcttcccgttttaacaagcctgcccttggcctgaaataataaaaataatattacttcatgaaacaaatcacctacagtaaagaaatccaatggtccaaaaagcacttagattctctaagaaacagataaatcattatgatctgaactgactaattatcaagcatcggtaatcaccttaacggcttcaattatatccttgtctgcatctttgacataacggccactgaagtgggtaattctctcagtaaacaacccatcatcatcaacagcaacaactagattctccccctgcaacatatatagaacatttaacacaatgagataaagcaagattattagagtaaactgagaatgggttcttgaagatactgtaagcctaaacaagagagaaacaacaaatgagcaaagttcatgcctgatgttagcaagggtgataaggaagatgtagtcaaacctaacctttttgattattttgttcaaaagacaaacacgataatcatcttcaccaaaggcaggagcacagtggacaataccagtaccactgtcatcagtgacataatcatctgctactactcgaaaggcctcacttgagaaatcactaaagtaatcaaacaaaggttcatacttcttcccaaccagggaagctccattaaatttctccaaaacttcataagaatcagctgcactctcaggtttagcacctttagctttaggatttgctttcttagtatcaccagcaggtccattacttaacttggccttaggcttatcagtgggaagagcagacaaccgagattcagcaacaatgtacacttttccagtgttcttgttacgaaccttcacatagacaaacttcgcatttacacacaaagcaagattgcttggaagagtccacggagtagtagtccatgccacaaaagcagcattatcttgatccccaataaccggaaaagtcaccatgatttcaggatcagggacttcctgtacatacacacattctaccaatatcagagatcaaactatacaacacaaatcaatcacctgaagaacacaataacaacaacattaccttatagttctgaccagcttcaaaattagataaaggtgtcttacaaccagtactgtacggcataacctgcaaaccagaattgacccaaatacaaaaatcacgatccacgaaacttcaaaaccacatcaatgcaagaagaagaatgccaaacaaaccttgaatcctctgtaaacaagattcttctcccaaagctgagaaaaaacccaccaaacactttccataaaaggcaaatccatagtcttataatcattcttaaaatcaatccaacgaccacacctagtaataaccttctcccactcagcaacataacgagtcacaatactcctacactcttcattatacttatcaattcccatcttaataacttcatctctcctcttaatattcaatttccgatcaatctcattctcaacaggtaagccatgacaatcccacccaaaccgacgagtgacatggtgaccagtcatggtctgataccgagtcacaatatctttaatcgtaccagcgaggatatgtccgtagtgaggaagtccggtggcaaaaggaggtccgtcgtagaagatgtactcaggaagattctcagtgcgtttgagctgtgtcttgaaagcatcgatttcagtccagaaggagaggacatcttcttcttgacgagggaatgagaatcttttccttcgcatacttttttcatggtggaaac

SEQ ID NO: 6524 - DNA, 649 bp, Arabidopsis thaliana landsberg
  unsure (1)..(649): unsure at all n locations
tcatgaacatgggttcttgaagatactgttaacttaaacaagaattaaaataaacttactgttaaaggtggtgatataaggaagatgttgtcaaatctaaccttcttaattatctcgttctcaagacaaacacgatagtcatctgcaccaaagacaggagcacaatggacaataccagtaccactatcattcatgacataatcatctgctactagtcgaaaagtcacacttgagaaatcgctaaaagtaatcaaacaaaggttcatacttcttcccaaccaaggaatctccattaaaattttccaaaacttgataagaatcctcttcactgtcaagcttaattagcacctttcgcattatggtatcactagtaagttccattagttaagccggccttaggcttatcactaggaagcgatgacaaccgagattcagcaacaatgtagactttttcagtgttgttgacgaaccttaagatagacaaactttgcattgacacacaaagcaagattacttggaagaatccatggagtagtagtccatgccacaagagccgcattatcttggatctccgataacagggaatgtaaccattactaaatatgaaacacaatatgcaacaataaatatgcaaaaaaaaaaanaatgc

SEQ ID NO: 6525 - DNA, 1521 bp, Arabidopsis thaliana landsberg
aaaaaaaatcattgatttttctttttcttaaagaaaaaattgttgagtaagaattattttccttctaaatatatataatttcaacatgtagataattagaaaggtgaaatggtaaaaaatcggttaaaaaggtataattactcattatccattgtatgtaaaaaaaaaaaaatacagtactaatcacatgaatcatgaagacgtaacaaattaagtttcattaaagaaaaaacaagctccattaaaacaaacttcgcttaacgtttcttctctccgcgccttttcatttcgtcactctcctctctaactatttttttctttctctctcaaatattttcccgggaaaccatattttctcgagaaaattaaatggataagtttcaatccaaattcacgagattcggattcatctcgatttgtttcggatcgatcgcacttgtattattgatctctcattgttcaacttctttctttgattactcttttcagaaattcaaattctcgttcccagaagaaactgagcttcgaagaaacgtttacactagtagttccggtgaagaaaacagagtcgtcgttgattctcgtcatgtttctcaacagatcctcactgtccgatctactaactccactgtaagctttgtttctcttcgtccttctccagattttgttttgagtcaattttctcagttcttcgaaattcgaatttcaaaaaaactctctgtaaccgtaatttgaaatttatcgcttcctctgtgtaaaattatctctaatcatcgttgatcttcaaaatttgaaactgagaatttctcatcagcatcatcaccatcattaccaccatcatcatcatcatcatcatcatcatcatcattagcatcgtccaaaatctgatgatcctgcattttttggctaatcatcatcggaaattgtttgttgaatcagttacagagtaaaccggaaaaactaaaccggagaaatttggtggaacaaggattagcgaaagcaagagcatcgattttagaagcttcttcgaatgttaacactacattgttcaaatctgatcttccaaactcagaaatttatcgtaatccatcagctttatatcggtaagctctaagtttcatgcaattacttttttgaaatacttagctttaaagtcactgcgcacggctaaattagcgtggattttagtagattcttctaattgacgctaacgaatccatgaaattgaaccaattaaactcaatttgatacttttttcatgtacacaccactggttttgtatcatagtctctgcaaaaagcttacttatgatgatgaactctgctttattgtattcatatgatgacttctatatagaaactcttttcataataattataggattgtgtttaatgtgtagttaaagccaagttagtctatatgaaaatatatactaggttatgcaattaaggtaaagtctgctactataatttaaggtctgtttatgtgtcattttcactaattatgtcttttcttaaatta

SEQ ID NO: 6526 - DNA, 1158 bp, Arabidopsis thaliana landsberg
tagctacaagccacgacgatgatcaatctagtgacaagtatatccgcgagatccttagcttaacttcactcttccgtggctacgttcgtgcctgtgtcacctgtgtttcacgccgtcttaagaagacgcgtgaatggatcgttgctctcaaggctcttatgcttgtccatcgtcttcttaacgaaggagatccactgtttcaggaagagatcctctacgctacatgacgaggtacgaggattcttaatatgtctgattttcgtgatgaggctcattctagctcttgggatcactctgctttcgttaggacatatgctagttacttggatcagaggcttgaatctggctctttttgacagaagaggtagaaatggtggtggtagtagtagtagtcaccaaagtaatggtgatgatggatataatcgatctagggatgattttaggtctcctcctccaagaacttatgattatgagactggtaatggttttggtatgcctaagaggtcgaggtcttttggagatgtgaatgagattggagcaagagaggagaagaaatctgttactcctttaagagagatgacacctgagaggatttttggaaagatgggtcatttgcacaggctgcttgatcggtttttatcttgtcgacccactggtttagccaaaaacagtcggatgatcttgattgccatgttcccggttgtgaaagagagttttaggctttacgctgacatctgtgaggtcttggctgttctgcttgacaagttttttgatatggagtatactgattgtgttaaggcctttgatgcttatgctagtgcggctaaacagattgatgagctcattgcgttttaccattggtgtaaggatactggagtggcagagatcttcatgagtaccctgaggatcagaggattacgagcaagctgttggagacactagaagagtttgtgagagacagagccaagagggccaaaagtcctgagaggaaagagattgaagctccttctgttcctgctccttctgtggaagagccagtggatatgaatgagatcaaagcgctttctccttctgagaagtacacttctccacctccacctgcaccagagcctaaaccgtagcaaccacaagtaacagatgacctagttaacttgaaag

SEQ ID NO: 6527 - DNA, 570 bp, Arabidopsis thaliana landsberg
  unsure (1)..(570): unsure at all n locations
catccaaacagtgacaaaatcacaagtcttcaaaagaccataatctgccacaaactgtatccaccctgaagttaagacaggtgttttatccccattccacatcttgaacttcatctgttgaacttccccgtctggtccatacaccgaaacatcaaccccctttaccggatcctctgattcttctagaaaaggaagcatcttctccttcacttgctccttcgataacatgagcctgctttgatctgtatcgacgtcgctcgacatcaactgcttctttatcggtcggctgaatcgcctcgtcacctcatcatcgccgaatatatcctgtggatcgagttcagcgttgtaccaatcctcaattaacctcagagtttcttctgaaaagtcatggatatttattttcatgatgttctgattcttaaccctcttaggttgatntttttcagttttttcttccctcttcctagactgcttttgattagcttggcttactagtaataatggaagggacgcaacctcatcatctatatcgncttcatcatctatatcctcttcacgatccataacatc

SEQ ID NO: 6528 - DNA, 3109 bp, Arabidopsis thaliana landsberg
  unsure (1)..(3109): unsure at all n locations
gacccatacatgcatacatgatactagggatgtaaattccgtagaacataagagttaacgaacttattctagaccagccagcgtgcatttaaccataaatcgactatagaatagatatatgtatgatcaaactaattagtccatggatttaacataaataggtatgtcaactcgaatcatggaaaaatagtaaaacatgcataaaagtagaaaacaagatcaaagaaggttcacaacgtacgaacatcaaaacacaaagattggtgtcacttttgaccttggacattcggcattcacatttaaactcgaataaaaatgtgtaaggacaaaaatagtcttaaatgatgagttttggttccagctaatttggaaatacgttacgttacaaaaaaaaattaaaagaaaaaaaaaaaacaagagtgtgaaaactcaaaatttgagtagacaaacaaatggcttgtcccttcaagttcgcgaaacaaaacaaagatggtctttggtttttaacttcataggtagtgatagtagaagtaaaacctaggggcgtaacagtcatttaacaagcgagagcccctagacttttttgcttactctgtctgcagtagtagtagtagtgttgtactaccgactcactgctaaagttatacaacggaactagcgataaggaattttcaaaacctgacccctcatattttctctttattctaatttcacacctttcttttataatctcactaatcaaccctctctattttctctttcctttgtcactatccgttgagaacccaaacggctctctctcttgtctgactctctctctctctctctcgatcggtcgaaattttctctgtaactctcttctctctttacgaatcccgatatgagccacgggtggttatggttatgaataatcctgcaaacaacaacccagtagcagcgtcttcagcgtcagccgtagctttacgtccgccgccacatccgccgcagcctcaccgtccttctacttcctgtgatcgtcacccggatgagcgtttcaccggattttgcccttcttgtctctttgaccgtctctctgttctagacatcaccggaaaaaacaacaacgccgtcgcgtcttcttctaagaaaccaccgtcttcttccgccgctcttaaagcaatcttcaaaccctcttcctcctccggttcgttcttcccggaacttcggaggacgaaatcgttttcagcatcaaaggctgaagctttttctctaggtgcgtttgagccacagagaagatcctgtgatgttagggttaggaacactctttggtctctgtttcacgaagacgccgagcataattctcaaaccaaagagggtttatcagtaaattgcagtgagattgatctcgaacgcatcaattcaatagtaaagtctcctgttttcgaggaggaaactgaaattgaaagtgagcaagacaacgagaaagacataaagtttgagactttcaaggaacccagaagtgtaatcgacgaaatcgttgaagaagaagaagaagaggaaacgaagaaagttgaggactttacaatggagtttaatccacagacaacggcgaagaagacgaacagagacttcaaagagattgcagggagtttctggtcagcggcgtcagtattcagcaagaaattgcagaaatggagacaaaagcagaagcttaagaagcatagaaccggaaatctcggagccggatcctctgctttaccggtggagaaggcaatcgggagacaacttagagatactcaatctgaaatcgctgagtatggttacggaaggagatcgtgtgatacagatccaagattctcaattgacgctggaagattctcgcttgatgctggtagggtttcggttgatgaccctcgttactcttttgaggagccacgcgcttcgtgggatggatatttgattggaagagctgctgctccgatgcgaatgccgtcgatgttatctgtagtggaagattctccggttcggaatcatgttcaccggtcagatactcacattccggtggaaaagtcaccacaagtatcagaagctgtgattgatgagattgttcctggtggatctgcacagaccagagagtattacttagactcatcatcttcacgaaggaggaagagccttgaccgttctagctccactaggaagttatcagcctctgtcatggctgaaattgatgaactaaagctgactcaagacagagaggctaaagacttggtttcacattcgaattcactgagagacgattgttgctctgttgagaacaactatgagatgggtgttagagaaaatgtagggactatagaatgcaacaagaagaggacgaagaaatctcgatggagttggaacatattcgggttgcttcatcgaaaaaacgggaacaaatacgaggaagaagaaagaagaagcggtgtggatagaacgttttcggggtcgtggaatgtagnnnnnnnnnnnnnnnnnnatccgaagatgattaggagcaatagtagtgtgagttggagaagttccggaaccactggaggagggttgcaacggaatagtgtggatggatacattagtgggaagaagaaagttagtaaggctgagaatggaatgctcaagttttacttgacaccgggtaaaggaaggcgaagaggaagcggcaattcgaccgcaccgacaagccggcctgttccggcttctcaaccttttggtagtagaaatgttatgaacttttactaacaacattgtaatgagctcgagtcttctttttagatgtagttggaataatgtgtgatgaagttgcattgacagaaaatgttcaaagatttacatattttttttgggttcaatctgattcttgtgttgggatttgattttgccaattttagaaatttgtagttcaaagtgttaatccatcttctttggtcatgaatgtatacataattttgagttgattataattttcttactacttctatattaaaggttcttatacataagtgagaaagaggaaaatagcaatgacatatgagaattgaaatatagctaaaaatccggagcaactcatggacaaaagaagaataaatataag

SEQ ID NO: 6529 - DNA, 2861 bp, Arabidopsis thaliana landsberg
tgtgttgtcttgatattgatgatcctctcgcatgcattgtttattttgtacatgatctggttatttacagggaatttcaattgtattcatggattagtttcgttaggtttacatgatgtcaaatatctcactttggtatggattgttgcatacattgtttgtgaatttacaggcggttgttgaagccaaaggattgaaccctggattgatagtgctgcttgttattggaggtctgcttgtgacatttctcatagccaattacgttatgtacatgtatgctcagaagaatctacctccaaggaagaagaagcctctttccaaaaagaagctcaagcgtgagaagctgaagcagggagtccctgtgcccggggaataaattccagcttcttaaacagtctgtacttttttcctgtaatcacaatgtcaatgagacttttgtgtggagagtagaaaacgactcttgttctgttttggttaagactacaaaatttgaatctcatcagcttttgttttcccttcacatatttggttgcagttgtagagagtctatcatgttcacttaactttatttgtccacatagtgttatgccttttgtcggatccaaagggtttcctcaaaactcttacgtcaatgttaggctttgcgaattgtgaaacaaatgaacatttcagacaatgtcaaaacaaatgcgtagcaataaagatatacatatgtttgtttttcgataaaaaaaaagaaagacacgcgacaaattacatccagagagggcttattcaaaaagtaagcaaaaaacaaggatcatgattcgagttccacagaaacacttgttttcacaacgtgtgtaagcttcactcgactcaatattacaagtgctgtttagaccactcgactcaatgtaagcttcacttacgacccatggtttgttctatgggtggcatcacaaccacggtggactgagcattgaaacctgggtgaagaaccttcctgcggagctcacgtccttcttggcaaagggcacatgtatggcaaaggacatgtgtcacaaagtcacaagtcgtctccaagtgttccctttgcatctcgtcctctatgcagccaccgcagcaaccacaagacctgttcatagcctcaaagcttccctgtttttacccaaaagagttaatcaatatcttcttacacggcaaccttttttctcccaaactcacttctctattgtttaaatgaaggaaacataaatcattacctcaaggttaaactttcggcgaatagcagaacggctagaataagagaaccatggagcaagacagttccagccaaacaaagaattaccaataaagtacaatcccaaatacgtcaagcaatggtttgaaaatgttcccggagcagacccaagtctctctgcattagttccatacaacacacaaggagccacacttccaagaagacctacacagaattatccattatctcatcactaaaaaaactttcatcaaacacataacaaacatttctaaaatccgaatcatatctaatcctaaacccatttatctctgaacttcaataagatctaaagattcaatttttaacaacccaaccaaatttagaaaacaaattacaatcagaaattatacgaattcaacgaaatactcacaaacttcgagatcgctgctgcaaaattcatcattgcgaccaagacaggtaaaaagaccagaattccactggtttctcctgatcggctcgccaatcacgctaccatggctcacaggcaatccatccgccgtccagccgtattcctccgccgcgggaggaggcacaagaggcgccgccttggcatctcttttcgagcagatcttgccgtcattctcgttcaccttcaagagaggactcgattcctcatattcgtcgcctcgttgagcttcacggctatcttctcccgccatattttgcttagaaaattaacgcaagatcaaatctgcacaaaacgatttctttgatctaaaagaagaagaaaaagtaaagaagaagaaagagagagactttaactaaatttatcgaccgtcccgtacgcgttaagatagtcaaaggcaccttcaccgtcattaccaattacttaacttggaaatatttggatctcattaacatatgggcctaaaagcccattaatatctgggcctcaaggcattttcgtgatctccacaatattttgcaagtctcttgataaaactcatcaatttatgggtaaaccaattttatgtaatataaggaaaatatatctgtttttagagatgtagaattttaagaacacaaacatggttggcgtaacagaaaaataaaactatatcaaagacttttttttgtttagtgtataagtgtacgaacgaaattgtttgtttagttacattgtcatagataggacaattgaaaaatattacatggtcagggaaccacaagattctctacgataaagaaagcttttaaagctctaaatttcagcgaaacttccccaagtaaatccagcaaagaatatagtaatcgtttcaatgtaaatttctcgaaaaaatacaaaagaaagagaaaaaaaatgtaaacgcatcacgtaaatcccaaccttgggttctgtcgataacccatctcgggaacgagtctcgctggctccgagttacagcgcgtgaggatcagacactgccgtggtgatcccaaaacgcttcgttttggttcttcactcgctgctgactctcttcttgaatcctgtaatctctctgttgcttctgaaacgcttgtcttcggttcttccgaaactgatacattttccgacgaaacgtgtcgttgaaaggagccttatttggctcttcttgatctt

SEQ ID NO: 6530 - DNA, 1355 bp, Arabidopsis thaliana landsberg
  unsure (1)..(1355): unsure at all n locations
ggtcattgggtcggtatttccatcaccagtattccctgatccaactgacatataacatgtaacgagtgaacaatcatctcaatatgaaggatctcctgcgaaggtcataaacaagtacctgtgacccaagatcatcaatggaatcagcagtactattgatagtcttgagaaagtaatcagttccccatttgataagctccttaacatgagtgagctcaccagcagcttcgtatttagcactatattcaataacactccagctcaacatagtcatagcataagccatggggaaattgaacttgatagcatcaccagcatcataataacctcccaccaaatctttatagaagcttcctgtttcacctttcccatcttgaagcccagaattacctctccatgacacgttattatgctttggcaatttcccagctacaacaatcaaaatcagacttagatctaaaactctatatctaaattttatcagatctaagtagattctacacttacatttctgagcattgaagaacttaagagctttgtgtagagctatagtataattatccggcggcggagtcttaggatgatgacgcggcacagttttaacgatcaaggtaatgaatccggcgagtaacgcggcggcaacaagagtaccaacagtccagacgaagatcttgcggctaacgataatacaaccgagatcgacgtacttcttcttcttctgctccgttggaccaagtaaccaactctgctgcgtctcatctagtggacgtgaaagagccgcacgatccaaatcgtttaaattccgactacgatcatcgtcggtggcggaatctgcagtgtttatctccaatggacctccccatggatctcttccgtacatgatgatgctctctgataaagcagcagagaacaacaacaatgaatcaaaggtttgggatcagatctggagaagagaagagaagagagaaagaagtaaaagtgtgtggaagtgaagaaatgtgaagctaaaaagctctctctagtcaataatgtacaaagactctttgagagatctggttttggttttttactcttttttttttttcctttttaaaactcacttcaattattttgttattatatgttttgtttggtttatttgtacatgttacgttacagctaactctaattttggaatagtatatttttggccaactatgattgagcgttttggccaacttgtaatcttgtgtatttatttttcatacaattaaaatttgtcggagacattaaaatattattttttatgcaccgttttttctaacanaaaattgcatatacttttgtttactagtaaagcaatgggctaatgtcgg

SEQ ID NO: 6531 - DNA, 4192 bp, Arabidopsis thaliana landsberg
ggattaaagaggaaacatggtttcaagtttcaactttatacaattctctgtgaacccatatttgaaattcctaacaaaaccaagatgatcacatatcaaaggttgaagcttaaggcaatcacaaagcaagactacaatcgtatcacattccatttaacagttttacaaacagtctggattacaagaaaacaaacacaaagcacatagagaaacagtgatacaacagcttaagaacagtaacaacaaagaagcagatacattcatacaatcaaatacagaaaatcagtaaataatcataaacagagagatacagattccttccttctatggaataataatgcgcaacgaacacaaacggacctttttttctgttgtcatggcatcaatgtaagcttagcatcaaacacaaaacctggacacaatccatctgcataaccagggacgccctcaatccatctccaaccttgccaacaatcccacattgcaagcttccccatccttttagcagagaagtaaaccctatctccacctccaaaaactttaaacttactcgattcttgaaaacctcggtacatctctaacggcattctacctgcttcttcccactccaagctttctagatcaagcctaagtatcagaatcgttgaacaagccgggttcaacgaaaacgtcgatttcaatccaccgatcataagaagcttagaatcaccgttaccgcgcaataaacgcggtcgtttgatgatatcgaatatatcaccccattcatgtttctccaagcaaacccaattggtatgagtgattgtgagattcgtcaatttacatgagaaaagcttccattgacttctccatggagatccaacatcacacaatgcgaaaaccgagctagacattaacacaggacttctaggtttcgatggtaaattcgacgagaatttgagccattggttagcaactacagtacctgagtaatacaacgcagcgagctcagtgagcaccatgactcgattcgccgaatcagcaagaacagtaccatggcgtgaccaagctgagccaagctgaggcaaaaccttgaactgccgagttaacggattacaagcgacgagcgatttgctagattcagctaaatcaatcgaatctccccaaagatagatcaatccgcttgaagaagctacaggctgaggagatcggaaagggaggaaatcgagattgaatctgaaccattgattctgctctggatcatatacatggatgtacggtcggatattcgttgcgtgtccgtttccgctgtgacggtgactgtggtggtgatgaggaggtcggagagcgagtagattcaacggcggacgagttgagataatctctatgaaacactgagaggtcaaaagctggttgaagaacttgcagacggatctgcagatcatgatatcacgaataggaagagatgagaagatctggtggagagaatcaggtggaagacagtttaccggagacgattccatggtttttctcttccttctccgtaggtttcggcggcggagagaaatggtctaatcgagaattgtgggaaaactaaagggtaaaatcggaaaagtatgagaatgcgccattggtatgcgttgtcattggttccggttttgggtatcggaaggagagtggtgaagaaaagggaaataatatatagttcccattttgtccttgggttgcttaatgcgctgagtcacctacttgtctgcttatcatttgaatattttcataattgactattttatattctctttggtcattatttgtatgaagttttgtattagaaagactcgacatacgcatttttcaaagattcataattgtttaaacctacttaatatctatatatacatttttacagtcattttgtgaaataagtcatggagttgagatttatttacaatggctgtcactgacatttaataattgtttttgataattagaaagaaaatcttctaattaaatatttgatatttaacaatcttctcaaaatctttctactttaactacacaattaattactaaaataaaacttccaaaatatttaatatcatttaattactacaaaattatcgtttttgatattgcttttcggcatgattataatcatgaagccgcatagatatttgatagcatttaattactacaaaattacaaaatatttagacaataattcataaacatatcataagtaagctcaacattgataaaataaatgagttttttttacaggacgggtctagcagagcgttactcaataacatttgtgaactataaaataaaattattttatagatagatacaatgtgtgaacttttatatatactaactttaaaaaataaattggtcccgcggtataccgggggttaaaatctattacttgggaaaagattagctttaggagttgtggatagaatttatatttggatggtcaaaatcgtatcattatgaggttattgataaaatttgaaaactaaaattatattgattgcacatagttcagtattatattaaaattattatttactataatcaatacaaacattaatactagaaaagcaaaattaactgaacgaaatttggttcgaacggttcaggtaatatttaattcgattcggttatttgactaaaatctatacagaaactcgattttgtttgatttgggtaaagattctaaagaaattttggtataatttcatcaaattcggtgtaattcaacataaaattggctatacccattagcagaaaaaccgaactcatttcaaaaaatggttaagagaacttatttcaaaaaaattggttaactgctaaccaaaactcattgcaaaatgttgccgaacaattaattcttattaaccgacccggttaacggaactcccaaatatttgtctcgtcgtcttctgactttctccttacaaatcggatttgttatccaaaacaaaaaatgtcacatttctttaactttaaaaactcttccgtttcaccgaagcttcttcaatggcgatttctctcgccaccgcctatatctctccatgttttacaccggaatcgtctaattccgcttcaccatcacgaactctttcctccgtacgattaccttctcagattcgccgattcggaagtgttcaatcgccgtcttcgtctactcgcttcgctccactcactgtgagttctccgttcaccaattacttgtttcgatttgatgctattgattttgagacaaaattcaattttgttcttgttttagttacttcgagtagcttcatggtgtttgtgtattttcatattattcattgtttatacataaagatagaatcagtaatgttgtaaatttacatagttttacactgagattgattccaattgaaacaagaaggagaatgtaacacattgattttagtatattcaacatcgaaggactggatagtccgaatttctcatgtgtattagtgaagctaatcgtcttgccgatggattagcgaactatgcattttcattacccctaggtttgcattggttggagtctaggcccgatgttgttagttctattttgttagctgatgttgcgggggttgcacaccccagacatgttcgaatgtatttttttctttttcttttaataaaaaaaaacattagagagtgtgattctaacatagtgtttgacgttgttctgtgtaatctaaatcagtatgtgtaatcagaaaatgagaattgagatgtaatgaaagaatgaaagaacatatatgttagtgaattgttcttctacttctaatgtaatgttgtttacgtctagtagaagtagggaaaatttgttcatttgtttttatagtagaagcgttttcataatttgtggcgcgatgatttgatgcaggtaagagcagcaaagaagcaaactttcaactcttttgatgatttgttgcagaactctgataaacctgtacttgtagacttctatgctacttggtgagtttatgttcaggtgtacttgttatagcatcaggttttaatgtgttttttggttcttatatggttacagagttgtgttttttgcaggtgtggtccatgtcagcttatggtacctatactcaatgaagtgagtgaaacactgaaagatataattgcagttgtgaaaattgatactgagaagtacccaagtcttactagcgaa

SEQ ID NO: 6532 - DNA, 2817 bp, Arabidopsis thaliana landsberg
gtcgagtaagataagagagaagagtaataaggaaagttgattaattcatcgatgaacataaccctaaaatggagttccgcttaagtagtagttcccctacagaaactacaaccactcactcacaacaacacttaaatgacacaaagttaaataagaaaactacaggcattcttattctttgacattgtcaaagacattgtcaaagcctctggatgttacagagtatttccttgacttcctttagcttcatttcagccactaggatcataaaccttctttggtactctcttccttggaatcctgacttctcttgctgactccattgcttgagttgctgccttaccaatactcccccgtaacaaagccatcttgtcctcaaggtgagaatctggaaattgttgcgtgatgcccgtcattggttcccatgtattctcacactctggcatacccttccacttaatcaagagcttagtatcttctgctgtgttgccctctctgatctccattacctcttctggttctgttgcccactccaagttagaagtcataatcgctagaaggggttgagcttgtgctgaacctggaagcgcctgtttcagttgggatatgtggaacacatgatgaatagaactttcagttggtagctgcagcttatatgccattgctcctatgcgttccagaatcttatacggaccaaagaaccttggcgatagcttctcattacgtcgttgagctacagaaagctgtctatacggcctgagttttaaatagacccaagttcccactgagaattccaattctcttctatgcttgttagctgacttctgcattcgagcttgggctgcttgtagattctctctcagcatagtgaccagtccgtctctttcttgcagcaactcttcaacgccggcgttagcagtgggtacatcaccgaatcgcaagagtttgggaggttctctcccatacagagcctgaaatggagtcatcttaatcgcagagtggaacgatgtgttataccagtattcagcccacattagccacttagcccaagtctttggtttcccattaacaaagcaacgaatatacgtctctaagcaacgattcagaacttttgtatggccatctgtctgagggtgatatgatgtactcttatccagggatgttccgtgtgatttgaacagagaagaccagaaattgctgataaagattttatccctatctgagaccatactctcaggaaacccatgaagtctgactatttcatgaagtataatatctgctacagacttggctgtgtaaggatgcttcaacggtacaaagtgaccataattactaagcctatctaccactactaacaccacatcatagccttcagactttggtaacccatcaataaaatcaaggctaatgttcgaccataccttagtaggaatgggtagcggtgtgagaagacccactggtgacaaggttgagtacttattttgttgacacacttgacagcctttgaggaactctaccacgtctctcctcattcccttccaataaacttcactcgccaatctcttgagtgtcttgagcaccccttcatgacccccactgggactagtgtggaacctttccaacaactttggaataaaaggagaatttgttggaatcactatcctaccatctttatgtaaggtgccaaccaccaaactgtatcctttttcagactcttgtccacttaaaagcttttctctgatgaggttgaggctagggtcgccttgtacttgatcttgtaattcaatcttgtgcagagtagctggagccagcaacaacatgttcatcacctgctctgtgactggacgtcgggacaaagcgtctgctacacgattttctgcgcctggtttgtactcaatttcataatccaaactgacaagtttggatgcccatctctgctgtatagctgacacagctttctggttaagcagatgtttgagactcctctgatctgtccttataatcaccttcttgcctgctagatagtgtttccacttgtccactgcaaagacaatggccaacagctctctctcgtaaactgacttaattctgcccttactagagaacccctggctaataaaagcctatgggacgtttatcttgtgatagcacaaccccgattcccgtccctgaagcatccgtttcaatcacaaaaggctttgcaaagtctggcaatgctagggttggcaactggataactgctcctttaagtgtctcataagctttattagctgcttcagaccattcaaacttaccctttttaagcaattctgttaagggtttggctatcttcccatagcctgctacaaaccttctgtagtagccagtgtgtcccaggaaccccctcagctcagttatgttctttggttgaggccagttcaccatagcttcaattttagctggatccgcagacacacctttccctgttatcatgtgacccaagtaagagattctggtgcttccaaagtgacatttcttttcattggcatagaacttattctgaagtagaatttggagaactgcttctagatgtttaaggtgggtctcttcgtctgagctataaaccagaatgtcgtcaaagaacactagaacaaattgacgcaggtaggttcgaaacaactcattcattactgattgaaaggtggccggtgcattggtcaaaccaaacggcataaccaagaactcgtaatgaccctcatgagtacggaaagctgtcttctccacatctgcagccttcattcgtatctgatggtacccgatttaaggtcaatttggaga

SEQ ID NO: 6533 - DNA, 4105 bp, Arabidopsis thaliana landsberg
tgaaactctctctcgttacaaagctcgtctcgtcgccaatggtaaatcacaacaaatcggtgttgactgtgacgaaacattcagccctgtcatcaaaccagttacagtccggtccgtccttcatctcgctcttgcacgagattggccaatccatcaattagacgtcaagaatgcttttttacacggtgatcttcacgaaacagtttatatgcaccaaccaccgggattcacagacccgacacgaccacatcatgtttgccatctcaagaaatcactctacgggctcaaacaagctcctcgagcttggtttcaaagattctcacaatacgcaacaaaggccggttttactaataccaagagtgatacctctctgttcgtctaccatcgaggctctgatcttacctaccttcttctctacgtcgatgatatcttactcacagcttcatcaccaactcttctcaggtcaattctatcctctcttacatctgaattctccatgactgatatgggtttacttcactattttcttggaatttttgttcatagggacaacaatggcatgatgcttcaacaacgcaactacgcagctgatattctacatcgagcaaatatttccaattgcaatccatgtgctacacccgttgacacagccgccaaactcaacgctgacgtcggaaatcgtgtagcagatccaacactatatagaagccttgctggagctcttcaatacttaacaatcacaagacccgacattgcatacgctgtccaacaaatctgcttattcatgcatgatcctcgagagcctcacttcaacgctctcaaacggatccttcgctacattaaagggactatcgatcacgggctgcacctcaagaaatcctccacaacaaccttaaccgcttataccgacgcagattgggctggctgccccaacactcgccgatcaacttctgggttttgtgtttacctcggtgacaatctcatttcatggtcttcaaaacgacaagccactgtatctcgatcaagcgccgaagcagagtatagaggggtagcgaatgttgttgctgaaacatcatggatacgaaatcttctacttgaactacattgtccacttacaaaagccaccattgtttactgcgacaatatcagtgcagtttatctctccacaaatccaattcagcatcatcggaccaaacacgtcgagctagacatcctctttgtacgagaacgagtggcccttggtcaagtccgtgttctacatgttccatcatcaaaacagtacgctgatatcttcaccaaaggattacccgtcactttattcaacgatttcaaatccagtcttcacgttctacctcgacacgttctgactgcgggagggtattagaataggaatgcatatattcctttctgtattttaggaatcttctcattaagcctctaacgactactttgtatattgctatgtatttaaaccccttgtgaatatgtcaaggaactcatcaattgagattatacctattctaatatggtatcagagactcttctctaaaccctagcagtcatcttttcctcatcttttcagtcttcttcttcgtgttctctctctctctcttttgctcttctcttcacttttctctctgtatctctagctcttctctccatttttttttctttgtctctcttgatctgcacttaattcatggcgacagttcctccaccaaccgctactactcctgctgcgagtctcactcagatccgtgctcacatccccatcactctcaacatggagaagatgaactacgattcatggcgcatcctcttcgaaactcattgccttagtttctctctcaccgggcatatcgatggcacctcccttcccatcggaccaaccgacgcaacatggaagcaacttgacaatacagttaacatgtggatctacggtaccatttcagaatcgctcctcaactctatcttaaaatcgcagtgctctgcacgtaaactttggctcatgctcgttattccgcgacaacaaagaagcccgtgcaatacaactggaaaatgaactccgaaatctccggattggcgatcgatcggttcatgactattgtcaaaaactgaagtcactctctgatacgctcgccaatgtggattcccctgtctcagatcgcgccttagtgatgcaccttctcaatggacttagctccaaatttgataacatcattaatgttattaaacatcgttccccaccttgctcttttggcgatgccagatcgatgctcattgaagaagaatcgaggcttaaaaccaagctgcaatctcttcctaacaatgatgacaacgcttcttcaccacatgttcttcttgcctcatctcaacaacaagactatcgctcagtccccacaaaccaacaattccagtacggtcgtggcggaggacgaaacaattgaaacaatcgtggaggaggtcgaggaaacagaggtcgtggcggtggcggcaaccctaactacaacggcggtaattggagctctggaaatcaaacatcgaattggcccaaccaacctcaatggccaagttatccacaatggcccaatatgccaatttggcccactacaccacctcctccacaattctatgggcaaccaagatttcacattggctctcaaccaccaacgctgccacaacgcgcacaagggattctcggtcacgcacctccatcaaacgggtctgccttcctcacctcggcccaaccaatcacctctccagcaaacacagacataattcccactacgctcgcaaatgcattcaacacgatgactttctcggatcctaatgatgttggatggtacatggactccgcagctacagctcacctcacggctcagccaggtacactctcttccatcacctcatcctctaattcttctcttcctctcgtcactgtcggtaacggttccacaattcctgtcacttcttatggtcaaacaacaattccatctagttctcgtccccttcacctcaataatgttcttatttgtcctcaaattctaaaaaatctaatttctgttcgtcaatttaccaatgataatctctgctctgttgaatttgatctgtttggttttcttgttaaggatcttcgtacccgagcacctctaatccgatgtgatagccaaggccctttgtactctgtcaacactccctctcatcaagcgcttctcacctcatcatctgcctcaacttggcatcgccgcttaggccatcccaacaactctgttttacgcattttaatttcttctggtttatttgattgttccaaaaacgatatttcttctttatgtcatgcttgccaaattggaaaacatattcgtcaacctttttattcttctactaatacagtttcttctccttttgaaataattcactccgatatttggacttctccggtgacaagcgtgagtggtataaaatactacgttatttttctagatcaattctctcatttcatttggatttatcctcttcgttacaaaagtgaggttttcaaaaaattcttacatttttttaattttgttaaaactcaatttcaaacccccatcaaagcacttcagtgcgataatggcggagaatttaacaatcgtcagattctagattttttctcttctaatggtattcaatctcggttttcttgtccttacacctcgcaacagaatggacgtgccgaacgaacacttcgcacaatcaataaccttgttcgtgttcttctttttcaagcaaacatgccaaccacatattgggttgaagctcttcacatggctgctcatctttttaatattcttccttctagtgccattggtaatcaaattcctttcactcgcttatttcaaaaacctgtttcttacgatcacctctgcgtctttggttgcttatgctaccccaaccttcttccaaccactgctcacaaactctcaccacgttctaccaaatgcgtctttctcggctttccatctaactacgtgggtatcgttgtcttgaactctcctctcgtcgcataatcatttctcgtcatgtagtttttgatgaaacaatttttcccttctctacaccaaat

SEQ ID NO: 6534 - DNA, 6206 bp, Arabidopsis thaliana landsberg
taatttttttattgttgcttcgttgtactcagactgtttatgagttgctatttgatgtgttgttctctatatgtttttgacaggttctacgcgcaaactctccgaataaatgtaaactgctggatttgtctaatgatgatgtgacactacaacaaaacaggtgataaacgacttacacatcagtcgcacagtagtcgtaaaaaatgataatccgactaatcagcgactaacgacgttagtcattattacatagtcgctgaatgagatagtcgtgaattagtcgttgatcgacgactatattacaacaataacacaatcagtaaacaatggtcgttgtatagtcgtatcatattggcgactatttaacgaccatagcacgattaattgtcctgtacgaagcgtgtgaaacacgtggtcgtataatagtcgtataattgtttccgacgatttgacgactatttgacgactaattctatcaatgtaaggaaataattctcgtagtcatataatagtcgtataatgttttacgactattatacgtctcgtggacgattatattgtgactatgtatcttagtcggataataatcggtaattagtgtgactattagacgactattttacgtctaatttgctacctaaatacgactactgagcgactacttgttttgtccgaataagaatttggtcatcgattgttgggtttcttgtttcttgattatccattgttgttttcttgtttcttgttttctccttttttatttgaaatgctaaaaagatgaaaagacttgtatatatagaaaatcaagtacaaatacacatacaattatcttgtttattacacaaacaacttattcaaataaacatatgttcaagtagagtttgggcaaagataatctaaggatcattaggtggaggacttggtagacgttctgtggttgtggtagagtgacttgccatgaagtccaagaactgcggatcggtttggcggagatacttttcgactaaagacaattgctcgagcttgtccttttgctcagctgtgactcgggatgactcagcttctcgggcagcaatctcagatctcttctcattatatgcagcctgctcttctattttcctttgagcttcctgcagccgttcttctagggcttgaaaggatgatgaggaaccggagtgatggcggttggcgctgcctagagtgtcttttagacatcctagtccataaggattgcctcttgaatcattttctgtggactgcaagaaatagagaagaagctcattagtgacagaatattaattggactctaagactcataattatactaaaacatcttacctcgagaaagatggctgtataatcatctagtgtgagctccggaggtcgtgaagagccatcagagacagcagaagcagccgcctctagtgctgacaacctatctctcacattctgctgataagcttgagcaatcttctccgacttctaatcaacaaatgagccatccgacttagtgtgtgtttagatgaacacctaaccaagatggactggtcttcccaacttctcttcctacaaacacaaatcaatatcaacagtagtcaacagacataagaactcaacatactcacaagaaaacagactatattggattgaaaacagaaaacagaaaactctaacttatgagaatctgcagaaacacttaccaattcatcttggatttcttgaaaagattttggcccagagtagtggacgtgaggaccgataccgttacggtcagagagacgggctttggaataggtccgactccttttctgtgctgcttctgtgtcccagtaagcacacattgttccccacagcgtttctccaatccatggaggctgctctcgagttgtccttgcggtgctaaccatgtccttcaagcgcctcttgacaatctcattgaagtaatactggactgtccctgttattaagggatcccagtggtgagttttttacaaaaaaaaggaagaagttagtgaaactacataaacttaacttgaacaagagcagatatagaggaagtttaccgcaaactctaaaaataatctttctcttttatcaactggcacacatgaccaattatagaagggagcatcgaatttttgtaagaaaattctagtgatcttcctaaccaagcgagatcctctgtctcgagtaaacctccaaccacatgcaacaaagaaagaagtaaacatgttacaaaagtgaacaaagttattttcccaaaagaaatacaagtcacacacgactataaaccatgttccacaatagtactgtctcaacaatatagcatcattcacaatcaaagcatcatcatttgtgtaatataaaacaacataacacgagtttagaactgaactaaactaatgaccaagaactaatgtaatcacaacacaacactcaactatgtttgaccgattaacaacagagcatcaaacaacaataaaacaggcattactacataaactaatgagtctagaactaaacttgactaaatgcctaacccgaaaacactagcaacacaagagccaacaatgtttcacaacacaacagccaacaaggttcacattttcggtttgattccaaatccaacaaagaaagaagtaaacatgttacaaaagtgaacaaagttatgttcccaaaagaaatacaagtcacacacgactataaactatgttccacaatagtactgtctcaacaatatagcatcattcacaatcaaagcatcatcatttgtgtaatatagaacaacataacacgagtttagaactgaactaaactaatgaccaagaactaatgtaatcacaacacaacactcatctatgtttgaccaattcacaagagagcatcaaacaacaataaaacaggcattactacataaactaatgagtctagaactaaacttgactaaatgcctaacccgaaaacactagcaacacaagagccaacaatgtttcacaacacaacagccaacaaggttcacattttcggtttgattcacaacagagcatacagaacaagaaaacagggaatttaaagtgaacttaccattcggtttttggccggggaatgggagacaacacacaacaccacgcttctctgccaggcacagagagaatgtcattcagagcaaccacggagtcttcttggagctacggcaacactgcaggaatgccctcttggaagttgttgccttgagacgagggatgactgtgagatgcagtttctggatccggcgaaagaggagggtcttgctgagcagtctcttgtggtggcaacggatctacacgctgtggttgattggtggagtgttggaagagttgctgcggtggtgggtagttacggtagtggggggcaaaggatgaggcgccggcgccggctccttgaggcggaatcgatgcagaaacttgaaccgtcgccgccgccggggtgaaatcgtactgctgcggtagcgaagagggtcttccagcaggcgttgaacctccggctctttgagtcacgtttggtgtggtcttcctctttcgagatcctccacgaccggcgttaggcatcctcttggagatgagagaatcgagaaggatcgaagaggcaagggagagtttggcgaagaagagagaatcaaagaagagagaatcgagatgaatcgagatgtattagggtttgttggtgaaagacggatcgatttagggttaagaagaagaagaagaagaagaagaagaagaagagaatcgatttagggttaagaagaagaagaagaagaagatgaagaagaagaagagaatcgatttagggttaaaaagaagaagaagaagaagaagatcgaagaagatcgaggaagaagaagaagttcgaagaagaagaataatttttggctaagtgtttggatcgaaggggaaatgaatcgaattagggttttcaacactggagtagtcgtatatttgtcgctcatttgtcactaaatcaattgggtttgggcctcgacgattaaaagcccaataacttaccccgtagtcgccccatagtcgccgaatcgtcacaagtgttatgggcttagtaattttgaagcccaacaacatatacaagtgtcgctgtatagtcgcatttttgtcacctttaataatgggtttgggctttgttatttggaagcccaacaacttacaagatactcgctgtatagtcgtatatttgtcaccacctgagttgggtttgggctttgttattcgaagcccaacatcttacatggtagtcgcataatagtcgtaacttcgtcaccttataccttttaaaattatttaataattttttaataattatttaataattattcaaatacttattcaaatacttattcaaatacttattcaaatacatcgtatattacaaaatttattcaaatacttattcaaataattatacatatatttcacacaagtattattcatcttcgtcttctatttcatcttcatccgaggacgataaattacattggaattcatcttctggttcagcatctccaatatcgtaatcgaggatgattagggttacgtctgctaccggatagtctattacaagatcttcaattgtaatctgcaaaacagcttcatcatcctcggtttgcaacagtgtcggatcagtattttcatattgtccagaaatgtttccccttggattgacctttaaaacactgagccaaatgttctttggtttctttctatatggatatggaatataacaaacttgatctgcttgagatgctgttcaaacatgttatacatatatcaacaaaaatatatacaacattatttattaatgaattagaaattttaagtatacttaattacgtaccaagaataaatggctcgtatttattgtatttcctcgtagatagaacatctacaacgccaccatggtttcggcgatttcctctcccgatctttgggtcataccacttacacttaaaaagtgtgatcctcaaattgacgatgccctcatactcgagttctatgacatcagttaaggtaccgtagaaatctgcttcatcagatgaatcaacgtaattttcacctttaacacataccccatagttacatgtctttcgtccagcaccgtgggtttgcgtatgaaacaaatatcctcttgtgaaatacattggccaagttttaaccttgttcaaaggtccttgcacaatctcttgaacccaagtaggaaatggagaattactgttccaatatgttacctacataatatagataaacaatatcaatatgatcttaaattaaatcacgctagctacaagaaaacagacaaatagttacattcatgaaccaaaattacagtagacttacatattctttaacccatagatgatattcttcagctcttctgacgtagagttctttttcggacaaggatggatatttcgcagaaagataatcctcgaacatactgtctcaacaaacgaagacaaataaatcaaagtgatcttatctatgaataaatcaaagtgattaaaaatacctctcaaatggtttaaaatagtcacaatttcttaaaacatatgcatgtgcattttggtaatctttctctgaaagccattctacatttcaccacttggacgaccgacgtgcatacatatgttaggtactccagggacatgatatataggaacttcacctttatcgaatcttgttaacctgatctatgtaattgaattagttctgaagtatagcaagtaggattaaataaataaatatatttaccttgattttgtttatatatgatcggtaaagtagtgctctgaaaaataagcaatttcgtcattgatatatgactcaacaattgattatgccgcatatcttttattctttgcttttcctttcaactttttgaaaacctctcaaatgggtacatccacctatattggatagggccacccaattccagcttcgtatgtgagatggataggtaggtgttccataacatcaaaaaatgatggtagaaaaatcttttccaagttatagatgattaaaactatgttttgtttgagaatttgaacgcgacttttctgtaaagttctcgaacataagtcctggaaaaatgctcaaattcttaaaatatatgttcaagttaaatgattagataaaaaaagtttggcaaataaaatagtaaga

SEQ ID NO: 6535 - DNA, 4859 bp, Arabidopsis thaliana landsberg
tcactcgatcccatcgcccctctctccacaaatacttgacctcgccacttcttttcctcaaacactcttctctcaaacactcgaccaacactcttcaccttatcctttcttctccgtcactccacttcaacaccatcatcatccgtccaaagcagcactcgacctcaccatctttcttccccacgcactcgaccgcttctcactcgcctcttcaccaccgtctcgagctaccactcgaccgctcctcgccatcaccacctctcaatcgtctcaacttcgctcgaccgcttcacgccatctctttcaagctcgtctctcatcactcggccacaacgctcatcatctctccatctacgacatcactcgaccaaggtgccatcgttctctcatctctcaaatccagccatcactcgacaacaccaccgtttcttctcttccgcgagctcaagttcactcgaccgctcctctcaaagtcactcgatctagccgcttctcaacgcctccccatcgtttccatcgccgctgctctcatccccacgaaagctcgtcatcgccgcttcactcgattaagcaaccagactcgacgtctttcaaaccgcttaaccatctctcgcctctcacggtcactcgatcgccaagcacaaccaagggatcactcgaccacgtgttttccaaaccgaaaaaaaaaaaaaataaaaataaaaataaaattttttaagaatttttggtacactcgaccggtttactctattggtttgtgtttttagttttgttggaactaacgtattaacgtttatttttgagttacatttgttttcaggtttcatcatgagtaactatagtggagaattctctatggaccctgactacaatgtggatgaagctgagtcctggtccgctagaccgagagagcaacatgtttaccagagcttcaaggatgaattcgaacgccctgcagcccgacgtaatcagagaagagctgaaatcgccagaggaaagagagcgatgtcaagaagatatgagctgattgatgaggatatcgagactgagtatgagcaagagtcatggcgcagggagacgaagctgttgaacaaacccgacgaggttatagtggaggagtatcagctttcgatcaagaagttagaagaactgtttggtttccctagtggaaagggaaccaaacccagatttgatagagaggagcttaaggatttgtgggccactatagggaacaatctaccgctaaactcggcgcggtctaagagcaaccaaatctggagtcctgtgatccgctactttcagcgatcggttgccaacgtcttttactccagggagtctacaggcaccgtatctaacacggacatggagatgatagattatgcgcttacaaaggggaagaatgttttgagaggagatctcaacaacgcaccaccagtaatgcctctgttgatccatctgtgtggatacaggaagtgggcgttgacgaacgggaagaagaaggtgagaggagcactatgcgtgggtggcattgtgacgccaattctggaagcttgtggagtacccctcaaggaaccagggttagcaccgaggatgatggacttggatcatttgcgccgatgtgagttcttggagtttgacatggctggcgaccttcaccgctacaggttcgagcattcatcgattagaatcgccaacattcttctcccctgcattgacgctactaggattctcgagggcaagaacattgacttgaagcctgcgcttcaagatctttatttcgagggcagtccgccaactgaggagataagtcacaccgaaggaggtacaacagaagatgttgatgagacagatgatatagatgaggcggagttggacacaagcatgtatcatttcagtgagcatatacctccagcgagggaaagcaagagtttgagcgaagctcacaggaacaacaacaagctgcagaagtggtgcaagaagcaggataagctactcgtcaagtgcctcagggctatcaagtttctgaaggacaagatcagctgctcctcttccactacagccattccgcagggacaactttctcaggacatgccttcgaggagatatgacgcgcccgagccaagtcggcgcaggcctgagcctagagagcaggagattccgcatgtccctgcgaggcattcatcattcgagcctcgtgaatctgggaggagaggaggaccacactcactcgatctagcagcaagagcagacgacttctacagtctcgtagtttacgcgaccgcggtgctggccgtagtagaagaagagaggtcgagtatcctcagagcggtgctggctgccacagagctgatgagatcgagtacccacctgctggagctgatacagaacaaggcggttcgtctatggcctgggagcaatcataggcagccattgacgagcaactacgttcattcttcgactgaggtaagcgcctcacttcaccattgtattatatcatctgttgtgatttgtttcttcattttttgtttctgtgattggatttgtcctgagtactctcttccaagtttattcgcacagtggactgtgtgatttaagtttgggggagggctcaggaagtgtgtgttgcattgtgtatatttttgagtctgcattcatctaaggcatagaaaaaccaaaaaaaattgaaaaatttcagaaaatgatttcacaaaaaaaaaagagtgttcatgtagttgcattacatttaggatcgagtctacagtgtttcatttaggattgttgcatatgcataggggatgatgatgagatagccttgtaagcattttgattcactggataaactcagtgccctcgttgctagttgtctgccgcgtagtcaatgaatttgaaataaaactgaaccatgcctagattgctctactcgaccacactgtcatgatctgatactattccctatcaatttgaacctgaatttgatcttgaattatcatgtctgcatcaaattttaactcatggataccctaaattaccgggattttcttattcattttgatcactcttgttaatctaagtagttggctctcctaattagagcagttaacccgaacccaatcctagactttctttcaagccctatatcacttgtgagtgtttgtgaggtcttattccgattaagcttggtagaaagtgttaggttcgtaacgatagagatagtgtctcatgtagttctagttcgcatttttcggactagataggactaggtgggcgcttatagtttgggttgggatgtgtttaaaagaaaaaaaaggggttgattcatcgatgagaaaaggtaaaagactctaggtgaagtaagctaaagaagcagaaaaagtctagtaaaggttttgggatttgtaaagaaaagaaagagttcttgttagctattggagatgggcaaaagcccttggttttaaaatgttaaaaacaggaaccttagttgttaaagaaatccaaatccgctagatgtatcaaagtgttgagaaagcttctcctagagttaagagaaaagaaaagaatgattagaaaaagggcttaaaagattcatgaatgcaaagggtagagttaagttcttatattgggattggagatgggattaccattagagcttcatttgatgtactctgggtagatgggatcttatctctgtatgcatagcttgggacttacctttagcattctactaaagcttaatcattttttttgagagatcccctgttactgaagcctattctgtaagggaccatctttgtctcttgaccttttaccttagccaaatgagttctttgatgatgcattgcttgattcacgttcctaaactaatgaatgttaaagggattggtagatttgaatgcatgtgtaggtcgagtataagagtgggattgaactataataaggcatggctaatatttttagtagaattcgatcatatcgcatcctagaactgccaacttggacattgattttatctgatttatctgatgctttggttctgaatccccaccttcaaacctctctttcagtttatgtctacttgtttgcttgagggcaagcaaagactaagtttgggggagttgatatgtctataatttgcatgttctacacatccttttaacaccattttgagtctagtttcatctatctttcatagcattcaccatcatttttgtacattttgcatctttagacgagtcttggactagtcttgcatacattctgcattctagagttgttttaggtgttttggagctattggtgctcagaaagaggaaaaatagaacaaaaagtcacatttccaccaacatacttgatcaccagtagcagagagggaagcagtcagctcagcagtccatcaacacacttctactcgatcgcaaaggagaccagcaggtccattctgccagatatacttgattgaagagatgaggaggcagtccattctgcagttctactcgatcatagagctgaaggagtccatcctgacaattctactcgatcggagagacgaccaagcagtccactttgtgagtccaccaatatactcgatcggagaggagaagaaccagtccatcgtgacagctgaccaatatactcgatcagagaggccaagaagcagcctagaccattctgtcaaccaacttactcgaccaccacctcgaccctctgatcaatccgcacttaaccagacaacctgagaaacggaaatacaagagaagagaaggcccattcgaagccctttcgaagcccattcgaagcccacttcgaagctcattaggaagcctgctttgagccgacactcttgatcacatcgtccatggcag

SEQ ID NO: 6536 - DNA, 3059 bp, Arabidopsis thaliana landsberg
ttttcttcggttgagaaactggtttccagaagcatgaggctgaccagttctctaaccagatcaagtttgagtttggattggatgtatcatatgcgtgtacaggtagcacttttggtgatgaagcgagaagctgtaaacaaaattatccatcaagatctttaaataaaattagagactccatagtataaaagagatattggatacagtgaacatcattataataaataactctaccaacaagcgtaccttctgagcaaaagcattggctgttagtttcttgattccaaggtaagcatctgtaggatttgcaagcttgttcccctgataaaaaaagccagttctaacaattatttccccaccaacccaaactagaatatcttcctcgactaagtttgtatttaagtgtaagtttgaacttacaaagaaatgaaagtatcattacctgaagtagctgcaatctgcatttcctataaacttgaactccaatgtcggacttcctgatctctcttcctcgagcaaatgcttgcaacctgacaattcccatgacagagaaaagagttgcaacagcttgtctcctaacaaggtgaccacggataagcgcttgtagccttattatgcctttgagtgcccaaaaagcacgccgagccttcacacaaagagctcatgttaggatatacaaaaagacaacacaccagaagcagcaatcaagagagagagagagacaagcctaataaaatcaaaacagctggaattattaccaagtaacctctaaacgcagcctgcacagacgttgctgcaatctctcgttggattctctctgcatcagataatgaatgatcttgaacaggtgcaacattctgagaatctgttgattttccttcaggaagctcaatttcatcatctgagatctcttcaggtcctacattttgagtctctaacataccaccacttctatcaacggtattggtctctgcaacttcaaaagatggaagatctgataccacatctgattcttccacctttgaagtaaccagtacctcttttccactcacaactctctgcgcattattataactataattagaacaaaaaaaaaaaaaaaaaaagacaatcataagcaaattggtagcctaaaaccatcactgttttctcaattatgatccaaattctccacatacagtatttaatcatcacatacataatatagaattctcttacaaaagcgttacctctttgtctttggaaccactagatttagaagtttttttcccaagcaatacattcttcaaccattttgtagacttccccataatgtatagaactaaaacaaacctgcattgcccaagaaacaacacaagccaatattagtatgtgaatatggcaactactagtctaccacaatagtcaaaatgaagaagtcttttaattcattaattcgttatggcaaaaaaggagagtaacacattatcttgttctaatcaactctaataataagcttataaagataaacctaatgataaataaatgtaagaatcaagaaagaacataaaaaaaaacaatgattaccatataaatttatgaagtgaaattaccagatctggaactcagactgaaaaagaagaaccctaaatgactcaaaatccactttccaaaatgaaaaacaacaacaaacaaacaaaaaacaccgacagagtcaaacaacaaatcccaaacagagagatccttctaaaacccaacactactcgaacaatgtcttaaaataaagtcggtttaaagttggagtaaccgtcggatctccgttctaaatccaagtccgattcagaccaaacaaaaacaataacaaagaaggagataatataccgtatattagaaatttagagttgtgttagttcaatgcttccatagcgtctctctctctcttcctgggagctttgatgctctctaaagaactgtttttctctttggtggtggtttcagagactttcagtgaccagacggaaagagaaaataaatattttgcgcaaaataatatttctaattttaaccaaaaagtaagcgagcatctccataactccaatcttacgccgttgatttctagccgttggatcttctctgaaatttagtatttttgtcaaacatttttagtttaactaaaattaatttttacagaaaaattcagaactcgaaagagggaaaattaaagaagagttaagagagcaatctataaagaaaaaaagctgaaaatcattaaatgcgataattaaaatagaagaaaaagggtaatttagtctaaaaatttgggtatgtcatcagaagtctagattttaaaatacaacagtaacagatatttaattgaaattgctcagattttgttatagtcgtcgagattacttcgaaaacaagtgtaagaataccgcgacgttctaatgaagcattcgaagtaaatttacaatcatacccttgcactgtcgttgaatacgaaagaccaacttttgcaccagaggcacgtgcgaaatttattaaccagtgcctagtggttcccgctccagtgaagtagtctcgttaaccgttatgggcctaagcccaatccataaaattattataaaaaaaaaaatgatcatggaagaaaaaagcttgtgattgtgagacatttcatcgaacacttggtgatcaatatttgaaaacgaagagcacagccaaaattcgataaaccctaaggaacagtgagatggagaagaagaaagcaatgcaaattgaaggttacccgatcgagggattgtcgattggtgggcacgagacgtgcatcatatttccatctcttcggatagctttcgacattggtcgttgcccacatcgcgcaatttctcaagacttcctcttcatctctcactctcacatggatcatatcgtaagtatcttgaatcttctataaaaagacttgaaatttcggattatattttgcaaagatccttcttttgactttttgttttaagaacaattttgataagcctttgttgagactgccaccatgtgtttattatcattagcatattgctctg

SEQ ID NO: 6537 - DNA, 1577 bp, Arabidopsis thaliana landsberg
  unsure (1)..(1577): unsure at all n locations
tcatgccaagaaaagtaaaagcatcctcatccttttaatatgttaatcgaatttgttaattaacttctgcttttcattttatgttaacgtcaatgtgtgaatatagactcatgtacatatttatgatatgtatgatatattgatatatagcttggtatggtgaggattatgacgtaacgtcggaactaggaacatttgtactcctcacataattttggtcctgtctataagctagagatgtttaatttatagatttcggttatgtttcagaactttttcatctttggttttaatttaaaatcaaattgtatcattagtgttcttatataatatttgtattattggatcagtgtatcaagtttgtgtatagataagtatatataagtggtgtgacactaactcttgttttttgtttggttggaaacagaatgtgaagtgaactttgagtatatggactacaaggtcttgacaaagaggtgcaaaggtccagcgtttccagccaaagaatgttgctctgcttttaaagaatttgcatgtccttacgtgagtcagatcaacgacatgaatagtgattgtgcacagacaatgttcagctacatgaatatttatggaaactaccctactggccttttcgctaacgagtgcagagaaaggaaagatgggcttgtttgccctttaccacctctctattcacataacctaaacgcctcaactgctgattcgactcctcgttttatctcgctgttgatctctgctgcaaccgctgtttttgctttgttagtgttgacttgatcaatcaaaggaaattgaaagagccaaagagtgattacattttgataccatattagctaacaaactagatagaattatcaaattgttctgttactgaccaagtgtccaagtgtaaagaatacttgacctccaaaataaacaaaagaagaagcgagacttacttgattaattttattaccagaggcaaaacttatagccgaaatgttaacaagaaaagccaaaagccaaaacaaaactcagtttacatcaaaaatcaaaagtcatgtgggtacagtatctggctccggcaacaattgagacaggagcaacaaaactactgttgacagcaatactaactgtataagaacgtatgaagtgatcttacatgctctcttcttgatggtcccggtgatttctatgcaatcgttttgcaggtcttgagctctgtttgtaaaatttgcagccttcgtttgtactcttcctagcttattcagcgtctcatgggtttgctcttctgccaatgactcttgttcatcaattaacttcatctgactgtttaagttatcgatagatcttgaatatatcagatatnnnnnnnnnnnnnnnnnnnnnnnnnnnnnnnnnnnttcaaccacaatctctgttcctccccacgagtgtttgctttggttcgtggtggattcaaggtcacggatgtgtgattctttcacctcaagcatggaccttgtttcttctaacatgttctccagttgttcaacattgtttaccagggttacaatctcggggtgaggtgaatttgcttcgcc

SEQ ID NO: 6538 - DNA, 394 bp, Arabidopsis thaliana landsberg
aacatgatactgctggctcataacaggaaatagctatgtaacagcagtaaaaataatgcgtgtttagatacaatccgcagcaaaaaaataatgagaatggctacctttttcaagagcatattgcaaggccaagaaaccgttgatggcctctgttaatggatccatttcatctgagtaacgattgtccgtgtttatcgactctccgccttctcctcccgcatcatcttttctcattgacatttccccattttcaccattgtagtccatcattcttccactctgctttcttgagtcagattccaagctggaataagagttttccttctcgaaatcgacactttctcctctatgtttcttactattctctacacgaatgtttcctccctgacctgaa

SEQ ID NO: 6539 - DNA, 515 bp, Arabidopsis thaliana landsberg
  unsure (1)..(515): unsure at all n locations
aacttcatctgactgtttaagttatcgatagatcttgaatatatcagatatnnnnnnnnnnnnnnnnnnnnnnnnnnnnnnnnnnnttcaaccacaatctctgttcctccccacgagtgtttgctttggttcgtggtggattcaaggtcacggatgtgtgattctttcacctcaagcatggaccttgtttcttctagcatgttctccagttgttcaacattgtttaccagggttacaatctcggggtgaggtgaatttgcttcgctgacttgttcatgatgctgtggcattggttcattctcgatctcctggaattgctgaacctctgcaaatgaaatttcataaagagtcacattaaacatcataatcataatcattgttcatgtgatgttattagttgattccaacatgataatgcaggctcataacaagaaatagttatgtaacagcagtaaaaataatgcangtttagatacaatccgcaacaaaaaaataatcagaatggctaccttttt
